(19) United States
(12) Patent Application Publication
(10) Pub. No.: US 2023/0212319 A1
(43) Pub. Date: Jul. 6, 2023

(54) NOVEL ANTIGEN BINDING DOMAINS AND SYNTHETIC ANTIGEN RECEPTORS INCORPORATING THE SAME

(71) Applicant: University of Southern California, Los Angeles, CA (US)

(72) Inventor: Preet M. Chaudhary, Toluca Lake, CA (US)

(21) Appl. No.: 17/912,423

(22) PCT Filed: Mar. 16, 2021
(86) PCT No.: PCT/US2021/022641

§ 371 Date: Sep. 16, 2022

Related U.S. Application Data
(60) Provisional application No. 62/990,396, filed on Mar. 16, 2020.

(51) Int. Cl. C07K 16/46; A61P 35/00; C07K 14/725

(52) U.S. Cl. CPC C07K 16/468; A61P 35/00; C07K 14/7051; A61K 2039/5156

(57) ABSTRACT

The disclosure relates to compositions and methods of generating synthetic antigen receptors or SAR (e.g., SIR, zSIR, cTCR, ab-TCRs, AABD-TCRs, TFP, TACs etc.) and antibodies (e.g., bispecific antibodies, DARTs etc.) comprising one or more novel antigen binding domains. SARs as described comprise single chain immune receptors (e.g., 1^{st}, 2^{nd} and 3^{rd} generation chimeric antigen receptors, TFPs. Tri-TAC and the like) and multiple chain immune receptors (e.g., SIR, zSIR, cTCR. ab-TCR. AABD-TCR. αβTFP, ydTFP, recombinant TCRs etc.). SARs are able to redirect immune cell specificity and reactivity toward one or more selected targets exploiting the antigen-binding domain properties.

### CROSS REFERENCE TO RELATED APPLICATIONS

[0001] This application claims priority under 35 U.S.C. §119 from U.S. Provisional Application Serial No. 62/990,396, filed Mar. 16, 2020, the disclosures of which are incorporated herein by reference.

### FIELD OF THE INVENTION

[0002] The disclosure relates to compositions and methods of generating synthetic antigen receptors or SAR (e.g., SIR, zSIR, cTCR, ab-TCRs, AABD-TCRs, TFP, TACs etc.) and antibodies (e.g., bispecific antibodies, DARTs etc.) comprising one or more novel antigen binding domains. SARs as described comprise single chain immune receptors (e.g., 1^{st,} 2^{nd} and 3^{rd} generation chimeric antigen receptors, TFPs, Tri-TAC and the like) and multiple chain immune receptors (e.g., SIR, zSIR, cTCR, ab-TCR, AABD-TCR, αβTFP, γdTFP, recombinant TCRs etc.). SARs are able to redirect immune cell specificity and reactivity toward one or more selected targets exploiting the antigen-binding domain properties. The SARs, as described herein, when expressed in immune cells, confer on such the ability to recognize a target antigen in an MHC-dependent or an MHC-independent manner. The disclosure describes a useful configuration of a SAR with two or more antigen binding domains. The disclosure describes useful antigen binding domains, a useful configurations of such antigen binding domains and vector constructs for construction of unispecific, bispecific and/or multispecific SARs. The disclosure also describes novel methods for selection of optimal antigen binding domains for incorporation into SARs. The disclosure further relates to improving the quality of SAR expressing T cells by expanding them in the presence of a SMAC mimetic and/or NIK agonist. The disclosure also described methods of manufacturing SARs using a device or a container containing a gas-permeable membrane under normoxic and hypoxic conditions. An exemplary device with gas permeable memebrane is a GRex flask. The disclosure also describes novel tags that can be added on the SAR construct and used to identify, isolate and eliminate SAR-expressing cells. The disclosure also provides use of thermostable luciferases (e.g., Photinus pyralis (lucPpy) and Photuris pennsylvanica (lucPpe) luciferase) for in vivo bioluminescence imaging applications. The disclosure also provides novel antigen binding domains and SARs incorporating them.

### INCORPORATION BY REFERENCE OF SEQUENCE LISTING

[0003] Accompanying this filing is a Sequence Listing entitled “Sequence-Listing_ST25.txt”, created on Mar. 16, 2021 and having 101,792,917 bytes of data, machine formatted on IBM-PC, MS-Windows operating system. The sequence listing is hereby incorporated herein by reference in its entirety for all purposes.

### BACKGROUND

[0004] CARs are synthetic immune-receptors, which can redirect T cells to selectively kill tumor cells. Unlike the physiologic T-cell receptor (TCR), which engages HLA-peptide complexes, CARs engage molecules that do not require peptide processing or HLA expression to be recognized. Initial first-generation CARs were constructed through the fusion of a scFv (single chain fragment variable)-based antigen binding domain to an inert CD8 transmembrane domain, linked to a cytoplasmic signaling domain derived from the CD3-ζ or Fc receptor y chains. To overcome the lack of T-cell co-stimulation, first generation CARs were further modified by incorporating the cytoplasmic signaling domains of T-cell costimulatory receptors.

[0005] Despite the success with CAR-T cells, there are several limitations to this approach, including toxicities such as “Cytokine release syndrome’ (CRS) and neurotoxicities. The inclusion of costimulatory domain in the CAR construct results in non-physiological tonic signaling through the receptor, which in turn could contribute to their toxicity and lack of persistence. CAR-Ts that have scFv as their antigen binding domain can also form clusters on the membrane due to crosslinking of heavy and light chains of different SAR-Ts resulting in tonic signaling. Furthermore, scFv used in CAR-Ts are also usually derived from mouse mAbs and thus have potential immunogenicity issues. Without wishing to be bound by theory, these problems are likely to be compounded when scFvs are used to design CAR-Ts having bispecific, multispecific, bivalent or biparatopic antigen binding moieties.

[0006] To overcome some of the design limitation of conventional 2nd generation CARs, several alternative designs, collectively termed next generation CARs, have been described, including Ab-TCR (WO 2017/070608 A1 incorporated herein by reference), TCR receptor fusion proteins or TFP (WO 2016/187349 A1 incorporated herein by reference), Synthetic Immune Receptors (SiRs) (see, WO 2018/102795 A1, incorporated herein by reference), Trifunctional T cell antigen coupler (Tri-TAC) (see, WO 2015/117229 A1, incorporated herein by reference) and _{Z}SIR, (see WO2019232503, incorporated herein by reference). AABD-TCR platform is described in this disclosure. These alternative CAR designs, in general, lack a co-stimulatory domain. These alternative CAR designs may comprise of a single chain (e.g., single chain SIR, or εTFP, γTFP and δTFP) or more than one chain (e.g., double chain SIR, cTCR, zSIR, αβTFP and γδTFP). However, the problem of non-specific aggregation of scFv chains and resulting tonic signaling also affects the next generation CAR designs that comprise of scFv chain(s) for antigen binding. This problem is further compounded when scFv fragment are used to design multi-chain synthetic antigen receptors, such as SIR, cTCRs, Ab-TCRs having bispecific, bivalent, biparatopic, multispecific, multivalent or multiparatopic antigen binding moieties.

[0007] The present disclosure provides a solution to the above problems through the design of Synthetic Antigen Receptors (SAR). The term Synthetic Antigen Receptor (SAR) as described herein comprise receptors with the backbone of single chain immune receptors (e.g., 1^{st}, 2^{nd} and 3^{rd} generation chimeric antigen receptors, TFPs, Tri-TAC and the like) and multiple chain immune receptors (e.g., SIR, zSIR, cTCR, ab-TCR, AABD-TCR, αβTFP, γdTFP, recombinant TCR, and HLA-independent TCR etc.).

### SUMMARY

[0008] The disclosure describes compositions and configuration for making a Synthetic Antigen Receptor (SAR). In one embodiment, a SAR comprises a polypeptide comprising two or more antigen binding domains. In another embodiment, a SAR comprises a polypeptide that binds to two or more antigens. In yet another embodiment, a SAR comprises a polypeptide that binds to two or more epitopes of one or more antigens.

[0009] In an embodiment, the disclosure provides a SAR polynucleotide that encodes for a polypeptide which comprises an autonomous antigen binding domain (AABD) or a fragment thereof that is joined in frame to a vL, vH, Va, Vb, Vg, Vd, Ig domain, Ig like domain or a combination thereof via one or more optional linkers. In an embodiment, an AABD is any domain that can bind an antigen in an autonomous manner, i.e., in the absence of another domain. In an embodiment, an AABD is anon-scFv domain. In an embodiment, an AABD is does not comprise a vL and vH fragment that form a Fv domain. In an exemplary embodiment, an AABD is a vHH, single variable domain antibody, FHVH (fully human vH domain), SVH (single vH domain), SVL (single vL domain), non immunoglobulin antigen binding scaffold (e.g., centyrin, affibody, DARPIN, D domain etc.), ligand binding domain of a receptor, receptor binding domain of a ligand, autoantigen, adaptor binding domain, epitope, mimotope, a single variable domain of a T cell receptor (svd-TCR) or a fragment thereof.

[0010] In an embodiment, the disclosure provides a SAR polynucleotide that encodes for a polypeptide which comprises at least one autonomous antigen binding domain or a fragment thereof that is joined in frame to a vL, vH, Va, Vb, Vg, Vd, Ig domain, Ig like domain or a combination thereof via one or more optional linkers. In an embodiment, a SAR polynucleotide encodes for a polypeptide which comprises more than one autonomous antigen binding domains that are linked in frame via optional linkers.

[0011] In an embodiment, a SAR polynucleotide encodes for at least one polypeptide which comprises one or more autonomous antigen binding domains or fragments thereof that are joined in frame to a first module comprising vL, vH, Va, Vb, Vg, Vd, Ig domain, or Ig like domain or a combination thereof via one or more optional domains, and where the first module is connected via an optional linker to a second module that comprises a transmembrane domain. In an embodiment, the optional domain is a linker domain. In an embodiment, the second module comprises a connecting peptide, a transmembrane domain and an intracellular domain. In an embodiment, the second module comprises a TCR constant chain or a fragment thereof. In an embodiment, the second module comprises a constant chain of TCRα, TCRβ1, TCRβ2, TCRγ, TCRδ, or pre-TCRα or a fragment thereof.

[0012] In an embodiment, a SAR polynucleotide encodes for a polypeptide which comprises an autonomous antigen binding domain that is joined in frame to a polypeptide that comprises a transmembrane domain via an optional domain. In an embodiment, the optional domain is a connecting peptide. In an embodiment, the transmembrane domain belongs to a T cell receptor constant chain (e.g., constant chain of TCRα, TCRβ1, TCRβ2, TCRγ, TCRδ, pretc. R-.α etc.). In an embodiment, the connectin peptide belongs to a T cell receptor constant chain (e.g., connecting peptide of TCRα, TCRβ1, TCRβ2, TCRγ, TCRδ, pretc.R-α etc.).

[0013] In an embodiment, a SAR polynucleotide encodes for a polypeptide which comprises an autonomous antigen binding domain that is joined in frame to a polypeptide that comprises a connecting peptide and a transmembrane domain. In an embodiment, the transmembrane domain belongs to a T cell receptor constant chain (e.g., constant chain of TCRα, TCRβ1, TCRβ2, TCRγ, TCRδ, pretc. R-α, etc.). In an embodiment, the connectin peptide belongs to a T cell receptor constant chain (e.g., connecting peptide of TCRα, TCRβ1, TCRβ2, TCRγ, TCRδ, pretc. R-α etc.).

[0014] In an embodiment, a SAR polynucleotide encodes for a polypeptide which comprises an autonomous antigen binding domain or a fragment thereof that is joined in frame to the N-terminus or near the N-terminus of a vL, vH, Va, Vb, Vg, Vd, Ig domain, Ig like domain or a combination thereof via one or more optional domains. In an embodiment, the optional domains are linker domains,

[0015] In an embodiment, a SAR polynucleotide encodes for a polypeptide which comprises one or more autonomous antigen binding domains or fragments thereof that are joined in frame to the N-terminus or near the N-terminus of a module comprising vL, vH, Va, Vb, Vg, Vd, Ig domain, Ig like domain or a combination thereof via one or more optional domains. In an embodiment, the optional domain is a linker domain.

[0016] In an embodiment, a SAR polynucleotide encodes for at least one polypeptide which comprises one or more autonomous antigen binding domains or fragments thereof that are joined in frame to the N-terminus or near the N-terminus of a first module comprising vL, vH, Va, Vb, Vg, Vd, Ig domain, or Ig like domain or a combination thereof via one or more optional domains and where the first module is connected via an optional linker to a second module that comprises a transmembrane domain. In an embodiment, the optional domain is a linker domain. In an embodiment, the second module comprises a connecting peptide, a transmembrane domain and an intracellular domain. In an embodiment, the second module comprises a TCR constant chain or a fragment thereof. In an embodiment, the second module comprises a constant chain of TCRα, TCRβ1, TCRβ2, TCRy, TCRδ, or pre-TCRα or a fragment thereof.

[0017] In an embodiment, a SAR polynucleotide encodes for at two polypeptide chains with each chain comprising 0, 1, 2 or more autonomous antigen binding domains or fragments thereof that are joined in frame to the N-terminus or near the N-terminus of a first module comprising vL, vH, Va, Vb, Vg, Vd, Ig domain, or 1 g like domain or a combination thereof via one or more optional domains and where the first module is connected via an optional linker to a second module that comprises a connecting peptide, a transmembrane domain and an optional intracellular domain and where the first polypeptide chain and the second polypeptide chain form a T cell receptor module (TCRM) that is capable of recruiting at least one TCR-associated signaling module when expressed in a T cell.

[0018] In an embodiment, a SAR polynucleotide encodes for a polypeptide which comprises an autonomous antigen binding domain that is joined in frame to a polypeptide that comprises a hinge domain and a transmembrane domain.

[0019] In an embodiment, a SAR polynucleotide encodes for a polypeptide which comprises an autonomous antigen binding domain or a. fragment thereof that is joined in frame to a polypeptide that comprises a hinge domain, a transmembrane domain and one or more intracellular signaling domains. In an embodiment, the intracellular signaling domain comprises a primary activation domain. In an embodiment, the intracellular signaling domain comprises a primary activation domain and one or more co-stimulatory domains. In an embodiment, the intracellular signaling domain comprises one or more co-stimulatory domains. In an embodiment, the intracellular signaling domain lacks an activation domain. In an embodiment, the intracellular signaling domain comprises an activation domain containing one or more ITAM motifs.

[0020] The disclosure also provides polynucleotides encoding any of the SARs of the disclosure along with any accessory module. The nucleic acid sequences of the exemplary polynucleotides encoding SARs are provided in (Tables 25-36 and 41-50). In some embodiments, the SAR components and any accessory modules (e.g., therapeutic controls) are encoded by a single polynucleotide molecule. In some embodiments, the two or more SAR components (e.g., two chains of a double chain SAR) and the accessory modules are encoded by separate polynucleotides.

[0021] In various embodiments, the polynucleotide molecule(s) encoding a SAR described herein comprises one or more antigen specific coding domains that encode one or more antigen specific domains. In some embodiments, the antigen specific coding domain(s) of a SAR comprises one or more V_{L} (or vL) fragments. In some embodiments, the antigen specific coding domain(s) of a SAR comprises one or more V_{H} (or vH) fragments. In some embodiments, the antigen specific coding domain(s) encodes one or more scFVs (or scFvs) specific to antigens on target cells such as, for example, cancer cells. In some embodiments, the antigen specific coding domain(s) encodes one or more Fv fragments. In some embodiments, the antigen specific coding domain encodes one or more Fab fragments. In some embodiments, the antigen specific coding domain(s) of a SAR comprises one or more (Fab′)2 fragments. In some embodiments, the antigen specific coding domain of a SAR polynucleotide encodes an autonomous antigen binding domain (AABD). In some embodiment, the antigen specific coding domain(s) of a SAR polynucleotide encodes one or more single domain antibodies (SDAB) or antibody fragments such as, for example, single vH domain (SVH) or single vL domain (SVL). In some embodiment, the antigen specific coding domain(s) of a SAR polynucleotide encodes single vH domains that are fully human in origin (i.e., FHVH). In some embodiments, the antigen specific coding domain of a SAR polynucleotide encodes one or more camelid V_{HH} (vHH) domains. In some embodiments, the antigen specific coding domain(s) of a SAR polynucleotide encodes vHH domains that are humanized. In some embodiment, the antigen specific coding domain(s) of a SAR polynucleotide encodes variable domains derived from T cell receptors (e.g., Va/Va, Vb/Vβ, Vg/Vy and Vd/Vδ). In some embodiment, the antigen specific coding domain(s) of a SAR polynucleotide encodes a single chain TCR (scTCR). In some embodiment, the antigen specific coding domain(s) of a SAR polynucleotide encodes a single varianble domain TCR (svd-TCR). In some embodiments, the antigen specific coding domain(s) of a SAR polynucleotide encodes one or more ligand binding domains of receptors. In some embodiments, the antigen specific coding domain encodes one or more non-immunoglobulin scaffold such as, for example, a DARPIN, an affibody, an affilin, an adnectin, an affitin, an obodies, a repebody, a fynomer, an alphabody, an avimer, an atrimer, a centyrin, a pronectin, an anticalin, a kunitz domain, an Armadillo repeat protein, or a D domain (α3D domain) etc. In some embodiments, the antigen specific coding domain(s) of a SAR polynucleotide encodes one or more adaptor binding domains (e.g., RZIP, EZIP, E4, K4, NKG2D-AF, NKG2D-YA etc.). In some embodiments, the antigen specific coding domain(s) of a SAR polynucleotide encodes one or more Fc binding domains (e.g., Fc binding region of CD16, CD32, or CD64 etc.). In some embodiments, the antigen specific coding domain(s) of a SAR polynucleotide encodes one or more autoantigens. In some embodiments, the antigen specific coding domain(s) of a SAR polynucleotide encodes one or more epitope tags or mimotopes. In some embodiments, the antigen specific coding domain(s) of a SAR polynucleotide encodes one or more ligand-binding domains of receptors. In some embodiments, the antigen specific coding domain(s) of a SAR polynucleotide encodes one or more receptor-binding domains of ligands. In some embodiments, the antigen specific coding domains of a SAR comprises at least one Fv (e.g., vL and vH fragments) and one or more AABD (e.g., SVH, SVL, vHH, svd-TCR, DARPIN, affibody, Centyrin, D domain, epitope, mimotope, EZIP, RZIP, E4, K4 etc.). In some embodiments, the antigen specific coding domains of a SAR comprises at least one TCR variable domain (e.g., Va/Vb or Vg/Vd fragments of a TCR) and one or more AABD (e.g., SVH, SVL, FHVH, vHH, svd-TCR, DARPIN, affibody, Centyrin, D domain, epitope, mimotope, EZIP, RZIP, E4, K4 etc.). In an embodiment, the antigen specific coding domains of a SAR comprises one or more than one (e.g., 2, 3, 4, 5, 6 or more) AABD (e.g., SVH, SVL, vHH, FHVH, svd-TCR, DARPIN, affibody, Centyrin, D domain, epitope, mimotope, EZIP, RZIP, E4, K4 etc.). In an embodiment, a SAR comprises AABDs that are of the same type (e.g., two vHH, three DARPINs, two Centyrins etc.). In an embodiment, a SAR polynucleotide(s) encodes for AABDs that are of different types (e.g., one vHH and one DARPIN; one DARPIN, one vHH domain and one Centyrin etc.). In an embodiment, a SAR polynucleotide(s) encode AABDs that are fully human, humanized, chimeric or non-human in origin. In an embodiment, a SAR polynucleotide(s) encodes one or more peptide linkers. In an embodiment, a SAR polynucleotide(s) encodes for one for more flexible linkers (e.g., Gly-Ser linker). In an embodiment, a SAR polynucleotide(s) encodes for one for more protease cleavable linkers (e.g., linkers that are cleaved by cellular proteases, e.g., MMP14, e.g., linker encoded by SEQ ID NO: 1218). In an embodiment, a SAR polynucleotide(s) encodes for one or more Ig linkers or Ig like linkers. In an embodiment, a SAR polynucleotide encodes for one or more than one SAR chain. In an embodiment, the two or more SAR chains are encoded by one or more polynucleotides. In an embodiment, the two or more SAR chains are encoded by polynucleotides that are separated by cleavable linkers (e.g., P2A, T2A, F2A etc.) that are optionally preceded by nucleic acid sequences encoding for a Furine cleavage site. In an embodiment, a SAR polynucleotide(s) are partially or fully codon-optimized.

[0022] In an embodiment, the disclosure provides SAR polypeptide encoded by any of the SAR polynucleotides described in the preceding sections.

[0023] In some embodiments, provided herein are polypeptides comprising any of the SARs of the disclosure along with any accessory module. The amino acid sequences of the exemplary SAR polypeptides are provided in Tables 25-36 and 41-50. In some embodiments, the two or more SAR components and any accessory modules (e.g., therapeutic controls) comprise a single polypeptide molecule. In some embodiments, the two or more SAR components (e.g., two chains of a double chain SAR) and the accessory modules comprises separate polypeptides. In various embodiments, a SAR polypeptide comprises one or more antigen specific domains. In some embodiments, the antigen specific domain(s) of a SAR comprise one or more V_{L} (or vL) fragments. In some embodiments, the antigen specific domain(s) of a SAR comprise one or more V_{H} (or vH) fragments. In some embodiments, the antigen specific domain(s) comprise one or more scFVs (or scFvs) specific to the antigens on target cells such as, for example, cancer cells. In some embodiments, the antigen specific domain(s) comprise one or more Fv fragments. In some embodiments, the antigen specific domain comprises one or more Fab fragments. In some embodiments, the antigen specific domain(s) of a SAR comprise one or more (Fab′)2 fragments. In some embodiments, the antigen specific domain of a SAR polypeptide comprises an autonomous antigen binding domain (AABD). In some embodiment, the antigen specific domain(s) of a SAR polypeptide comprise one or more single domain antibodies (SDAB) or antibody fragments such as single vH domain (SVH) or single vL domain (SVL). In some embodiment, the antigen specific domain(s) of a SAR polypeptide comprise single vH domains that are fully human in origin (i.e., FHVH). In some embodiments, the antigen specific domain of a SAR polypeptide comprises one or more camelid V_{HH} (vHH) domains. In some embodiments, the antigen specific domain(s) of a SAR polypeptide comprise vHH domains that are humanized. In some embodiment, the antigen specific domain(s) of a SAR polypeptide comprise variable domains derived from T cell receptors (e.g., Va/Va, Vb/Vβ, Vg/Vγ and Vd/Vδ). In some embodiment, the antigen specific domain(s) of a SAR polypeptide comprise single chain TCR (scTCR). In some embodiment, the antigen specific domain(s) of a SAR polypeptide comprise single varianble domain TCR (svd-TCR). In some embodiments, the antigen specific domain(s) of a SAR polypeptide comprises one or more ligand binding domains of receptors. In some embodiments, the antigen specific domain comprises one or more non-immunoglobulin scaffold such as a DARPIN, an affibody, an affilin, an adnectin, an affitin, an obodies, a repebody, a fynomer, an alphabody, an avimer, an atrimer, a centyrin, a pronectin, an anticalin, a kunitz domain, an Armadillo repeat protein, or a D domain (α3D domain) etc. In some embodiments, the antigen specific domain(s) of a SAR polypeptide comprise one or more adaptor binding domains (e.g., RZIP, EZIP, E4, K4, NKG2D-AF, NKG2D-YA etc.). In some embodiments, the antigen specific domain(s) of a SAR polypeptide comprise one or more Fc binding domains (e.g., Fc binding region of CD16, CD32, or CD64 etc.). In some embodiments, the antigen specific domain(s) of a SAR polypeptide comprises one or more an autoantigen. In some embodiments, the antigen specific domain(s) of a SAR polypeptide comprises one or more an epitope tag or mimotope. In some embodiments, the antigen specific domain(s) of a SAR polypeptide comprises one or more ligand-binding domains of receptors. In some embodiments, the antigen specific domain(s) of a SAR polypeptide comprises one or more receptor-binding domains of ligands. In some embodiments, the antigen specific domains of a SAR comprise at least one Fv (e.g., vL and vH fragments) and one or more AABD (e.g., SVH, SVL, vHH, svd-TCR, DARPIN, affibody, Centyrin, D domain, epitope, mimotope, EZIP, RZIP, E4, K4 etc.). In some embodiments, the antigen specific domains of a SAR comprise at least one TCR variable domain (e.g., Va/Vb or Vg/Vd fragments of a TCR) and one or more AABD (e.g., SVH, SVL, FHVH, vHH, svd-TCR, DARPIN, affibody, Centyrin, D domain, epitope, mimotope, EZIP, RZIP, E4, K4 etc.). In an embodiment, the antigen specific domains of a SAR comprise one or more than one (e.g., 2, 3, 4, 5, 6 or more) AABD (e.g., SVH, SVL, vHH, FHVH, svd-TCR, DARPIN, affibody, Centyrin, D domain, epitope, mimotope, EZIP, RZIP, E4, K4 etc.). In an embodiment, a SAR comprises AABDs that are of the same type (e.g., two vHH, three DARPINs, two Centyrins etc.). In an embodiment, a SAR comprises AABDs that are of different types (e.g., one vHH and one DARPIN; one DARPIN, one vHH domain and one Centyrin etc.). In an embodiment, a SAR polypeptide comprises AABDs that are fully human, humanized, chimeric or non-human in origin. In an embodiment, a SAR polypeptide comprises one or more linkers. In an embodiment, a SAR polypeptide comprises one for more flexible linkers (e.g., Gly-Ser linker). In an embodiment, a SAR polypeptide comprises one for more protease cleavable linkers (e.g., linkers that are cleaved by cellular proteases, e.g., MMP14, e.g., linker encoded by SEQ ID NO: 1218). In an embodiment, a SAR polypeptide comprises one or more Ig linkers or Ig like linkers. In an embodiment, a SAR comprises one or more than one chain. In an embodiment, the two or more chains of a SAR comprise one or more polypeptides. In an embodiment, the two or more chains of a SAR are comprisespolypeptides that are separated by cleavable linkers (e.g., P2A, T2A, F2A etc.) that are optionally preceded by nucleic acid sequences encoding for a Furine cleavage site.

[0024] The disclosure provides SAR polynucleotides and polypeptides with the composition of exemplary SARs provided in Tables 25-36 and 41-50. As SARs are modular in design, additional SARs with novel compositions can be generated by those skilled in the art by substituting the different modules and tested using the assays provided in this disclosure. The exemplary component modules of the SAR are provided in Tables 2-24.

[0025] The disclosure also provides useful configurations for making a SAR of the disclosure. The disclosure provides SAR polynucleotides and polypeptides with the modular domain structure and architecture of exemplary SARs provided in Tables 25-36 and 41-50. In an embodiment, the disclosure provides at least one recombinant polynucleotide encoding at least one synthetic antigen receptor (SAR), the at least one SAR comprising: a) a first polypeptide chain comprising a vH, Va, Vg or an Ig linker domain fragment operably linked via an optional linker to a first T cell receptor constant chain fragment comprising a first transmembrane domain of a first TCR subunit; and b) a second polypeptide chain comprising a vL, Vb, Vd or an Ig linker domain operably linked via an optional linker to a second T cell receptor constant chain fragment comprising a second transmembrane domain of a second TCR subunit; and wherein one or more polypeptide chains comprise one or more autonomous antigen binding domains (AABD) selected from the group of a single vH domain (SVH); a single vL domain (SVL); a vHH domain; a single domain antibody; a svd-TCR, a non-immunoglobulin antigen binding scaffold such as DARPIN, affibody, affilis, adnectin, affitin, obody, repebody, fynomer, alphabody, avimer, atrimer, centyrin, pronecti, anticalins, kunitz domain, Armadillo repeat protein and a D domain; the ligand binding domain of a receptor; the receptor-binding domain of a ligand; an autoantigen; an adaptor binding domain, an Fc binding domain, an epitope tag, a mimotope, or an equivalent is/are operably linked to or near the N-terminus of the vH, vL, Va, Vb, Vg, Vd or an Ig linker domain via an optional linker; and wherein the first TCR constant chain fragment and the second TCR constant chain fragment form a T cell receptor module (TCRM) that is capable of recruiting at least one TCR-associated signaling module when expressed in a T cells.

[0026] In an embodiment, the disclosure provides that a useful configuration for making a bispecific or multispecific CAR involves attachment of one or more AABDs (e.g., non-scFV based antigen binding domains) to the N-terminus or near the N-terminus of the vL and/or vH domains comprising the scFv of such a CAR via an optional linker.

[0027] In an embodiment, the disclosure provides a useful configurations for a SAR (e.g., a bispecific or a multispecific SAR) comprising one or more AABDs that are operably linked to the N-terminus or near the N-terminus of the vL, vH, scFv, vHH, FHVH, Va, Vb, Vd, Vg fragments comprising a single chain CAR (e.g., a 2nd-generation CAR, a 3^{rd} generation CAR), a single chain TFP (e.g., TFPε, TFPγ, TFPδ), a SIR, a cTCR, an Ab-TCR, an aβTFP, a γδ TFP or a TCR via an optional linker. In another embodiment, the disclosure provides a usefula useful configuration for making a SAR (e.g., a bispecific or a multispecific SAR) with the backbone of an AABD-TCR comprises one or more AABD that are operably linked to TCR signaling modules via intervening Ig linker domains.

[0028] The disclosure describes that a useful configuration for making a bispecific or multispecific SIR, Ab-TCR, TFPαβ, TFPγδ or TCR involves attachment of one or more AABDs (e.g., non-scFV based antigen binding domains) to the N-terminus or near the N-terminus of the vL and/or vH domains comprising the Fv of such a SIR via an optional linker.

[0029] The disclosure further provides one or more vectors comprising nucleic acids encoding any of the SAR polypeptides and accessory modules described in the preceding sections. The SARs of the disclosure may be encoded by a single vector or more than one vector.

[0030] The disclosure further provides genetically modified cells comprising vectors comprising polynucleotides that encode the SARs and accessory modules of the disclosure.

[0031] The disclosure further provides methods of treatment using the genetically modified cells comprising vectors comprising polynucleotides that encode the SARs and accessory modules of the disclosure.

[0032] The disclosure also provides novel antibodies, antibody fragments, vHH, and single human vH domains (e.g., FHVH and chVH) capable of binding different antigens. The target antigens, names and SEQ ID NOs of these novel antigen binding domains, along with SEQ ID NOs of their CDR1-CDR3, are presented in Table 39. These novel antigen binding domains can be used for construction of SARs and/or SAR adaptors of the disclosure. Furthermore, these novel antigen binding domains can be used for the generation of other therapeutic and diagnostic biologicals and cell-based therapies including antibodies (e.g., bispecific and trispecific antibodies, antibody drug conjugates, radiolabelled antibodies, flurochromoe labelled antibodies, scFv, bispecific and trispecific T/NK cell engagers etc.) using methods described herein and using methods known in the art. The disclosure provides polynucleotide, polypeptides, vector, pharmaceutical compositions, cells and ktis comprising and/or expressing the novel antigen binding domains of the disclosure.

[0033] The disclosure further relates to polynucleotides encoding a SAR, SAR polypeptides, vectors comprising polynucleotides encoding SAR polypeptides and isolated cells expressing a SAR of the disclosure. The SARs of the disclosure may be expressed in immune cells (e.g., T cells, NK cell etc.) or stem cells (e.g., hematopoietic stem cells or induced pluripotent stem cells iPSC) that can give rise to immune cells. The SARs may be expressed in autologous or allogeneic stem cells. The cells expressing the SARs may have reduced or eliminated expression of one or more components of a TCR/CD3 signaling complex or their downstream signaling mediators. The cells expressing the SARs may have reduced or eliminated expression of HLA molecules, such as via downregulation or knockout of beta2 macroglobulin. The cells for the expression of SARs of the disclosure may be obtained from an autologous or an allogeneic donor. The cells for the expression of SARs of the disclosure may be obtained from an autologous or an allogeneic donor who has been administered a mobilizing agent (e.g., a CXCR4 antagonist, G-CSF, GM-CSF etc.). The cells of the disclosure may express one SAR or more than one SAR. In an exemplary embodiment, one of the SARs may result in immune cell effector functions (e.g., cytotoxicity) while the other SAR may provide co-stimulation. The SARs expressing cells may target a single antigen or more than one antigen. The SAR-expressing cells may target the same epitope or different epitopes of a single antigen. In one aspect the SAR expressing cells may recognize an antigen preferentially or exclusively expressed on hematopoietic lineage cells. Exemplary antigens that are preferentially or exclusively expressed on hematopoietic lineage cells are CD 19, CD20, CD22, BCMA, CS1, CD30, CD33, MPL, CD138, CD38, CD79b, BAFF-R, CD123 and the like. In one aspect the SAR-expressing cells may recognize an antigen preferentially or exclusively expressed on non-hematopoietic lineage cells. Exemplary antigens that are preferentially or exclusively expressed on non-hematopoietic lineage cells are Mesothelin (MSLN), Her2, EGFR., EGFRviii, Muc16, PSMA, IL13Ra2 and the like. In one aspect the SAR expressing cells recognize two or more novel antigen where at least one of the antigens is preferentially or exclusively expressed on hematopoietic lineage cells and at least one of the antigens is expressed on non-hematopoietic lineage cells. The SARs expressing cells of the disclosure can be used in therapy, in particular for the treatment of cancer. Methods for treating disease, for example cancer, are also within the scope of the invention.

[0034] In one embodiment, provided herein are isolated nucleic acid encoding unispecific, bispecific and multispecific SARs, wherein the antigen specific domain of the SAR targets BCMA. In exemplary embodiments, the sequences of isolated nucleic acid fragments targeting BCMA are set forth in SEQ ID NOs: 7409-8374. In exemplary embodiments, the sequences of isolated polypeptide targeting BCMA are set forth in SEQ ID NOs: 18099-19064 (Table 36). In some embodiments, the vL, vH and scFv fragments targeting BCMA are described in Table 3 and set forth in SEQ ID NOs: 235-248, 477-490 and SEQ ID NOs: 719-732, respectively. The amino acid SEQ ID NO of the vL, vH and scFv fragments targeting BCMA are also described in Table 3 and set forth in SEQ ID Nos:10925-10938, 10978-11180, and 11220-11422, respectively. In some embodiments, the SVH and vHH fragments targeting BCMA are described in Table 4 and set forth in SEQ ID NOs: 852-858, 888-891, 893, 895, 901-902. In some embodiments, a Centyrin targeting BCMA is described in Table 7 and set forth in SEQ ID NO: 983. Exemplary unispecific, bispecific and multispecific SARs incorporating AABD comprising SVH, vHH and Centyrins are provided in Tables 25-36. Further provided herein are vectors encoding nucleic acids encoding SAR, wherein the antigen specific domain of the SAR targets BCMA. Also provided herein are genetically engineered cells (such as T cells, NK cells) comprising vectors comprising nucleic acids encoding a SAR, wherein the antigen specific domain of the SAR targets BCMA.

[0035] In one embodiment, provided herein are isolated nucleic acid encoding unispecific, bispecific and multispecific SARs, wherein the antigen specific domain of the SAR targets PSMA (prostate specific membrane antigen). In exemplary embodiments, the sequences of isolated nucleic acid fragments targeting PSMA are set forth in SEQ ID NOs: 9686-10030. In exemplary embodiments, the sequences of isolated polypeptide targeting PSMA are set forth in SEQ ID NOs: 20376-20720 (Table 36). In some embodiments, the vL, vH and scFv fragments targeting PSMA are described in Table 3 and set forth in SEQ ID NOs: 268-272, 510-514 and SEQ ID NOs: 752-756, respectively. The amino acid SEQ ID NO of the vL, vH and scFv fragments targeting PSMA are also described in Table 3 and set forth in SEQ ID Nos: 10958-10962, 11200-11204, and 11442-11446, respectively. In some embodiments, the SVH fragments targeting PSMA are described in Table 4 and set forth in SEQ ID NOs: 830-833. In some embodiments, Centyrins targeting PSMA is described in Table 7 and set forth in SEQ ID NO: 977-979. Exemplary unispecific, bispecific and multispecific SARs incorporating AABD comprising SVH, vHH and Centyrins are provided in Tables 25-36. Further provided herein are vectors comprising nucleic acids encoding a SAR, wherein the antigen specific domain of the SAR targets PSMA. Also provided herein are genetically engineered cells (such as T cells, NK cells) comprising vectors comprising nucleic acids encoding SAR, wherein the antigen specific domain of the SAR targets PSMA. Also provided are SAR that target PSMA with optimized expression and affinity so as to target cancer cells that express high levels of PSMA (e.g., more than 1.5-fold higher than normal cells) and spare normal healthy cells that express low to moderate level of PSMA. In an exemplary embodiment are provided SAR that respond to cancer cells that express PSMA at level at least 1.5-fold higher than the PSMA level observed in normal healthy prostate epithelium or immortalized cell lines derived from normal prostate epithelial cells. The expression level of PSMA can be measured by techniques known in the art, including but not limited to, immunohistochemistry, western blotting, northern blot and quantitative PCR etc. In one embodiment, the disclosure provides novel SARs targeting cells expressing high levels of PSMA and do not target cells expressing low levels of PSMA. A reference cell expressing high level of PSMA is LNCaP cell line and a cell expressing low levels of PSMA is PC3 and/or Huh-7 cell line. In an embodiment, the disclosure provides SARs that show 2-fold or higher (e.g., 3 fold, 4 fold, 5 fold, 10 fold etc.) GFP induction in the Jurkat NFAT-GFP assay when expressed in JNG cells and co-cultured with LNCaP cells as compared to the GFP induction observed when co-cultured with PC3 or Huh-7 cell lines. In an embodiment, the disclosure provides SARs that show greater than 10% (e.g., 20%, 30%, 40% or 50% etc.) GFP induction in the Jurkat NFAT-GFP assay when expressed in JNG cells and co-cultured with LNCaP cells as compared to the GFP induction observed when co-cultured with PC3 or Huh-7 cell lines.

[0036] In one embodiment, provided herein are isolated nucleic acid encoding unispecific, bispecific and multispecific SARs, wherein the antigen specific domain of the SAR targets Mesothelin (MSLN). In exemplary embodiments, the sequences of isolated nucleic acid fragments targeting MSLN are set forth in SEQ ID NOs: 10307-10720. In exemplary embodiments, the sequences of isolated polypeptide targeting MSLN are set forth in SEQ ID NOs: 20997-21410 (Table 36). In some embodiments, the vL, vH and scFv fragments targeting MSLN are described in Table 3 and set forth in SEQ ID NOs: 277-282, 519-524 and 761-766, respectively. The amino acid SEQ ID NO of the vL, vH and scFv fragments targeting MSLN are also described in Table 3 and set forth in SEQ ID Nos: 10967-10972, 11209-11214, and 11451-11456, respectively. In some embodiments, the vHH fragments targeting MSLN are described in Table 4 and set forth in SEQ ID NOs: 876-877. Exemplary unispecific, bispecific and multispecific SARs incorporating vL, vH, scFv, vHH targeting MSLN are provided in Tables 25-36. Further provided herein are vectors comprising nucleic acids encoding a SAR, wherein the antigen specific domain of the SAR targets MSLN. Also provided herein are genetically engineered cells (such as T cells, NK cells) comprising vectors comprising nucleic acids encoding a SAR, wherein the antigen specific domain of the SAR targets MSLN. Also provided are SAR that target MSLN with optimized expression and affinity so as to target cancer cells that express high levels of MSLN (e.g., more than 1.5-fold higher than normal cells) and spare normal healthy cells that express low to moderate level of MSLN. In an exemplary embodiment are provided SAR that respond to cancer cells that express MSLN at level at least 1.5 fold higher than the MSLN level observed in normal healthy peritoneal epithelium cells or immortalized cell lines derived from normal healthy peritoneal epithelial cells. The expression level of MSLN can be measured by techniques known in the art, including but not limited to, immunohistochemistry, western blotting, northern blot and quantitative PCR etc. In one embodiment, the disclosure provides novel SARs targeting cells expressing high levels of MSLN and do not target cells expressing low levels of MSLN. A reference cell expressing high level of MSLN is SKOV-3 cell line and a cell expressing low levels of MSLN is MCF-7 or LNCaP cell line. In an embodiment, the disclosure provides SARs that show 2 fold or higher (e.g., 3 fold, 4 fold, 5 fold, 10 fold etc.) GFP induction in the Jurkat NFAT-GFP assay when expressed in JNG cells and co-cultured with SKOV-3 cells as compared to the GFP induction observed when co-cultured with MCF-7 or LNCaP cell line. In an embodiment, the disclosure provides SARs that show greater than 10% (e.g., 20%, 30%, 40% or 50% etc.) GFP induction in the Jurkat NFAT-GFP assay when expressed in JNG cells and co-cultured with SKOV-3 cells as compared to the GFP induction observed when co-cultured with MCF-7 or LNCaP cell lines.

[0037] In one embodiment, provided herein are isolated nucleic acid encoding unispecific, bispecific and multispecific SARs, wherein the antigen specific domain of the SAR targets Her2. In exemplary embodiments, the sequences of isolated nucleic acid fragments targeting Her2 are set forth in SEQ ID NOs: 8858-8995. In exemplary embodiments, the sequences of isolated polypeptide targeting HER2 are set forth in SEQ ID NOs: 19548-19616 (Table 36). In some embodiments, the vL, vH and scFv fragments targeting HER2 are described in Table 3 and set forth in SEQ ID NOs: 256-257, 498-499 and 740-741, respectively. The amino acid SEQ ID NO of the vL, vH and scFv fragments targeting HER2 are also described in Table 3 and set forth in SEQ ID Nos: 10946-10947, 11188-11189, and 11430-11431, respectively. In some embodiments, the vHH fragments targeting HER2 are described in Table 4 and set forth in SEQ ID NOs: 864-866. In some embodiments, the DARPINS fragments targeting HER2 are described in Table 4 and set forth in SEQ ID NOs: 972-973. Exemplary unispecific, bispecific and multispecific SARs incorporating vL, vH, scFv, vHH and DARPINS targeting HER2 are provided in Tables 25-36. Further provided herein are vectors comprising nucleic acids encoding a SAR, wherein the antigen specific domain of the SAR targets HER2. Also provided herein are genetically engineered cells (such as T cells, NK cells) comprising vectors comprising nucleic acids encoding a SAR, wherein the antigen specific domain of the SAR targets HER2. Also provided are SAR that target Her2 with optimized expression and affinity so as to target cancer cells that express high levels of Her2 (e.g., more than 1.5-fold higher than normal cells) and spare normal healthy cells that express low to moderate level of Her2. In an exemplary embodiment are provided SAR that respond to cancer cells that express Her2 at level at least 1.5-fold higher than the Her2 level observed in normal healthy breast epithelium cells or immortalized cell lines derived from normal healthy breast epithelium. The expression level of Her2 can be measured by techniques known in the art, including but not limited to, immunohistochemistry, western blotting, northern blot and quantitative PCR etc. In one embodiment, the disclosure provides novel SARs targeting cells expressing high levels of Her2 and do not target cells expressing low levels of Her2. A reference cell expressing high level of Her2 is SKOV-3 cell line and a cell expressing low levels of Her2 is MBA-MD-231 cell line. In an embodiment, the disclosure provides SARs that show 2-fold or higher (e.g., 3-fold, 4 fold, 5 fold, 10 fold etc.) GFP induction in the Jurkat NFAT-GFP assay when expressed in JNG cells and co-cultured with SKOV-3 cells as compared to the GFP induction observed when co-cultured with MBA-MD-231 cell line. In an embodiment, the disclosure provides SARs that show greater than 10% (e.g., 20%, 30%, 40% or 50% etc.) GFP induction in the Jurkat NFAT-GFP assay when expressed in JNG cells and co-cultured with SKOV-3 cells as compared to the GFP induction observed when co-cultured with MBA-MD-231 cell line.

[0038] In one embodiment, provided herein are isolated nucleic acid encoding unispecific, bispecific and multispecific SARs, wherein the antigen specific domain of the SAR targets CD229. In exemplary embodiments, the sequences of isolated nucleic acid fragments targeting CD229 are set forth in SEQ ID NOs: 9134-9409. In exemplary embodiments, the sequences of isolated polypeptide targeting CD229 are set forth in SEQ ID NOs: 19824-20099 (Table 36). In some embodiments, the vL, vH and scFv fragments targeting CD229 are described in Table 3 and set forth in SEQ ID NOs: 260-263, 502-505 and 744-747, respectively. The amino acid SEQ ID NO of the vL, vH and scFv fragments targeting CD229 are also described in Table 3 and set forth in SEQ ID Nos: 10950-10953, 11192-11195, and 11434-11437, respectively. Exemplary unispecific, bispecific and multispecific SARs incorporating comprising vL, vH, and scFv targeting CD229 are provided in Tables 25-36. Further provided herein are vectors comprising nucleic acids encoding a SAR, wherein the antigen specific domain of the SAR targets CD229. Also provided herein are genetically engineered cells (such as T cells, NK cells) comprising vectors comprising nucleic acids encoding a SAR, wherein the antigen specific domain of the SAR targets CD229.

[0039] In one embodiment, provided herein are isolated nucleic acid encoding unispecific, bispecific and multispecific SARs, wherein the antigen specific domain of the SAR targets ROR1. In exemplary embodiments, the sequences of isolated nucleic acid fragments targeting ROR1 are set forth in SEQ ID NOs: 8375-8581. In exemplary embodiments, the sequences of isolated polypeptide targeting ROR1 are set forth in SEQ ID NOs: 19065-19133 (Table 36). The amino acid SEQ ID NO of the vL, vH and scFv fragments targeting CD229 are also described in Table 3. Further provided herein are vectors comprising nucleic acids encoding a SAR, wherein the antigen specific domain of the SAR targets ROR1. Also provided herein are genetically engineered cells (such as T cells, NK cells) comprising vectors comprising nucleic acids encoding a SAR, wherein the antigen specific domain of the SAR targets ROR1.

[0040] In one embodiment, provided herein are isolated nucleic acid encoding unispecific, bispecific and multispecific SARs, wherein the antigen specific domain of the SAR targets CEA. In exemplary embodiments, the sequences of isolated nucleic acid fragments targeting CEA are set forth in SEQ ID NOs: 8720-8857. In exemplary embodiments, the sequences of isolated polypeptide targeting CEA are set forth in SEQ ID NOs: 19410-19547 (Table 36). In some embodiments, the vL, vH and scFv fragments targeting CEA are listed in Table 3. The amino acid SEQ ID NO of the vL, vH and scFv fragments targeting CEA are also described in Table 3. Further provided herein are vectors comprising nucleic acids encoding a SAR, wherein the antigen specific domain of the SAR targets CEA. Also provided herein are genetically engineered cells (such as T cells, NK cells) comprising vectors comprising nucleic acids encoding a SAR, wherein the antigen specific domain of the SAR targets CEA.

[0041] In one embodiment, provided herein are isolated nucleic acid encoding unispecific, bispecific and multispecific SARs, wherein the antigen specific domain of the SAR targets Toso. In exemplary embodiments, the sequences of isolated nucleic acid fragments targeting Toso are set forth in SEQ ID NOs: 8996-9064. In exemplary embodiments, the sequences of isolated polypeptide targeting Toso are set forth in SEQ ID NOs: 19686-19747 (Table 36). In some embodiments, the vL, vH and scFv fragments targeting Toso are listed in Table 3. The amino acid SEQ ID NO of the vL, vH and scFv fragments targeting Toso are also described in Table 3. Further provided herein are vectors comprising nucleic acids encoding a SAR, wherein the antigen specific domain of the SAR targets Toso. Also provided herein are genetically engineered cells (such as T cells, NK cells) comprising vectors comprising nucleic acids encoding a SAR, wherein the antigen specific domain of the SAR targets Toso.

[0042] In one embodiment, provided herein are isolated nucleic acid encoding unispecific, bispecific and multispecific SARs, wherein the antigen specific domain of the SAR targets EBV encoded gp350 protein. In exemplary embodiments, the sequences of isolated nucleic acid fragments targeting EBV gp350 are set forth in SEQ ID NOs: 9410-9547. In exemplary embodiments, the sequences of isolated polypeptide targeting EBV gp350 are set forth in SEQ ID NOs: 20169-20237 (Table 36). In some embodiments, the vL, vH and scFv fragments targeting EBV gp350 are listed in Table 3. The amino acid SEQ ID NO of the vL, vH and scFv fragments targeting EBV gp350 are also described in Table 3. Further provided herein are vectors comprising nucleic acids encoding a SAR, wherein the antigen specific domain of the SAR targets EBV gp350. Also provided herein are genetically engineered cells (such as T cells, NK cells) comprising vectors comprising nucleic acids encoding a SAR, wherein the antigen specific domain of the SAR targets EBV gp350. These SARs are useful for the treatment of disorders associated with infection with EBV.

[0043] In one embodiment, provided herein are isolated nucleic acid encoding unispecific, bispecific and multispecific SARs, wherein the antigen specific domain of the SAR targets EBV encoded LMP1 protein. In exemplary embodiments, the sequences of isolated nucleic acid fragments targeting EBV LMP1 are set forth in SEQ ID NOs: 9617-9685. In exemplary embodiments, the sequences of isolated polypeptide targeting EBV LMP1 are set forth in SEQ ID NOs: 20307-20375 (Table 36). In some embodiments, the vL, vH and scFv fragments targeting EBV LMP1 are listed in Table 3. The amino acid SEQ ID NO of the vL, vH and scFv fragments targeting EBV LMP1 are also described in Table 3. Further provided herein are vectors comprising nucleic acids encoding a SAR, wherein the antigen specific domain of the SAR targets EBV LMP1. Also provided herein are genetically engineered cells (such as T cells, NK cells) comprising vectors comprising nucleic acids encoding a SAR, wherein the antigen specific domain of the SAR targets EBV LMP1. These SARs are useful for the treatment of disorders associated with infection with EBV.

[0044] In one embodiment, provided herein are isolated nucleic acid encoding unispecific, bispecific and multispecific SARs, wherein the antigen specific domain of the SAR targets Influenza A Neuramidase (NA) protein. In exemplary embodiments, the sequences of isolated nucleic acid fragments targeting Influenza A NA are set forth in Table 36. In exemplary embodiments, the sequences of isolated polypeptide targeting Influenza A NA are set forth in (Table 36). In some embodiments, the vL, vH and scFv fragments targeting Influenza A NA are listed in Table 3. The amino acid SEQ ID NO of the vL, vH and scFv fragments targeting Influenza A NA are also described in Table 3. Further provided herein are vectors comprising nucleic acids encoding a SAR, wherein the antigen specific domain of the SAR targets Influenza A NA. Also provided herein are genetically engineered cells (such as T cells, NK cells) comprising vectors comprising nucleic acids encoding a SAR, wherein the antigen specific domain of the SAR targets Influenza A NA. These SARs are useful for the treatment of disorders associated with infection with Influenza A.

[0045] In one embodiment, provided herein are isolated nucleic acid encoding SARs, wherein the antigen specific domain of the SAR targets receptor binding domain of SARS-CoV2 spike glycoprotein (S-RBD). In exemplary embodiments, the sequences of isolated nucleic acid fragments targeting S-RBD are set forth in SEQ ID NO: 25-26. In exemplary embodiments, the sequences of isolated polypeptide targeting S-RBD are set forth in SEQ ID NO: 23318-19. Further provided herein are vectors comprising nucleic acids encoding a SAR, wherein the antigen specific domain of the SAR targets S-RBD. Also provided herein are genetically engineered cells (such as T cells, NK cells) comprising vectors comprising nucleic acids encoding a SAR, wherein the antigen specific domain of the SAR targets S-RBD. These SARs are useful for the treatment of disorders associated with infection with S-RBD.

[0046] In one embodiment, provided herein are isolated nucleic acid encoding unispecific, bispecific and multispecific SARs, wherein the antigen specific domain of the SAR targets an antigen listed in Tables 25-36. In exemplary embodiments, the sequences of isolated nucleic acid fragments targeting the antigens are set forth in SEQ ID NOs: 1330-1332, 1848-10720. In exemplary embodiments, the sequences of isolated polypeptide targeting the different antigens are set forth in SEQ ID NOs:12020-12022, 12539-21410 (Table 36). In some embodiments, the vL, vH and scFv fragments targeting the different antigens are described in Table 3 and set forth in SEQ ID NOs: 46-282, 288-524 and 530-766, respectively. The amino acid SEQ ID NO of the vL, vH and scFv fragments targeting various antigens are also described in Table 3 and set forth in SEQ ID Nos: 10736-10972, 10978-11214, and 11220-11456, respectively. In some embodiments, the exemplary AABD (e.g., vHH, SVH, DARPIN, CENTYRIN, AFFIBODY, ligands, receptors, Zip domains, protein tags etc.) targeting various antigens are described in Table 5, 7-9 and set forth in SEQ ID NOs: 830-902; 972-1023. Exemplary unispecific, bispecific and multispecific SARs incorporating vL, vH, scFv, and AABD are provided in Tables 25-36 and 41-50. Further provided herein are vectors comprising nucleic acids encoding a SAR, wherein the antigen specific domain(s) of the SAR targets different antigens. Also provided herein are genetically engineered cells (such as T cells, NK cells) comprising vectors comprising nucleic acids encoding a SAR, wherein the antigen specific domain(s) of the SAR targets different antigens.

[0047] The disclosure further relates to improving the quality of SAR expressing T cells by expanding them in the presence of a SMAC mimetic.

[0048] The disclosure further relates to improving the quality of SAR expressing T cells by expanding them in the presence of a NIK (NF-κB inducing kinase) agonist.

[0049] The SARs of the disclosure may be manufactured using an open, semi-close or close manufacturing system.

[0050] The SARs of the disclosure may be manufactured using a device or a container containing a gas-permeable membrane. An exemplary device with gas permeable membrane is a GRex flask.

[0051] The disclosure further teaches a method of manufacturing SARs under hypoxic conditions.

[0052] The disclosure further teaches a method of manufacturing SARs under hypoxic conditions using a device or a container containing a gas-permeable membrane. An exemplary device with gas permeable membrane is a GRex flask.

[0053] The disclosure also teaches a method of controlling the activity a SAR by incorporating in them at least one module that binds to albumin via a protease cleavable linker. An exemplary module that binds to albumin is a vH or vH domain targeting albumin (e.g., SEQ ID NO (DNA): 878 and SEQ ID NO (PRT): 11568) that can be linked to a SAR via a MMP9 target sequence (e.g., SEQ ID NO: 11911-11912 and 11921).

[0054] The disclosure further relates to polynucleotides encoding a SVH of the disclosure, vectors encoding such polypeptides, isolated cells expressing the SVH and isolated polypeptides encoding SVH of the disclosure. Such cells and polypeptides can be used in therapy, in particular for the treatment of cancer, autoimmune and infectious diseases. Methods for treating disease, for example cancer, are also within the scope of the disclosure.

[0055] In another aspect, the disclosure relates to an isolated SAR comprising two or more antigen binding domains, and two transmembrane domains wherein said antigen binding domain comprises one or more, for example at least two, human variable heavy chain (V_{H}) domains and is devoid of light chains.

[0056] In some embodiments, a SAR comprises two or more sets of two or more polypeptides. The polypeptides of each set of SARs are contiguous with each other (functional polypeptide unit 1) but are not contiguous with the polypeptides of the other set (functional polypeptide unit 2).

[0057] In another aspect, the disclosure relates to a method, for example an ex vivo method, for generating a cell or cell population for use in adaptive immunotherapy comprising transforming said cell or cell population with a SAR of the disclosure.

[0058] In another aspect, the disclosure relates to a method of generating SAR-expressing T cells (e.g., CAR-T or SIR-T or TCR-T or ab-TCR-T, AABD-TCR-T, or TFP-T, TCR-T cells etc.) by expanding them in the presence of SMAC mimetics. In some embodiments, the SAR-T cells are expanded ex vivo in the presence of a SMAC mimetic for between 2-50 days.

[0059] In another aspect, the disclosure relates to a method of improving the efficacy of SAR-expressing T cells (e.g., CAR-T or SIR-T or TCR-T or ab-TCR-T, AABD-TCR-T, or TFP-T, TCR-T cells etc.) by expanding them in the presence of SMAC mimetics. In some embodiments, the SAR-T cells are expanded ex vivo in the presence of a SMAC mimetic for between 2-50 days.

[0060] In another aspect, the disclosure relates to a method of improving the cytotoxicity of SAR-expressing T cells (e.g., CAR-T or SIR-T or TCR-T or ab-TCR-T, AABD-TCR-T, or TFP-T, TCR-T cells etc.) by expanding them in the presence of SMAC mimetics. In some embodiments, the SAR-T cells are expanded ex vivo in the presence of a SMAC mimetic for between 2-50 days.

[0061] In another aspect, the disclosure relates to a method of generating SAR-expressing T cells (e.g., CAR-T or SIR-T or TCR-T or ab-TCR-T, or TFP-T cells etc.) by expanding them in the presence of NIK agonist. In some embodiments, the SAR-T cells are expanded ex vivo in the presence of a NIK agonist for between 2-50 days.

[0062] In another aspect, the disclosure relates to a method of improving the efficacy of SAR-expressing T cells (e.g., CAR-T or SIR-T or TCR-T or ab-TCR-T, AABD-TCR-T, or TFP-T, TCR-T cells etc.) by expanding them in the presence of NIK agonist. In some embodiments, the SAR-T cells are expanded ex vivo in the presence of NIK agonist for between 2-50 days.

[0063] In another aspect, the disclosure relates to a method of improving the cytotoxicity of SAR-expressing T cells (e.g., CAR-T or SIR-T or TCR-T or ab-TCR-T, AABD-TCR-T, or TFP-T, TCR-T cells etc.) by expanding them in the presence of NIK agonist. In some embodiments, the SAR-T cells are expanded ex vivo in the presence of a NIK agonist for between 2-50 days.

[0064] In another aspect, the disclosure relates to a pharmaceutical composition comprising a cell or cell population of the disclosure.

[0065] Bioluminescence imaging is frequently used for monitoring the in vivo activity of cellular therapy products. The disclosure describes the use of thermostable luciferases (e.g., LucPPE and its engineered variants such as LucPPe-146-1H2 (SEQ ID NO (DNA): 17 and SEQ ID NO (PRT): 11997), LucPPe-133-1B2 (SEQ ID NO (DNA): 18), LucPPe-78-0B10 (SEQ ID NO: 19), LucPPe49-7C6A (SEQ ID NO: 20), LucPpL-81-6G1 (SEQ ID NO: 21) for in vivo bioluminescence imaging.

[0066] The disclosure also provides novel vL, vH and scFv fragments that can be used in the construction of single and double chain SARs, including 2^{nd} generation CARs, single and double chain SIRs, single and double chain cTCRs, Ab-TCR, AABD-TCR, TFPs, TAC and the like. Exemplary vL, vH and scFv fragments and their target antigens are listed in Table 3. Exemplary unispecific, bispecific and multispecific SARs based on the vL, vH and scFv fragments of hu-mRO05-1 are provided in Table 35. As the SARs are modular, the vL, vH and scFv fragments of hu-mROO5-1 can be replaced by vL, vH and scFv fragments targeting other antigen to develop SARs targeting those antigens. Table 36 provides the name of the first construct and SEQ ID NO of other constructs of the series in which vL, vH and scFv fragments of hu-mROO5-1 have been replaced by other vL, vH and scFv fragments. The order of the construct in each series is the same as the order of the constructs of the hu-mROO5-1 series listed in Table 35 and therefore the name and SEQ ID NO of a construct of a particular series can be determined by reference to Tables 35 and 36. For example, Table 35 shows that the last construct in the hu-mR005-1 series (Series 1) is CD8SP-CD38-USC1-FHVH-32184-G4Sx3-R1-hu-mROO5-1-vL-[hTCRb-S57C]-F-P2A-IgSP-Apa-CD20-USC1-vHH-2HCD26-G4Sx3v2-Bst-hu-mROO5-1-vH-|hTCRa-T48C] and has the nucleic acid and amino acid SEQ ID Nos of 7408 and 18098. Table 36 shows that in the series 5, the hu-mROO5-1-vL is replaced by BCMA-huUSC76-vL and hu-mR005-1-vH is replaced by BCMA-huUSC76-158S-vH. The nucleic acid SEQ ID Nos of the different constructs of this series range from 7616-7684 and the amino acid SEQ ID Nos of the constructs in this series range from 18306-18374. As the order of the different constructs in series 5 is the same as the order of the constructs of series 1 shown in Table 35, the nucleic acid and amino acid SEQ ID Nos of the construct CD8SP-CD38-USCl-FHVH-32184-G4Sx3-R1-BCMA-huUSC76-vL-[hTCRb-S57C]-F-P2A-IgSP-Apa-CD20-USC1-vHH-2HCD26-G4Sx3v2-Bst-BCMA-huUSC76-158S-vH-[hTCRa-T48C] can be determined to be 7684 and 18374, respectively. The same method can be used to determine the SEQ ID NO of any SAR of the series listed in Table 36.

[0067] In an embodiment, the disclosure provides at least one recombinant polynucleotide encoding at least one synthetic antigen receptor (SAR) polypeptide, the at least one SAR polypeptide comprising: (A) a first module comprising one or more autonomous antigen binding domains (AABDs) or fragments thereof selected from the group of: a single vH domain (SVH) or a fragment thereof, a single vL domain (SVL) or a fragment thereof; a vHH domain or a fragment thereof; a single domain antibody or a fragment thereof, a single variable domain of a TCR (svd-TCR) or a fragment thereof, a non-immunoglobulin antigen binding scaffold selected from a DARPIN, an affibody, an affilis, an adnectin, an affitin, an obody, an repebody, an fynomer, an alphabody, an avimer, an atrimer, an centyrin, an pronecti, an anticalins, an kunitz domain, an Armadillo repeat protein and a D domain, or a fragment of any of the foregoing; a ligand-binding domain of a receptor or a fragment thereof; a receptor-binding domain of a ligand; an autoantigen or a fragment thereof; an adaptor binding domain or a fragment thereof; and an Fc binding domain or a fragment thereof; and (B) a second module comprising vL (V_{L}), vH (V_{H}), Va/Vα, Vb1 (Vβ1), Vb2 (Vβ2), Vg (Vγ), Vd (Vδ), scFv, scTCR, Ig linker domain or a combination thereof, (C) an optional third module comprising an extracellular domain, a connecting peptide or a hinge domain; (D) a fourth module that comprises a transmembrane domain; and (E) an optional fifth module comprising one or more intracellular signaling domains; where the first, second, optional third, fourth and the optional fifth modules are operationally linked via one or more optional linkers.

[0068] The disclosure also provides a recombinant polynucleotide encoding a SAR polypeptide, where the one or more AABDs are attached via an optional linker to the N-terminus or near the N-terminus of A) a first polypeptide chain comprising a vH, Va, Vg or an Ig linker domain fragment operably linked via an optional linker to a first T cell receptor constant chain fragment comprising a first connecting peptide operably linked to a first transmembrane domain of a first TCR subunit; and (B) a second polypeptide chain comprising a vL, Vb, Vd or an Ig linker domain operably linked via an optional linker to a second T cell receptor constant chain fragment comprising a second connecting peptide operably linked to a second transmembrane domain of a second TCR subunit; wherein the first TCR constant chain fragment and the second TCR constant chain fragment form a T cell receptor module (TCRM) that is capable of recruiting at least one TCR-associated signaling module when expressed in a T cell.

[0069] In one embodiment, the disclosure provides at least one recombinant polynucleotide encoding at least one SAR polypeptide, wherein the encoded vH, Va, or Vg of the first antigen-binding domain and the vL, Vb or Vd of the second antigen-binding domain form an antigen-binding module that specifically binds to a target antigen.

[0070] In one embodiment, the disclosure provides at least one recombinant polynucleotide encoding at least one SAR polypeptide, wherein the AABD, vL, vH, Va, Vb, Vg, Vd and/or Ig linker domain is a fully human, humanized, chimeric or a non-human domain.

[0071] In one embodiment, the disclosure provides at least one recombinant polynucleotide encoding at least one SAR polypeptide, wherein the encoded Ig linker domain comprises a polypeptide with SEQ ID NO: 11832-11865 or a fragment or variant thereof with at least 70% sequence homology to a polypeptide having the sequence of SEQ ID NO: 11832-11865. In one embodiment, the disclosure provides at least one recombinant polynucleotide encoding at least one SAR polypeptide, wherein the encoded optional linker domain comprises a polypeptide with SEQ ID NO: 11832-11865, 11714-11730 or a fragment or a variant thereof with at least 70% sequence homology to a polypeptide having the sequence of SEQ ID NO: 11832-11865, 11714-11730 or a domain that is between 25 to 500 amino acids in length. In one embodiment, the disclosure provides at least one recombinant polynucleotide encoding at least one SAR polypeptide comprising a partial or entire extacellular, transmbrane and intracellular domains of a polypeptide capable of being recruited to a T cell receptor module (TCRM). In one embodiment, the disclosure provides at least one recombinant polynucleotide encoding at least one SAR polypeptide comprising the extacellular, transmbrane and intracellular domains of a polypeptide selected from the group of CD3δ, CD3ε, CD3γ and CD3ζ or a fragment thereof with at leasst 70% sequence homology to a polypeptide having the sequence of any one of SEQ ID NO: 11903 to 11906. In an embodiment, the disclosure provides at least one recombinant polynucleotide encoding at least one SAR polypeptide wherein the encoded T cell receptor constant chain fragment comprises a polypeptide or a fragment thereof having at least 70% sequence homology to a polypeptide having the sequence of any one of SEQ ID NO: 11732-11830. In one embodiment, the disclosure provides at least one recombinant polynucleotide encoding at least one SAR, wherein the encoded T cell receptor constant chain comprises a connecting peptide or a fragment thereof having at least 70% sequence homology to a connecting peptide having the sequence of any one of SEQ ID NO: 11867-11875. In one embodiment, the disclosure provides at least one recombinant polynucleotide encoding at least one SAR polypeptide comprising a transmembrane domain or a fragment thereof having at least 70% sequence homology to a transmembrane domain having a sequence of any one of SEQ ID NO: 11877-11881 or 23332-23334. In one embodiment, the disclosure provides at least one recombinant polynucleotide encoding at least one SAR polypeptide, wherein the intracellular domain contains a cytosolic domain or a fragment thereof with at least 70% sequence homology to a polypeptide having the sequence of any one of SEQ ID NO: 11883-11886, 11785, or 23335-23337.

[0072] In one embodiment, the disclosure provides at least one recombinant polynucleotide encoding at least one SAR polypeptide which has the backbone of a first generation CAR, a second generation CAR, a third generation CAR, a single chain SIR, a one and a half chain SIR, a double chain SIR, a zSIR, a single chain cTCR, a one and a half chain cTCR, a double chain cTCR, an Ab-TCR, an AABD-TCR, a TFPε, a TFPγ, a TFPδ, a TFPαβ, a TFPγδ, a Tri-TAC, a single chain TCR, a double chain TCR or an HLA-independent TCR.

[0073] In one embodiment, the disclosure provides the at least one recombinant polynucleotide encoding at least one SAR polypetpide, wherein the SAR can bind to: at least one antigen; and/or at least one epitope of one or more than antigen(s). In one embodiment, the disclosure provides at least one recombinant polynucleotide encoding at least one SAR polypeptide of disclosure, where the encoded two or more AABDs bind to: at least one antigen; and/or at least one epitope of one or more than antigen(s).

[0074] In one embodiment, the disclosure provides the at least one recombinant polynucleotide encoding at least one SAR polypeptide wherein the encoded one or more antigen binding domains bind to at least one antigen selected from the antigens listed in Table B.

[0075] In one embodiment, the disclosure provides at least one recombinant polynucleotide encoding at least one SAR polypeptide wherein the encoded SAR polypeptide comprises one or more antigen binding domains selected from the group consisting of: (i) a heavy chain variable region (vH) comprising a sequence as set forth in any of SEQ ID Nos: 10978-11214 or sequences with at least 70% identity thereto or sequences with at least 70% identity in the three complementarity determining regions (CDRs) to the sequences set forth in any one or more of SEQ ID NOS: 10978-11214 and 23148-23161 or sequences with less than 3 substitutions in the three CDRs of the sequences set forth in any one or more of SEQ ID NOS: 10978-11214 and 23148-23161 or sequences that bind to the same target antigens or the same epitopes on the target antigens as the sequences set forth in any one or more of SEQ ID NOS: 10978-11214 and 23148-23161 and which encodes a polypeptide that binds to its antigen; (ii) a light chain variable region (vL) comprising a sequence as set forth in any one of SEQ ID NO: 10736-10972 or sequences with at least 70% identity to sequences set forth in any one or more of SEQ ID NOS: 10736-10972 and 23136-23147 or sequences with at least 70% identity in the three complementarity determining regions (CDRs) to the sequences set forth in any one or more of SEQ ID NOS: 10736-10972 and 23136-23147 or sequences with less than 3 substitutions in the three CDRs of the sequences set forth in any one or more of SEQ ID NOS: 10736-10972 and 23136-23147 or sequences that bind to the same target antigens or the same epitopes on the target antigens as the sequences set forth in any one or more of SEQ ID NOS: 10736-10972 and 23136-23147 and which encodes a polypeptide that binds to its antigen; (iii) a single chain variable fragment (scFv) comprising a sequence as set forth in any one SEQ ID NO: 11220-11456 or sequences with at least 70% identity thereto and which encodes a polypeptide that binds to its antigen; (iv) a camelid VHH domain comprising a sequence as set forth in any one of SEQ ID NO: SEQ ID NOS: 11524-11525, 11530-11531, 11549-11575, 11576-11592 and 23163-23173 or sequences with at least 70% identity to sequences set forth in any one or more of SEQ ID NOS: 11520-11592 and 23163-23173 and or sequences with at least 70% identity in the three complementarity determining regions (CDRs) to the sequences set forth in any one or more of SEQ ID NOS: 11524-11525, 11530-11531, 11549-11575, 11576-11592 and 23163-23173 or sequences with less than 3 substitutions in the three CDRs of the sequences set forth in any one or more of SEQ ID NOS: 11524-11525, 11530-11531, 11549-11575, 11576-11592 and 23163-23173 or sequences that bind to the same target antigens or the same epitopes on the target antigens as the sequences set forth in any one or more of SEQ ID NOS: 11524-11525, 11530-11531, 11549-11575, 11576-11592 and 23163-23173 and which encodes a polypeptide that binds to its antigen; (v) a non-immunoglobulin scaffold encoded by a polynucleotide of any one of SEQ ID NOS: 11662-11673 or sequences with at least 70% identity to sequences set forth in any one or more of SEQ ID NOS: 11662-11673 or sequences that bind to the same target antigens or the same epitopes on the target antigens as the sequences set forth in any one or more of SEQ ID NOS: 11662-11673; (vi) the ligand binding domain of a receptor comprising a sequence as set forth in any one of SEQ ID NO:11674-11691 or sequences with at least 70% identity thereto and which encodes a polypeptide that binds to its cognate; (vii) the receptor binding domain of a ligand comprising a sequence as set forth in any one of SEQ ID NO 11692 to 11702, 22391-22392, 22402-22404 or sequences with at least 70% identity thereto and which encodes a polypeptide that binds to its cognate; (viii) a single vH domain comprising a sequence as set forth in any one of SEQ ID NO: SEQ ID NOS: 11519-11523, 11526-11529, 11532-11548, 11644-11645 and 23174 or sequences with at least 70% identity to sequences set forth in any one or more of SEQ ID NOS: 11519-11523, 11526-11529, 11532-11548, 11644-11645 and 23174 and or sequences with 70% identity in the three complementarity determining regions (CDRs) to the sequences set forth in any one or more of SEQ ID NOS: 11519-11523, 11526-11529, 11532-11548, 11644-11645 and 23174 or sequences with less than 3 substitutions in the three CDRs of the sequences set forth in any one or more of SEQ ID NOS: 11519-11523, 11526-11529, 11532-11548, 11644-11645 and 23174 or sequences that bind to the same target antigens or the same epitopes on the target antigens as the sequences set forth in any one or more of SEQ ID NOS: 11519-11523, 11526-11529, 11532-11548, 11644-11645 and 23174 and which encodes a polypeptide that binds to its antigen; (ix) an adaptor binding domain comprising a sequence as set forth in any one of SEQ ID NO 11704 to 11712, or 22383 or sequences with at least 70% identity thereto and which encodes a polypeptide that binds to its adaptor; (x) an autoantigen comprising a sequence as set forth in any one of SEQ ID NO 11687, 22406-22407 to 11712, or 22383 or sequences with at least 70% identity thereto and which encodes a polypeptide that binds to its autoantibody or autoantibody producing cells; (xi) a TCR variable region (Va, Vb, Vg or Vd) comprising a sequence as set forth in any of SEQ ID NOs: 22396-2239 and 11653-11660 or sequences with at least 70% identity thereto or sequences with at least 70% identity in the three complementarity determining regions (CDRs) to the sequences set forth in any one or more of SEQ ID NOS: 22396-22397 and 11653-11660 or sequences with less than 3 substitutions in the three CDRs of the sequences set forth in any one or more of SEQ ID NOS: 22396-22397 and 11653-11660 or sequences that bind to the same target antigens or the same epitopes on the target antigens as the sequences set forth in any one or more of SEQ ID NOS: 22396-22397 and 11653-11660 and which encodes a polypeptide that binds to its antigen; and (xii) a single variable TCR domain (svd-TCR) comprising a sequence as set forth in any of SEQ ID NOs: 22399-22400 or sequences with at least 70% identity thereto or sequences with 70-99% identity in the three complementarity determining regions (CDRs) to the sequences set forth in any one or more of SEQ ID NOS: 22399-22400 or sequences with less than 3 substitutions in the three CDRs of the sequences set forth in any one or more of SEQ ID NOS: 22399-22400 or sequences that bind to the same target antigens or the same epitopes on the target antigens as the sequences set forth in any one or more of SEQ ID NOS: 22399-22400 and which encodes a polypeptide that binds to its antigen.

[0076] In one embodiment, the disclosure provides at least one recombinant polynucleotide encoding at least one SAR polypeptide wherein at least one of the target antigens is expressed on blood lineage cells while at least one of the target antigens is expressed on solid tumor cells.

[0077] In one embodiment, the disclosure provides a recombinant expression system comprising the recombinant polynucleotide of of the disclosure which is co-expressed with a therapeutic control, wherein the therapeutic control is selected from the group consisting of a truncated epidermal growth factor receptor (tEGFR), truncated epidermal growth factor receptor viii (tEGFRviii), truncated CD30 (tCD30), truncated BCMA (tBCMA), truncated CD19 (tCD19), CD34, thymidine kinase, cytosine deaminase, nitroreductase, xanthine-guanine phosphoribosyl transferase, human caspase 8, human caspase 9, inducible caspase 9 (icaspase9), purine nucleoside phosphorylase, linamarase/linamarin/glucose oxidase, deoxyribonucleoside kinase, horseradish peroxidase (HRP)/indole-3-acetic (IAA), Gamma-glutamylcysteine synthetase, CD20/alphaCD20, CD34/thymidine kinase chimera, dox-dependent caspase-2, mutant thymidine kinase (HSV-TKSR39), AP1903/Fas system, a chimeric cytokine receptor (CCR), 41BBL, CD40L, K13, MC159, cFLIP-L/MRITα, cFLIP-p22, HTLV1 Tax, HTLV2 Tax, HTLV2 Tax-RS mutant, FKBPx2-K13, FKBPx2-HTLV2-Tax, FKBPx2-HTLV2-Tax-RS, IL6R-304-vHH-Alb8-vHH, IL12f, PD1-4H1 scFV, PD1-5C4 scFV, PD1-4H1-Alb8-vHH, PD1-5C4-Alb8-vHH, CTLA4-Ipilimumab-scFv, CTLA4-Ipilimumab-Alb8-vHH, IL6-19A-scFV, IL6-19A-scFV-Alb8-vHH, sHVEM, sHVEM-Alb8-vHH, hTERT, Fx06, CD3z, CD3z-GGGS-41BB, CD3-BBz, CD3-CD28z, CD3-CD28-Lck fusion protein, shRNA targeting Brd4, chimeric antigen receptor (CAR), hTERT, heparinase, a CAR, an inhibitory CAR and combination thereof and combinations thereof.

[0078] In one embodiment, the disclosure provides at least one vector comprising the recombinant polynucleotide comprising a SAR, wherein the vector is selected from the group consisting of a DNA vector, an RNA vector, a plasmid, a lentivirus vector, an adenoviral vector, a retrovirus vector, a baculovirus vector, a sleeping beauty transposon vector, and a piggybac transposon vector.

[0079] In one embodiment, the disclosure provides at least one SAR polypeptide encoded by the at least one recombinant polynucleotide comprising a SAR. In one embodiment, the disclosure provides a recombinant cell or a cell population that expresses the at least one recombinant polynucleotide encoding a SAR of the disclosure. In another embodiment, the disclosure provides a cell or cell population expressing a SAR wherein the cell is an immune effector cell or a stem cell that can give rise to an immune effector cell, or an induced pluripotent stem cell (iPSC) that can give rise to an immune effector cell. The cell or cell population of can be an autologous cell or an allogeneic cell.

[0080] In one embodiment, the disclosure provides a cell or cell population with impaired or abolished functional expression of an endogenous TCR and with functional expression of a SAR polypeptide. The disclosure also provides a cell or cell population where the SAR mRNA and the translated polypeptide is expressed from an expression cassette placed in the locus of an endogenous T cell gene. The disclosure also provides a cell population where the at least one polynucleotide is under the control of the promoter and/or regulatory elements for an endogenous T cell gene. The disclosure provides a cell or cell population where the endogenous T cell gene locus is TRAC locus, TRBC locus, TRGC locus and/or TRDC locus. In one embodiment, the disclosure provides a cell or cell population wherein the placement of the SAR polynucleotide disrupts or abolishes the endogenous expression of a TCR comprising an endogenous TCRα chain and/or an endogenous TCRβ chain, or an endogenous TCRγ chain and/or endogenous TCRδ chain in the T cell. In one embodiment, the disclosure provides a cell or cell population wherein the disruption or abolished expression of an endogenous TCR results in enhanced expression and/or activity of the non-naturally occurring immune receptor as compared to its expression and/or activity in T cells with wild-type endogenous TCR and wherein the SAR has the backbone of one or more of a SIR, a cTCR and/or an Ab-TCR.

[0081] In one embodiment, the disclosure provides a cell or cell population wherein the SAR polypeptide has the backbone of a TFP and the disruption or abolished expression of an endogenous TCR results in impaired expression and/or activity of the SAR as compared to its expression and/or activity in T cells with wild-type endogenous TCR.

[0082] In one embodiment, the disclosure provides a cell or cell population wherein the SAR polypeptide has the backbone of a TFP and the cell or cell population further expresses a sequence encoding a TCR constant chain, wherein the TCR constant chain is i) a TCR alpha constant chain or fragment thereof, or ii) a TCR beta constant chain or a fragment thereof, or iii) a TCR gamma constant chain or fragment thereof, or iv) a TCR delta constant chain or a fragment thereof, or a combination of i) and ii) or iii) and iv), and wherein the expression of a sequence encoding a TCR constant chain restores the expression and/or activity of the SAR polypeptide.

[0083] In one embodiment, the disclosure provides a method of making a SAR-expressing immune effector cell, comprising introducing at least one vector comprising a SAR or at least one recombinant polynucleotide comprising a SAR into an immune effector cell or a hematopoietic stem cell or progenitor cell that can give rise to an immune effector cell, under conditions such that the SAR polypeptide is expressed.

[0084] In one embodiment, the disclosure provides a method of expanding the SAR-expressing immune effector cells in a gas permeable flask under normoxic or hypoxic conditions.

[0085] In one embodiment, the disclosure provides a method where the SAR-expressing immune effector cells are expanded in the presence of a SMAC mimetic or a NIK agonist compound.

[0086] In one embodiment, the disclosure provides a method of providing anti-disease immunity in a subject comprising administering to the subject an effective amount of the immune effector cell or a stem cell that can give rise to an immune effector cell, wherein the cell is an autologous T cell or an allogeneic T cell, or an autologous NKT cell or an allogeneic NKT cell or an autologous or an allogeneic hematopoietic stem cell or an autologous or an allogeneic iPSC that can give rise to an immune effector cell.

[0087] In one embodiment, the disclosure provides a method of treating or preventing a disease associated with expression of a disease-associated antigen in a subject, comprising administering to the subject an effective amount of an immune effector cell comprising a synthetic antigen receptor (SAR) polypeptide, wherein the SAR polypeptide bind to one or more disease-associated antigens selected from antigens listed in Table B and wherein the disease associated with expression of the disease associated antigen is selected from the group consisting of a proliferative disease, a precancerous condition, a cancer, and a non-cancer related indication associated with expression of the disease-associated antigen.

[0088] In one embodiment, the disclosure provides a recombinant polynucleotide encoding a SAR polypeptide, the polynucleotide comprising a sequence selected from the group consisting of SEQ ID NO: 1849-10720, 21609-21625, 21626-21659, 21662-21792. 21808, 21813-21840, 21843-21879, 21882- 21892, 21894-21899, 21901-21947, 21949-21963, 21967-21972, 21985-22085, 22087-22099, 22104-22207, 22209-22250, 22252-22254, 22256-22262, 22264-22273, 22275-22284, 22286-22296 and 22307-22312 or a sequence with at least 75% identity to the nucleotide sequence of the above. In one embodiment, the disclosure provides an amino acid sequence encoding a synthetic antigen receptor (SAR) polypeptide selected from the group consisting of SEQ ID NO: 12539-21410, 22445-22460, 22462-22495, 22498-22614, 22624, 22626-22655, 22658-22685, 22687-22694, 22697-22707, 22709-22714, 22716-22762, 22764-22778, 22782-22787, 22800-22900, 22902-22914, 22919-23022, 23024-23065, 23067-23069, 23071-23077, 23090-23099, 23101-23111 and 23122-23127 or a sequence with at least 75% identity to an amino acid sequences of the forgoing.

[0089] In one embodiment, the disclosure provides a composition comprising at least one SAR polynucleotide, a SAR polypeptide molecule, a SAR vector or a SAR-expressing cell and a pharmaceutically acceptable excipient. In one embodiment, the disclosure provides a kit comprising least one SAR polynucleotide, a SAR polypeptide molecule, a SAR vector or a SAR-expressing cell.

### BRIEF DESCRIPTION OF THE FIGURES

[0090] The disclosure is further described in the following non-limiting figures.

[0091] FIG. 1 shows a schematic representation of different double chain uni-specific, bispecific and multispecific SARs.

[0092] FIG. 2 shows a schematic representation of different double chain uni-specific, bispecific and multispecific SARs comprising different forms of AABD (e.g., vHH, SVH, aVH, affibody, Centyrin etc.).

### DETAILED DESCRIPTION

[0093] The invention will now be further described. In the following passages, different aspects of the invention are defined in more detail. Each aspect so defined may be combined with any other aspect or aspects unless clearly indicated to the contrary. In particular, any feature indicated as being preferred or advantageous may be combined with any other feature or features indicated as being preferred or advantageous.

[0094] Unless stated otherwise, or implicit from context, the following terms and phrases include the meanings provided below. Unless explicitly stated otherwise, or apparent from context, the terms and phrases below do not exclude the meaning that the term or phrase has acquired in the art to which it pertains. The definitions are provided to aid in describing particular embodiments, and are not intended to limit the claimed invention, because the scope of the invention is limited only by the claims.

[0095] Unless otherwise defined, all technical and scientific terms used herein have the same meaning as commonly understood by one of ordinary skill in the art to which this invention belongs.

[0096] As used herein the term “comprising” or “comprises” is used in reference to compositions, methods, and respective component(s) thereof, that are useful to an embodiment, yet open to the inclusion of unspecified elements, whether useful or not. It will be understood by those within the art that, in general, terms used herein are generally intended as “open” terms (e.g., the term “including” should be interpreted as “including but not limited to,” the term “having” should be interpreted as “having at least,” the term “includes” should be interpreted as “includes but is not limited to,” etc.).

[0097] Generally, nomenclatures used in connection with, and techniques of, cell and tissue culture, pathology, oncology, molecular biology, immunology, microbiology, genetics and protein and nucleic acid chemistry and hybridization described herein are those well-known and commonly used in the art. The methods and techniques of the present disclosure are generally performed according to conventional methods well-known in the art and as described in various general and more specific references that are cited and discussed throughout the present specification unless otherwise indicated. See, e.g., Sambrook et al., Molecular Cloning: A Laboratory Manual (4th ed., Cold Spring Harbor Laboratory Press, Cold Spring Harbor, N.Y. (2013)). Enzymatic reactions and purification techniques are performed according to manufacturer’s specifications, as commonly accomplished in the art or as described herein. The nomenclatures used in connection with, and the laboratory procedures and techniques of, immunology, molecular biology, analytical chemistry, synthetic organic chemistry, and medicinal and pharmaceutical chemistry described herein are those well-known and commonly used in the art. Standard techniques are used for chemical syntheses, chemical analyses, pharmaceutical preparation, formulation, and delivery, and treatment of patients.

[0098] The term “about” when referring to a measurable value such as an amount, a temporal duration, and the like, is meant to encompass variations of ±20% or in some instances ±10%, or in some instances ±5%, or in some instances ±1%, or in some instances ±0.1% from the specified value, as such variations are appropriate to perform the disclosed methods or describe the compositions herein. Moreover, any value or range (e.g., less than 20 or similar terminology) explicitly includes any integer between such values or up to the value. Thus, for example, “one to five mutations” explicitly includes 1, 2, 3, 4, and/or 5 mutations. The term “at least” refers to a minimum value in a range. Where “at least” precedes a percentage, the incremental values contemplate in the range are 0.1% up to, for example, 100% (in the case of identity/homology).

[0099] An “antigen binding domain” or “antigen binding module” or “antigen binding segment” or “antigen specific domain” (ASD) refers to a polypeptide or peptide that due to its primary, secondary or tertiary sequence, post-translational modifications and/or charge binds to an antigen with a high degree of specificity. The antigen binding domain may be derived from different sources, for example, an antibody (full length heavy chain, Fab fragments, single chain Fv (scFv) fragments, divalent single chain antibodies or diabodies), a non-immunoglobulin binding protein, a ligand or a receptor. There are, however, numerous alternatives, such as linked cytokines (which leads to recognition of cells bearing the cytokine receptor), affibodies, ligand binding domains from naturally occurring receptors, soluble protein/peptide ligand for a receptor (for example on a tumor cell), peptides, and vaccines to prompt an immune response, which may each be used in various embodiments of the disclosure. In some embodiments, almost any molecule that binds a given cognate or antigen with high affinity can be used as an ASD, as will be appreciated by those of skill in the art. In some embodiments, the antigen binding domain comprises T cell receptors (TCRs) or portions thereof. In exemplary embodiments, the target antigens and SEQ ID Nos of various antigen binding domains are set forth herein in Tables 3-7. In exemplary embodiments, the target antigen and SEQ ID NOs of vL, vH, scFVs, and their CDR regions are set forth herein in Tables 6A-C of Patent Application PCT/US18/53247 and in Tables 3-4 of Patent Application PCT/US19/035096, which are incorporated in their entirety by reference herein. The vL, vH and scFv that can be used in the construction of the SARs of the disclosure may be “fully human”, “humanized”, “chimeric” or non-human in origin. Exemplary fully human vL, vH and scFv are represented by SEQ ID NO: 10854, 11096 and 11338, respectively. Exemplary humanized vL, vH and scFv are represented by SEQ ID NO: 10839, 11082 and 11323, respectively.

[0100] The term “autonomous antigen binding domain” or “AABD” as used herein refers to an antigen binding domain that can bind to an antigen autonomously, i.e., in the absence of another antigen binding domain. An exemplary AABD is a single vH domain or an autonomous vH domain (aVH), typically a single human vH domain (SVH) that can bind an antigen in the absence of a vL domain. An exemplary AABD is a single vL domain or an autonomous vL domain, typically a single human vL domain (SVL) that can bind an antigen in the absence of a vH domain. Another exemplary AABD is a fully human vH domain (FHVH). AABD also refers to other antigen binding domains that can bind an antigen autonomously. In an embodiment, the AABD is a non-scFv antigen binding domain. Exemplary non-scFV based autonomous antigen binding domains include but are not limited to a vHH domain, a humanized vHH domain, a svd-TCR, and non-immunoglobulin antigen binding scaffold such as a DARPIN, an affibody, a ZIP domain (e.g., RZIP, EZIP, E4, R4 etc.), an affilin, an adnectin, an affitin, an obodies, a repebody, a fynomer, an alphabody, an avimer, an atrimer, a centyrin, a pronectin, an anticalin, a kunitz domain, an Armadillo repeat protein or a fragment thereof; the ligand binding domain of a receptor (e.g., CD16-V158A, NKG2D) or a fragment thereof, the receptor binding domain of a ligand (e.g., APRIL, Thrombopoietin etc.) or a fragment thereof, an adaptor (e.g., RZIP, EZIP, E4, K4, NKG2D-YA, NKG2D-AF etc.) or a fragment thereof, an adatptor binding protein (e.g. ULBP2R, ULBP2-S3 etc.) or a fragment thereof, an epitope or a tag (e.g., Streptag, FLAG tag etc.), an autoantigen or a fragment thereof and the like.

[0101] The disclosure described the use of AABD, such as human VH domains, typically multiple human VH domains, as building blocks to make unispecific, bispecific and multispecific SARs. In an embodiment, the disclosure describes the use of AABD, such as human VH domains, typically multiple human VH domains, as building blocks to make unispecific, bispecific and multispecific CAR, SIR, cTCR, Ab-TCR, AABD-TCR, TFPs and recombinant TCRs.

[0102] The term “ABR” or “Antigen Binding Receptor” as described herein refers to any receptor that has an antigen binding domain. The antigen binding domain of an ABR may comprise of a scFv, a vL, vH, VHH, antibody, antibody fragment (e.g., Fab), antibody like moiety, Vα, Vβ, cytokine, receptor etc. In one embodiment, an ABR has a transmembrane or membrane anchoring domain that allows it to be expressed on the cell surface. Exemplary ABR include a 1^{st} generation CAR, a 2^{nd} generation CAR, a TFP, a TRI-TAC or TAC etc. Antigen masking receptors, as described herein, are also examples of ABR.

[0103] The term “Ab-TCR” or “AbTCR” refers to a next generation CAR platform as described in WO 2017/070608 A1 which is incorporated herein by reference. In an embodiment, an Ab-TCR comprises an antibody moiety that specifically binds to a target antigen fused to a TCR module capable of recruiting at least one TCR signaling module. Exemplary TCR modules that can be used in the construction of Ab-TCR are provided in SEQ ID NO:6009-6014 (Table 6) and in WO 2017/070608 A1 which is incorporated herein by reference. This disclosure provides bispecific, biparatopic and mutlispecific SARs with the backbone of Ab-TCR comprising one or more AABDs. The AABD domains of the SARs of the disclosure with the backbone of Ab-TCR can be fully human, humanized or non-human. In an embodiment, the disclosure provides Ab-TCR comprising one or more fully human vH domains. In an embodiment, the disclosure provides Ab-TCR comprising one or more fully human vL domains.

[0104] The term “AABD-TCR” refers to a novel double chain SAR platform described in this disclosure in which one or more AABDs are operably linked in frame to a TCR module capable without the presence of an intervening vL, vH, Va, Vb, Vg and/or Vd chain. In a preferred embodiment of the disclosure, an AABD-TCR comprises an Ig like linker domain that is present between the AABD and the TCR modules. The TCR module of the AABD-TCR is capable of recruiting at least one TCR signalign module. Exemplary AABD-TCRs are represented by SEQ ID NO (DNA): 6521 and 6530. Additional AABD-TCRs are presented in Tables 33 and 34. The AABD domains of AABD-TCR can be fully human, humanized or non-human. In an embodiment, the disclosure provides AABD-TCR comprising one or more fully human vH domains. In an embodiment, the disclosure provides AABD-TCR comprising one or more fully human vL domains.

[0105] The term “accessory module” refers to any one or more of PDL1, PDL2, CD80, CD86, crmA, p35, hNEMO-K277A (or NEMO-K277A), hNEMO-K277A-delta-V249-K555, mNEMO-K270A, K13-opt, IKK2-S177E-S181E (or IKK2-SS/EE), IKK1-S176E-S180E (or IKK1-SS/EE), MyD88-L265P, TCL-1a, MTCP-1, CMV-141, 41BBL, CD40L, vFLIP-K13, MC159, cFLIP-L/MRITα, cFLIP-p22, HTLV1 Tax, HTLV2 Tax, HTLV2 Tax-RS mutant, FKBPx2-K13, FKBPx2-HTLV2-Tax, FKBPx2-HTLV2-Tax-RS, IL6R-304-vHH-Alb8-vHH, IL12f, PD1-4H1 scFV, PD1-5C4 scFV, PD1-4H1-Alb8-vHH, PD1-5C4-A1b8-vHH, CTLA4-Ipilimumab-scFv, CTLA4-Ipilimumab-Alb8-vHH, IL6-19A-scFV, IL6-19A-scFV-Alb8-vHH, sHVEM, sHVEM-Alb8-vHH, hTERT, Fx06, shRNA targeting Brd4, IgSP-[hTRAC-opt2], IgSP-[hTRBC-opt2] and combination thereof that is expressed in an immune cell (e.g., T cell, e.g., CAR-T cell or TCR-T cell) to decrease, regulate or modify the activity of the immune cell. In some embodiments, the accessory module is co-expressed with an immune receptor such as a CAR or a TCR to increase, decrease, regulate or modify the expression or activity of a CAR or a TCR or a CAR-expressing or a TCR-expressing cell. The accessory module can be co-expressed with a CAR or a TCR using a single vector or using two or more different vectors. In a further embodiment, the accessory module comprises an FKBP (FK506 binding protein)-fusion protein, such as FKBPx2-NEMO, whose activity can be controlled by the administration of a dimerizer molecule. In some embodiments, the accessory module is expressed in an antigen presenting cell, e.g., a dendritic cell.

[0106] The term “affibody” as used here refers to antibody mimetic molecules that are composed of alpha helices and lack disulfide bonds. An exemplary Affibody targeting Her3 is represented by SEQ ID NO: 11664. Other exemplary affibodies are known in the art.

[0107] As used herein “affinity” is meant to describe a measure of binding strength. Affinity, in some instances, depends on the closeness of stereochemical fit between a binding agent and its target (e.g., between an antibody and antigen including epitopes specific for the binding domain), on the size of the area of contact between them, and on the distribution of charged and hydrophobic groups. Affinity generally refers to the “ability” of the binding agent to bind its target. There are numerous ways used in the art to measure “affinity”. For example, methods for calculating the affinity of an antibody for an antigen are known in the art, including use of binding experiments to calculate affinity. Binding affinity may be determined using various techniques known in the art, for example, surface plasmon resonance, bio-layer interferometry, dual polarization interferometry, static light scattering, dynamic light scattering, isothermal titration calorimetry, ELISA, analytical ultracentrifugation, and flow cytometry. An exemplary method for determining binding affinity employs surface plasmon resonance. Surface plasmon resonance is an optical phenomenon that allows for the analysis of real-time biospecific interactions by detection of alterations in protein concentrations within a biosensor matrix, for example using the BIAcore system (Pharmacia Biosensor AB, Uppsala, Sweden and Piscataway, N.J.). As used herein, the term “specific binding” means the contact between an antibody and an antigen with a binding affinity of at least 10⁻⁶ M. In certain aspects, antibodies bind with affinities of at least about 10⁻⁷ M, and typically 10⁻⁸ M, 10⁻⁹ M, 10⁻¹⁰ M, 10⁻¹¹ M, or 10⁻¹² M.

[0108] The term “antibody,” as used herein, refers to a protein, or polypeptide sequence derived from an immunoglobulin molecule which specifically binds with an antigen. Antibodies can be monoclonal, or polyclonal, multiple or single chain, or intact immunoglobulins, and may be derived from natural sources or from recombinant sources. Antibodies can be tetramers of immunoglobulin molecules. The antibody may be “fully human”, ‘humanized’, ‘chimeric’ or non-human.

[0109] As used herein, “humanized” antibody refers to forms of non-human ( e.g. murine) antibodies that are chimeric immunoglobulins, immunoglobulin chains, or fragments thereof (such as Fv, Fab, Fab′, F(ab′)2 or other antigen binding subsequences of antibodies) that contain minimal sequence derived from non-human immunoglobulin.

[0110] As used herein, “human antibody” or “fully human antibody” means an antibody or an antibody fragment having an amino acid sequence corresponding to that of an antibody produced by a human and/or which has been made using any of the techniques for making human antibodies known to those skilled in the art or disclosed herein. This definition of a human antibody includes antibodies comprising at least one human heavy chain polypeptide or at least one human light chain polypeptide.

[0111] The term “chimeric antibody” is intended to refer to antibodies in which the variable region sequences are derived from one species and the constant region sequences are derived from another species.

[0112] The term “antibody fragment” refers to at least one portion of an antibody, that retains the ability to specifically interact with (e.g., by binding, steric hindrance, stabilizing/destabilizing, spatial distribution) an epitope of an antigen. Examples of antibody fragments include, but are not limited to, Fab, Fab′, Fv fragments, scFv antibody fragments, disulfide-linked Fvs (sdFv), a Fd fragment consisting of the VH and CH1 domains, linear antibodies, single domain antibodies (sdAb) such as either vL or vH, camelid vHH domains, multi-specific antibodies formed from antibody fragments such as a bivalent fragment comprising two Fab fragments linked by a disulfide bridge at the hinge region, and an isolated CDR or other epitope binding fragments of an antibody. An antigen binding fragment can also be incorporated into single domain antibodies, maxibodies, minibodies, nanobodies, intrabodies, diabodies, triabodies, tetrabodies, v-NAR and bis-scFv (see, e.g., Hollinger and Hudson, Nature Biotechnology 23:1126-1136, 2005). Antigen binding fragments can also be grafted into scaffolds based on polypeptides such as a fibronectin type III (Fn3) (see U.S. Pat. No.: 6,703,199, which describes fibronectin polypeptide minibodies).

[0113] The term “antibody heavy chain,” refers to the larger of the two types of polypeptide chains present in antibody molecules in their naturally occurring conformations, and which normally determines the class to which the antibody belongs.

[0114] The term “antibody light chain,” refers to the smaller of the two types of polypeptide chains present in antibody molecules in their naturally occurring conformations. Kappa (κ) and lambda (λ) light chains refer to the two major antibody light chain isotypes.

[0115] “Anticancer agent” refers to agents that inhibit aberrant cellular division and growth, inhibit migration of neoplastic cells, inhibit invasiveness or prevent cancer growth and metastasis. The term includes chemotherapeutic agents, biological agent (e.g., siRNA, viral vectors such as engineered MLV, adenoviruses, herpes virus that deliver cytotoxic genes), antibodies and the like.

[0116] The term “anticancer effect” refers to a biological effect which can be manifested by various means, including but not limited to, a decrease in tumor volume, a decrease in the number of cancer cells, a decrease in the number of metastases, an increase in life expectancy, decrease in cancer cell proliferation, decrease in cancer cell survival, or amelioration of various physiological symptoms associated with the cancerous condition. An “anticancer effect” can also be manifested by the ability of the SARs in prevention of the occurrence of cancer in the first place.

[0117] The term “antigen” or “Ag” refers to a molecule that provokes an immune response. This immune response may involve either antibody production, or the activation of specific immunologically-competent cells, or both. The skilled artisan will understand that any macromolecule, including virtually all proteins or peptides, can serve as an antigen. Furthermore, antigens can be derived from recombinant or genomic DNA. A skilled artisan will understand that any DNA, which comprises a nucleotide sequences or a partial nucleotide sequence encoding a protein that elicits an immune response therefore encodes an “antigen” as that term is used herein. Furthermore, one skilled in the art will understand that an antigen need not be encoded solely by a full-length nucleotide sequence of a gene. The disclosure includes, but is not limited to, the use of partial nucleotide sequences of more than one gene and that these nucleotide sequences are arranged in various combinations to encode polypeptides that elicit the desired immune response. Moreover, a skilled artisan will understand that an antigen need not be encoded by a “gene” at all. It is readily apparent that an antigen can be generated synthesized or can be derived from a biological sample, or might be macromolecule besides a polypeptide. Such a biological sample can include, but is not limited to a tissue sample, a tumor sample, a cell or a fluid with other biological components.

[0118] The term “antigen presenting cell” or “APC” refers to an immune system cell such as an accessory cell (e.g., a B-cell, a dendritic cell, and the like) that displays a foreign antigen complexed with major histocompatibility complexes (MHC’s) on its surface. T-cells may recognize these complexes using their T-cell receptors (TCRs). APCs process antigens and present them to T-cells.

[0119] The term “anti-infection effect” refers to a biological effect that can be manifested by various means, including but not limited to, e.g., decrease in the titer of the infectious agent, a decrease in colony counts of the infectious agent, amelioration of various physiological symptoms associated with the infectious condition. An “anti-infectious effect” can also be manifested by the ability of the peptides, polynucleotides, cells and antibodies in prevention of the occurrence of infection in the first place.

[0120] The term “antitumor effect” or “anti-cancer effect” refers to a biological effect which can be manifested by various means, including but not limited to, e.g., a decrease in tumor volume, a decrease in the number of tumor cells, a decrease in tumor cell proliferation, inhibition of metastasis, or a decrease in tumor cell survival.

[0121] The term “Association constant (Ka)” is defined as the equilibrium constant of the association of a receptor and ligand.

[0122] “Autoantibody” refers to an antibody that is produced by a B-cell specific for an autoantigen.

[0123] The term “autoantigen” refers to an endogenous antigen that stimulates production of an autoimmune response, such as production of autoantibodies. Autoantigen also includes a self-antigen or antigen from a normal tissue that is the target of a cell mediated or an antibody-mediated immune response that may result in the development of an autoimmune disease. Examples of autoantigens include, but are not limited to, desmoglein 1, desmoglein 3, and fragments thereof.

[0124] “Avidity” refers to the strength of the interaction between a binding agent and its target (e.g., the strength of the interaction between an antibody and its antigen target, a receptor and its cognate and the like). The avidity can be weak or strong. Methods for calculating the affinity of an antibody for an antigen are known in the art, including use of binding experiments to calculate affinity. Antibody activity in functional assays (e.g., flow cytometry assay or Malibu-Glo assay) is also reflective of antibody affinity.

[0125] As used herein, the term “backbone” or “architecture” refers to the configuration of the different components (e.g., antigen binding domains, hinge domains, transmembrane domains, signaling domains) that comprise different SAR (e.g., CAR, SIR, cTCR, Ab-TCR, TFP etc.) and/or any accessory module which is generally optional. In exemplary embodiment, a SAR can have the backbone of a 1^{st} generation CAR, a 2^{nd} generation CAR, a double chain SIR, a one and half chain SIR, a double chain cTCR, a one and a half chain cTCR, a zSIR, an Ab-TCR, an AABD-TCR, a εTFP, a γTFP, a δTFP, an αβTFP, an γδTFP, a TCR etc. A SAR with a particular backbone may have further subtypes, each representing a different backbone. Thus, a SAR with the backbone of a double chain SIR may have further subtypes based on the number (unispecific, bispecific, multispecific etc.) and nature (e.g., vL, vH, scFv, vHH, FHVH, DARPIN etc.) of its antigen binding domains. Each of the above subtypes can be considered a separate backbone. In an exemplary embodiment, a SAR on any of the backbone may further co-express an accessory module (e.g., PAC, K13-opt, MC159, icaspase 9 etc.). Thus, a SAR with the backbone of a double chain SIR may be coexpressed with K13-opt. In one embodiment, the SAR and the accessory module are encoded by a single nucleic acid molecule. In another embodiment, the SAR is encoded by the first nucleic acid molecule and the accessory module is encoded by a second nucleic acid molecule. In some embodiments, the accessory module is encoded by more than one nucleic acid molecule, depending on the number of components in the accessory modules. The two or more components of the SAR may be separated by a cleavable linker such as a 2A ribosomal skip sequence (e.g., P2A, T2A, F2A etc.).

[0126] Table A1-1: SAR architectures/backbones. First generation conventional CARs (Conventional CAR 1) have an activation domain (AD) domain (e.g., CD3z) and no costimulatory domain (CD). The TCR fusion proteins (TFP) are another example of conventional CAR 1. Second generation conventional CARs (Conventional CAR 2 or CAR II) have one costimulatory domain (e.g., 4-1BB or CD28) and an intracellular activation domain (AD) domain (e.g., CD3z). Third generation conventional CARs (Conventional CAR 3 or CAR III) have two costimulatory domains (e.g., 4-1BB and CD28) and an intracellular activation domain (e.g., CD3z). Ab-TCRs are dual chain receptors incorporating a vL-IgCL-linker-TCR domain (TCRD and a vH-Ig-CH1-linker-TCR domain (TCRD) and have been described in PCT/US2016/058305. AABD-TCRs are dual chain receptors described in this disclosure and generally incorporate an AABD-IgCL-TCRD module and an IgCH1-TCRD module or an IgCL-TCRD module and an AABD-IgCH1-TCRD module, where TCRD are complementary in nature (i.e., TCRα and TCRβ or TCRγ and TCRδ). Bispecific and multispecific AABD-TCRs are also described in this disclosure and generally incorporate an (AABD)n-IgCL-TCRD module and an (AABD)n-IgCH1-TCRD module, where TCRD are complementary in nature (i.e., TCRα and TCRβ or TCRγ and TCRδ). cTCRs are single chain, one-and-half, or double chain receptors consisting of antigen binding domain derived from a vL and vH fragment that are fused to one or more TCR constant chain (TCR-C) comprising their wild-type nucleic acid and amino acid sequences and result in activation of T cell signaling. Different configurations of cTCR are described in PCT/US2017/064379, WO 2018/102795 A1 and Gross et al, Proc. Natl. Acad. Sci USA (1989) 86:10024-26. Synthetic immune receptors are next generation CARs and are described in PCT/US2017/064379 or WO 2018/102795 A1. zSIRs are double chain receptors comprising two CD3z chains or fragments thereof with optional linkers and are described in PCT/US2019/035096.

TABLE A1-1

Exemplary Unispecific SAR Architectures (Backbones)

| | | | | | | | |
|---|---|---|---|---|---|---|---|
| 1 | CAR 1 or CAR I (including TFP) | ASD | HR | TM | AD | | |
| 2 | CAR 2 (CAR II) | ASD | HR | TM | CD | AD | |
| 3 | CAR 3 (CAR III) | ASD | HR | TM | CD-I | CSD-II | AD |
| 4 | Ab-TCR | vL-Ig-CL | TCRD(1) | 2A | vH-Ig-CH1 | TCRD (II) | |
| 5 | Double Chain cTCR/SIR | vL | TCR-C(1) | 2A | vH | TCR-C (II) | |
| 6 | Double Chain zSIR | vL-linker | CD3z | 2A | vH-linker | CD3z | |
| 7 | One & Half Chain cTCR/SIR | | TCR-C(1) | 2A | ASD | TCR-C (II) | |
| 8 | AABD-TCR | AABD-Ig-CL | TCRD(1) | 2A | Ig-CH | TCRD(L) | |

[0127] TABLES A1-1 to A1-9 provide exemplary architectures of unispecific, bispecific and multispecific SARs of this disclosure. The abbreviations used are: SP (signal peptide); AADB (autonomous antigen binding domain); L (optional linker); LL (Long linker), (AABD-L)n (n copies of AABD with optional linker where n = 0, 1, 2, 3, 4 or more), AABD1-4 (different AABD targeting one or more antigens), V1 (vL, vH, Va, Vb, Vg or Vd chains), Ig (Ig linker), ConP (connecting peptide), TM (transmembrane domain), IC (intracellular domain), Ca (Constant chain of TCRα), Cb (constant chain of TCRβ), Cg (constant chain of TCRγ), Cd (constant chain of TCRδ), scFv (single chain fragment variable), scTFv (single chain fragment comprising two variable fragments of a TCR, e.g., Va and Vb), dCa/dCb/dCg/dCd (N-terminallly deleted constant chain of TCRα, (β, γ or δ lacking their Ig linker domain), TCR-ConP (connecting peptide of TCRα, (β, γ or δ constant chain), Ca-ConP (connecting peptide of TCRα constant chain), IgCL (Ig linker from immunoglobulin light chain), IgCH1 (Ig liker from immunoglobulin heavy chain), CD3εγδ ECD (extracellular domain of CD3s, y or δ chains), CD (costimulatory domain), 4-1BB (costimulatory domain of 4-1BB), CD28 (costimulatory domain of CD28), CD3z (activation domain of CD3z).

TABLE A1-2

EXEMPLARY BISPECIFIC AND MULTISPECIFIC SARS ARCHITECTURES

| SAR Class | | | | | | | | | | | | | | | | |
|---|---|---|---|---|---|---|---|---|---|---|---|---|---|---|---|---|
| 1 | SP | L | (AABD -L)n | V 1 | L | Ig | ConP | TM | IC | | | | | | | |
| 2 | SP | L | (AABD -L)n | V 1 | L | L L | ConP | TM | IC | | | | | | | |
| 3 | SP | L | AABD 1 | L | V1 | L | Ig | Con P | TM | IC | | | | | | |
| 4 | SP | L | AABD 1 | L | AABD 2 | L | V1 | L | Ig | ConP | TM | IC | | | | |
| 5 | SP | L | AABD 1 | L | AABD 2 | L | AABD3 | L | AABD4 | L | V1 | L | I g | Con P | TM | IC |
| 6 | SP | L | AABD 1 | L | V1 | L | LL | Con P | TM | IC | | | | | | |
| 7 | SP | L | AABD 1 | L | AABD 2 | L | V1 | L | LL | ConP | TM | IC | | | | |
| 8 | SP | L | AABD 1 | L | AABD 2 | L | AAB D3 | L | AABD4 | L | V1 | L | LL | ConP | TM | IC |

TABLE A1-3

EXEMPLARY BISPECIFIC AND MULTISPECIFIC SARS WITH THE BACKBONE OF DC-SIR OR TCR (INCLUDING HLA-INDEPENDENT TCR)

| | | | | | | |
|---|---|---|---|---|---|---|
| SAR Class | | | | | | |
| 1 | SP | L | (AABD-L)n | vL | L | C-abgd (TCRα/β/γ/δ constant chain) |
| | SP | L | (AABD-L)n | vH | L | C-abgd (TCRα/β/γ/δ constant chain) |
| 2 | SP | L | (AABD-L)n | vL | L | Cb (TCRβ-constant chain) |
| | SP | L | (AABD-L)n | vH | L | Ca (TCRα-constant chain) |
| 3 | SP | L | (AABD-L)n | vL | L | Ca (TCRα-constant chain) |
| | SP | L | (AABD-L)n | vH | L | Cb (TCRβ-constant chain) |
| 4 | SP | L | (AABD-L)n | vL | L | Cg (TCRγ-constant chain) |
| | SP | L | (AABD-L)n | vH | L | Cd (TCRδ-constant chain) |
| 5 | SP | L | (AABD-L)n | vL | L | Cd (TCRδ-constant chain) |
| | SP | L | (AABD-L)n | vH | L | Cg (TCRγ-constant chain) |
| 6 | SP | L | (AABD-L)n | Va | L | Cb (TCRβ-constant chain) |
| | SP | L | (AABD-L)n | Vb | L | Ca (TCRα-constant chain) |
| 7 | SP | L | (AABD-L)n | Va | L | Ca (TCRα-constant chain) |
| | SP | L | (AABD-L)n | Vb | L | Cb (TCRβconstant chain) |
| 8 | SP | L | (AABD-L)n | Vg | L | Cg (TCRγ-constant chain) |
| | SP | L | (AABD-L)n | Vd | L | Cd (TCRδ-constant chain) |
| 9 | SP | L | (AABD-L)n | Vd | L | Cd (TCRδ-constant chain) |
| | SP | L | (AABD-L)n | Vg | L | Cg (TCRγ-constant chain) |

TABLE A1-4

EXEMPLARY BISPECIFIC AND MULTI-SPECIFIC SARS WITH A HYBRID BACKBONE

| | | | | | | |
|---|---|---|---|---|---|---|
| SAR Class | | | | | | |
| 1 | SP | L | (AABD-L)n | vL/vH | L | C-abgd (TCRα/β/γ/δ constant chain) |
| | SP | L | (AABD-L)n | Va/b/c/d | L | C-abgd (TCRα/β/γ/δ constant chain) |
| 2 | SP | L | (AABD-L)n | vL | L | Cb (TCRβ-constant chain) |
| | SP | L | (AABD-L)n | Vb | L | Ca (TCRα-constant chain) |
| 3 | SP | L | (AABD-L)n | vH | L | Ca (TCRα-constant chain) |
| | SP | L | (AABD-L)n | Va | L | Cb (TCRβ-constant chain) |
| 4 | SP | L | (AABD-L)n | vH | L | Cg (TCRy-constant chain) |
| | SP | L | (AABD-L)n | Vb | L | Cd (TCRδ-constant chain) |
| 5 | SP | L | (AABD-L)n | vL | L | Cd (TCRδ-constant chain) |
| | SP | L | (AABD-L)n | Vg | L | Cg (TCRγ-constant chain) |
| 6 | SP | L | (AABD-L)n | vL | L | Cb (TCRβ-constant chain) |
| | SP | L | (AABD-L)n | Vd | L | Ca (TCRα-constant chain) |
| 7 | SP | L | (AABD-L)n | vH | L | Ca (TCRα-constant chain) |
| | SP | L | (AABD-L)n | Vg | L | Cb (TCRβ-constant chain) |
| 8 | SP | L | (AABD-L)n | vH | L | Cg (TCRγ-constant chain) |
| | SP | L | (AABD-L)n | Vd | L | Cd (TCRδ-constant chain) |
| 9 | SP | L | (AABD-L)n | Va | L | Cd (TCRδ-constant chain) |
| | SP | L | (AABD-L)n | Vg | L | Cg (TCRγ-constant chain) |

TABLE A1-5

EXEMPLARY BISPECIFIC AND MULTISPECIFIC SARS WITH BACKBONE OF ONE AND HALF CHAIN-SIR

| | | | | | | |
|---|---|---|---|---|---|---|
| SAR Class | | | | | | |
| 1 | SP | L | (AABD-L)n | scFv | L | C-abgd (TCRα/β/γ/δ constant chain) |
| | SP | L | (AABD-L)n | | L | C-abgd (TCRα/β/γ/δ constant chain) |
| 2 | SP | L | (AABD-L)n | scFv | L | Cb (TCRβ-constant chain) |
| | SP | L | (AABD-L)n | | L | Ca (TCRα-constant chain) |
| 3 | SP | L | (AABD-L)n | scFv | L | Ca (TCRα-constant chain) |
| | SP | L | (AABD-L)n | | L | Cb (TCRβ-constant chain) |
| 4 | SP | L | (AABD-L)n | scFv | L | Cg (TCRγ-constant chain) |
| | SP | L | (AABD-L)n | | L | Cd (TCRδ-constant chain) |
| 5 | SP | L | (AABD-L)n | scFv | L | Cd (TCRδ-constant chain) |
| | SP | L | (AABD-L)n | | L | Cg (TCRγ-constant chain) |

TABLE A1-6: EXEMPLARY BISPECIFIC AND MULTISPECIFIC SARS WITH BACKBONE OF Ab-TCR

| | | | | | | | | | | |
|---|---|---|---|---|---|---|---|---|---|---|
| SAR Class | | | | | | | | | | |
| 1 | SP | L | (AABD-L)n | vL | L | Ig (Ig Linker) | | TCR-ConP | TM | IC |
| | SP | L | (AABD-L)n | vH | L | Ig (Ig Linker) | | TCR-ConP | TM | IC |
| 2 | SP | L | (AABD-L)n | vL | L | IgCL | | TCR-ConP | TM | IC |
| | SP | L | (AABD-L)n | vH | L | Ig-CH1 | | TCR-ConP | TM | IC |
| 3 | SP | L | (AABD-L)n | vL | L | IgCL | | Ca-ConP | TM | IC |
| | SP | L | (AABD-L)n | vH | L | IgG1-CH1 | | Cb-ConP | TM | IC |
| 4 | SP | L | (AABD-L)n | vL | L | IgCL | | Cb-ConP | TM | IC |
| | SP | L | (AABD-L)n | vH | L | IgA1-CH1 | | Ca-ConP | TM | IC |
| 5 | SP | L | (AABD-L)n | vL | L | IgCL | | Cg-ConP | TM | IC |
| | SP | L | (AABD-L)n | vH | L | IgD-CH1 | | Cd-ConP | TM | IC |
| 6 | SP | L | (AABD-L)n | vL | L | IgCL | | Cd-ConP | TM | IC |
| | SP | L | (AABD-L)n | vH | L | IgM-CH1 | | Cg-ConP | TM | IC |
| 7 | SP | L | (AABD-L)n | | vL | L | Ig (Ig linker) | dC (deleted TCRα/β/γ/δ constant chain) | | |
| | SP | L | (AABD-L)n | | vH | L | Ig (Ig linker) | dC (deleted TCRα/β/γ/δ constant chain) | | |
| 8 | SP | L | (AABD-L)n | | vL | L | IgCL | dCa (deleted TCRα constant chain) | | |
| | SP | L | (AABD-L)n | | vH | L | Ig-CH1 | dCb (deleted TCRβ constant chain) | | |
| 9 | SP | L | (AABD-L)n | | vL | L | IgCL | dCg (deleted TCRγ constant chain) | | |
| | SP | L | (AABD-L)n | | vH | L | Ig-CH1 | dCd (deleted TCRδ constant chain) | | |

TABLE A1-7

EXEMPLARY BISPECIFIC AND MULTISPECIFIC SARS WITH BACKBONE OF AABD-TCR

| SAR Class | | | | | | | | | | | | | | |
|---|---|---|---|---|---|---|---|---|---|---|---|---|---|---|
| 1 | S P | I | (AABD-L)n | L | Ig | Con P | TM | IC | | | | | | |
| 2 | S P | L | AABD1 | L | Ig | Con P | TM | IC | | | | | | |
| 3 | S P | L | AABD1 | L | AABD 2 | L | Ig | Con P | TM | IC | | | | |
| 4 | S P | L | AABD1 | L | AABD 2 | L | AAB D3 | L | Ig | Con P | T M | IC | | |
| 5 | S P | L | AABD1 | L | AABD 2 | L | AAB D3 | L | AA BD4 | L | Ig | Con P | T M | I C |
| 6 | S P | L | (AABD-L)n | L | LL | Con P | TM | IC | | | | | | |
| 7 | S P | L | AABD1 | L | LL | Con P | TM | IC | | | | | | |
| 8 | S P | L | AABD1 | L | AABD 2 | L | LL | Con P | TM | IC | | | | |
| 9 | S P | L | AABD1 | L | AABD 2 | L | AAB D3 | L | LL | Con P | T M | IC | | |
| 10 | S P | L | AABD1 | L | AABD 2 | L | AAB D3 | L | AA BD4 | L | LL | Con P | T M | I C |

TABLE A1-8

EXEMPLARY BISPECIFIC AND MULTISPECIFIC SARS WITH BACKBONE OF AABD-TCR

| | | | | | | | | |
|---|---|---|---|---|---|---|---|---|
| SAR Class | | | | | | | | |
| 1 | SP | L | (AABD-L)n | L | Ig (Ig linker) | TCR-ConP | TM | IC |
| | SP | L | (AABD-L)n | L | Ig (Ig linker) | TCR-ConP | TM | IC |
| 2 | SP | L | (AABD-L)n | L | IgCL | TCR-ConP | TM | IC |
| | SP | L | (AABD-L)n | L | Ig-CH1 | TCR-ConP | TM | IC |
| 3 | SP | L | (AABD-L)n | L | IgCL | Ca-ConP | TM | IC |
| | SP | L | (AABD-L)n | L | IgG1-CH1 | Cb-ConP | TM | IC |
| 4 | SP | L | (AABD-L)n | L | IgCL | Cb-ConP | TM | IC |
| | SP | L | (AABD-L)n | L | IgA1-CH1 | Ca-ConP | TM | IC |
| 5 | SP | L | (AABD-L)n | L | IgCL | Cg-ConP | TM | IC |
| | SP | L | (AABD-L)n | L | IgD-CH1 | Cd-ConP | TM | IC |
| 6 | SP | L | (AABD-L)n | L | IgCL | Cd-ConP | TM | IC |
| | SP | L | (AABD-L)n | L | IgM-CH1 | Cg-ConP | TM | IC |
| 7 | SP | L | (AABD-L)n | L | Ig (Ig linker) | dC (deleted TCRα/β/γ/δ constant chain) | | |
| | SP | L | (AABD-L)n | L | Ig (Ig linker) | dC (deleted TCRα/β/γ/δ constant chain) | | |
| 8 | SP | L | (AABD-L)n | L | IgCL | dCa (deleted TCRα constant chain) | | |
| | SP | L | (AABD-L)n | L | Ig-CH1 | dCb (deleted TCRβ constant chain) | | |
| 9 | SP | L | (AABD-L)n | L | IgCL | dCg (deleted TCRγ constant chain) | | |
| | SP | L | (AABD-L)n | L | Ig-CH1 | dCd (deleted TCRδ constant chain) | | |

TABLE A1-9

EXEMPLARY BISPECIFIC AND MULTISPECIFIC SARS WITH BACKBONE OF SINGLE CHAIN CAR, TFP and scTFv-CAR

| SAR Class | | | | | | | | | | |
|---|---|---|---|---|---|---|---|---|---|---|
| 1 | SP | L | (AABD-L)n | scFv | L | LL | TM | AD | | |
| 2 | SP | L | (AABD-L)n | scFv | L | Hinge | TM | AD | | |
| 3 | SP | L | (AABD-L)n | scFv | L | cD3εγδ ECD | TM | AD | | |
| 4 | SP | L | (AABD-L)n | scFv | L | LL | TM | (CD)n | AD | |
| 5 | SP | L | (AABD-L)n | scFv | L | Hinge | TM | (CD)n | AD | |
| 6 | SP | L | (AABD-L)n | scFv | L | cD3εγδ ECD | TM | (CD)n | AD | |
| 7 | SP | L | (AABD-L)n | scFv | L | LL | TM | CD1 | CD2 | AD |
| 8 | SP | L | (AABD-L)n | scFv | L | Hinge | TM | CD1 | CD2 | AD |
| 9 | SP | L | (AABD-L)n | scFv | L | cD3εγδ ECD | TM | CD1 | CD2 | AD |
| 10 | SP | L | (AABD-L)n | scFv | L | CD8-Hinge | CD8-TM | 4-1BB | CD3z | |
| 11 | SP | L | (AABD-L)n | scFv | L | CD28-Hinge | CD28-TM | CD28 | CD3z | |
| 12 | SP | L | (AABD-L)n | scFv | L | CD3ε-ECD | CD3e-TM | 4-1BB | CD3z | |
| 13 | SP | L | (AABD-L)n | scTFv | L | LL | TM | AD | | |
| 14 | SP | L | (AABD-L)n | scTFv | L | Hinge | TM | AD | | |
| 15 | SP | L | (AABD-L)n | scTFv | L | CD3εγδ ECD | TM | AD | | |
| 16 | SP | L | (AABD-L)n | scTFv | L | LL | TM | (CD)n | AD | |
| 17 | SP | L | (AABD-L)n | scTFv | L | Hinge | TM | (CD)n | AD | |
| 18 | SP | L | (AABD-L)n | scTFv | L | cD3εγδ ECD | TM | (CD)n | AD | |
| 19 | SP | L | (AABD-L)n | scTFv | L | LL | TM | CD1 | CD2 | AD |
| 20 | SP | L | (AABD-L)n | scTFv | L | Hinge | TM | CD1 | CD2 | AD |
| 21 | SP | L | (AABD-L)n | scTFv | L | cD3εγδ ECD | TM | CD1 | CD2 | AD |
| 22 | SP | L | (AABD-L)n | scTFv | L | CD8-Hinge | CD8-TM | 4-1BB | CD3z | |
| 23 | SP | L | (AABD-L)n | scTFv | L | CD28-Hinge | CD28-TM | CD28 | CD3z | |
| 24 | SP | L | (AABD-L)n | scTFv | L | CD3ε-ECD | CD3e-TM | 4-1BB | CD3z | |

[0128] As used herein “beneficial results” may include, but are not limited to, lessening or alleviating the severity of the disease condition, preventing the disease condition from worsening, curing the disease condition, preventing the disease condition from developing, lowering the chances of a patient developing the disease condition and prolonging a patient’s life or life expectancy.

[0129] In another embodiment, an antibody molecule is a multispecific antibody molecule, e.g., it comprises a plurality of immunoglobulin variable domain sequences, wherein a first immunoglobulin variable domain sequence of the plurality has binding specificity for a first epitope and a second immunoglobulin variable domain sequence of the plurality has binding specificity for a second epitope. In another embodiment, a multispecific antibody molecule is a bispecific antibody molecule. A bispecific antibody has specificity for two antigens. A bispecific antibody molecule is characterized by a first immunoglobulin variable domain sequence which has binding specificity for a first epitope and a second immunoglobulin variable domain sequence that has binding specificity for a second epitope. A bispecific molecule may be a bispecific T cell engaging antibody in which first antigen binding domain binds to an antigen (e.g., CD3ε) expressed on T cells and the second antigen binding domain binds to an antigen expressed on a disease causing or disease associated cell (e.g., a cancer cell). The bispecific antibodies can be used for inducing T cell mediated cytotoxicity against cells expressing the target antigen recognized by their second antigen binding domain. The novel antigen binding domains described in this disclosure can be used to construct bispecific T cell engagers.

[0130] “Binds the same epitope as” means the ability of an antibody, scFv, or other antigen binding domain to bind to a target antigen and having the same epitope as an exemplified antibody, scFv, or other antigen binding domain. As an example, the epitopes of the exemplified antibody, scFv, or other binding agent and other antibodies can be determined using standard epitope mapping techniques. Epitope mapping techniques, well known in the art include Epitope Mapping Protocols in Methods in Molecular Biology, Vol. 66 (Glenn E. Morris, Ed., 1996) Humana Press, Totowa, New Jersey. For example, linear epitopes may be determined by, e.g., concurrently synthesizing large numbers of peptides on solid supports, the peptides corresponding to portions of the protein molecule, and reacting the peptides with antibodies while the peptides are still operably linked to the supports. Such techniques are known in the art and described in, e.g., U.S. Pat. No. 4,708,871; Geysen et al, (1984) Proc. Natl. Acad. Sci. USA 8:3998-4002; Geysen et al, (1985) Proc. Natl. Acad. Sci. USA 82:78-182; Geysen et al, (1986) Mol. lmmunol. 23: 709-715. The epitope bound by the antigen binding domain of a CAR can be also determined by the Epitope Binning assay. Epitope binning is a competitive immunoassay used to characterize and then sort a library of monoclonal antibodies against a target protein. Antibodies against a similar target are tested against all other antibodies in the library in a pairwise fashion to see if antibodies block one another’s binding to the epitope of an antigen. After each antibody has a profile created against all of the other antibodies in the library, a competitive blocking profile is created for each antibody relative to the others in the library. Closely related binning profiles indicate that the antibodies have the same or a closely related epitope and are “binned” together. Similarly, conformational epitopes are readily identified by determining spatial conformation of amino acids such as by, e.g., hydrogen/deuterium exchange, x-ray crystallography and two-dimensional nuclear magnetic resonance. See, e.g., Epitope Mapping Protocols, supra. Antigenic regions of proteins can also be identified using standard antigenicity and hydropathy plots, such as those calculated using, e.g., the Omiga version 1.0 software program available from the Oxford Molecular Group. This computer program employs the Hopp/Woods method, Hopp et al, (1981) Proc. Natl. Acad. Sci USA 78:3824-3828; for determining antigenicity profiles, and the Kyte-Doolittle technique, Kyte et al, (1982) J.Mol. Bioi. 157: 1 05-132; for hydropathy plots. To determine if selected monoclonal antibodies against a target (e.g., CD19) bind to unique epitopes, each antibody can be biotinylated using commercially available reagents (Pierce, Rockford, Ill.). Competition studies using unlabeled monoclonal antibodies and biotinylated monoclonal antibodies can be performed using CD19-extracellualr domain coated-ELISA plates. Biotinylated mAb binding can be detected with a strepavidin-alkaline phosphatase probe. Exemplary epitopes of human CD20 antigen bound by scFv, SARs, antibodies and other immunotherapeutics of the current disclosure are provided in SEQ ID NO: 15149-15154 of Patent Application PCT/US18/53247, which is incorporated in its entirety by reference herein. Exemplary epitopes of human BCMA bound by scFv, SARs, antibodies and other immunotherapeutics of the current disclosure are provided in SEQ ID NO: 15155-15159 of Patent Application PCT/US18/53247, which is incorporated in its entirety by reference herein. An exemplary epitope of human MPL antigen bound by scFv, SARs, and antibodies of the current disclosure is provided in SEQ ID NO: 15160 of Patent Application PCT/US18/53247, which is incorporated in its entirety by reference herein.

[0131] As used herein, the term “biological equivalent thereof” or “variant” or “functional variant” is intended to be synonymous with “equivalent thereof” when referring to a reference protein, antibody or fragment thereof, polypeptide or nucleic acid, intends those having minimal homology while still maintaining desired structure or functionality. Unless specifically recited herein, it is contemplated that any of the above also includes equivalents thereof. For example, an equivalent intends at least about 70% homology or identity, or at least 80% homology or identity and alternatively, or at least about 85%, or alternatively at least about 90%, or alternatively at least about 95%, or alternatively at least 98% percent homology or identity and exhibits substantially equivalent biological activity to the reference protein, polypeptide, antibody or fragment thereof or nucleic acid. Alternatively, when referring to polynucleotides, an equivalent thereof is a polynucleotide that hybridizes under stringent conditions to the reference polynucleotide or its complement. Alternatively, when referring to polypeptides or proteins, an equivalent thereof is an expressed polypeptide or protein from a polynucleotide that hybridizes under stringent conditions to the polynucleotide or its complement that encodes the reference polypeptide or protein.

[0132] As used herein, the term “Bispecific” refers to an agent (e.g., antibody, antibody fragment, SAR, CAR etc.) that can bind to two antigens.

[0133] As used herein, the term “Biparatopic” refers to an agent (e.g., antibody, antibody fragment, SAR, CAR etc.) that can bind to two epitopes of an antigen.

[0134] As used herein, the term “multispecific” refers to an agent (e.g., antibody, antibody fragment, SAR, CAR etc.) that can bind to more than two antigens.

[0135] As used herein, the term “CDR” or “complementarity determining region” is intended to mean the non-contiguous antigen combining sites found within the variable region of both heavy and light chain polypeptides. These particular regions have been described by Kabat et al., J. Bioi. Chem. 252:6609-6616 (1977); Kabat et al., U.S. Dept. of Health and Human Services, “Sequences of proteins of immunological interest” (1991); Chothia et al., J. Mol. Bioi. 196:901-917 (1987); and MacCallum et al., J. Mol. Bioi. 25 262:732-745 (1996), where the definitions include overlapping or subsets of amino acid residues when compared against each other. Nevertheless, application of either definition to refer to a CDR of an antibody or grafted antibodies or variants thereof is intended to be within the scope of the term as defined and used herein. As used herein, the different CDRs of an antibody could be also defined by a combination of the different definitions. For example, VHCDR1 could be defined based on Kabat and VHCDR2 could be defined based on Chothia. The amino acid residues which encompass the CDRs as defined by each of the above cited references are as follows:

CDR DEFINITIONS

| | Kabat | Chothia | MacCallum |
|---|---|---|---|
| VHCDR1 | 31-35 | 26-32 | 30-35 |
| VHCDR2 | 50-65 | 53-55 | 47-58 |
| VHCDR3 | 95-102 | 96-10 | 193-101 |
| VLCDR1 | 24-34 | 26-32 | 30-36 |
| VLCDR2 | 50-56 | 50-52 | 46-55 |
| VLCDR3 | 89-97 | 91-96 | 89-96 |

(Residue Numbers correspond to the identified reference).

[0136] The SEQ IDs of the CDRs of the different vL and vH segments that can make up antigen binding domains of scFv, CARs, AMR, antibodies and other immunotherapeutics of the current disclosure are provided in SEQ ID NO: 13204-14121 and SEQ ID NO: 14122-15039, respectively (Tables 6A, B) of PCT/US18/53247 and in Tables 5-6 in PCT/US2017/064379, which are incorporated herein by reference.

[0137] In some embodiments, reference to an antigen-binding module (such as a Fab-like or Fv-like antigen-binding module) that specifically binds to a target antigen means that the antigen-binding module binds to the target antigen with (a) an affinity that is at least about 10 (e.g., about 10, 20, 30, 40, 50, 75, 100, 200, 300, 400, 500, 750, 1000 or more) times its binding affinity for other molecules; or (b) a K_{d} no more than about ⅒ (e.g., ⅒, 1/20, 1/30, 1/40, 1/50, 1175, 1/100, 1/200, 1/300, 1/400, 1/500, 1/750, 1/1000 or less) times its K_{d} for binding to other molecules. Binding affinity can be determined by methods known in the art, such as ELISA, fluorescence activated cell sorting (FACS) analysis, Malibu-Glo assay, Topanga Assay, or radioimmunoprecipitation assay (RIA). K_{d} can be determined by methods known in the art, such as surface plasmon resonance (SPR) assay utilizing, for example, Biacore instruments, or kinetic exclusion assay (KinExA) utilizing, for example, Sapidyne instruments.

[0138] “Cancer” and “cancerous” refer to or describe the physiological condition in mammals that is typically characterized by unregulated cell growth. Examples of cancer include, but are not limited to B-cell lymphomas (Hodgkin’s lymphomas and/or non-Hodgkins lymphomas), T cell lymphomas, myeloma, myelodysplastic syndrome, myeloproliferative disorders (e.g., polycythemia vera, myelofibrosis, essential thrombocythemia etc.), skin cancer, brain tumor, breast cancer, colon cancer, rectal cancer, esophageal cancer, anal cancer, cancer of unknown primary site, endocrine cancer, testicular cancer, lung cancer, hepatocellular cancer, gastric cancer, pancreatic cancer, cervical cancer, ovarian cancer, liver cancer, bladder cancer, cancer of the urinary tract, cancer of reproductive organs thyroid cancer, renal cancer, carcinoma, melanoma, head and neck cancer, brain cancer (e.g., glioblastoma multiforme), prostate cancer, including but not limited to androgen-dependent prostate cancer and androgen-independent prostate cancer, and leukemia. Other cancer and cell proliferative disorders will be readily recognized in the art. The terms “tumor” and “cancer” are used interchangeably herein, e.g., both terms encompass solid and liquid, e.g., diffuse or circulating, tumors. As used herein, the term “cancer” or “tumor” includes premalignant, as well as malignant cancers and tumors. The term “cancer” is meant to include all types of cancerous growths or oncogenic processes, metastatic tissues or malignantly transformed cells, tissues, or organs, irrespective of histopathologic type or stage of invasiveness.

[0139] “Cell therapy” or “Cell-based therapy” or “Immune cell therapy” or Immune effector cell therapy” or “adoptive cell therapy” refers to a therapy that involves the use of cells for the prevention or treatment of a disease. Non-limiting examples of cell therapy include CAR-T cell therapy, NK- cell therapy, recombinant TCR-T cell therapy, TIL (tumor infiltrating lymphocytes). Biological agents, such as antibodies (e.g., Bispecific T cell engagers and DARTs etc.) which mediate their effect by binding to and/or activating immune cells (e.g, T cells and NK cells) are other examples of cell therapies. Stem cell and organ transplants, including autologous and allogeneic blood and marrow transplants, are also examples of cell therapies.

[0140] The term “Centyrins” as used here refers to small, engineered proteins derived from a human protein, Tenascin C, which can bind to an antigen of interest with high affinity and specificity. Centyrins have highly stable fibronectin type III (FN3) domain. Exemplary Centyrins are provided in Table 7.

[0141] “Chemotherapeutic agents” are compounds that are known to be of use in chemotherapy for cancer. Non-limiting examples of chemotherapeutic agents can include alkylating agents such as thiotepa and CYTOXAN® cyclosphosphamide; alkyl sulfonates such as busulfan, improsulfan and piposulfan; a camptothecin (including the synthetic analogue topotecan); bryostatin;nitrogen mustards such as chlorambucil, chlomaphazine, cholophosphamide, estramustine, ifosfamide, mechlorethamine, mechlorethamine oxide hydrochloride, melphalan, novembichin, phenesterine, prednimustine, trofosfamide, uracil mustard; nitrosureas such as carmustine, chlorozotocin, fotemustine, lomustine, nimustine, and ranimnustine; antibiotics such as the enediyne antibiotics (e.g., calicheamicin, especially calicheamicin gamma1I and calicheamicin omegaI1 (see, e.g., Agnew, Chem. Intl. Ed. Engl., 33: 183-186 (1994)); dynemicin, including dynemicin A; bisphosphonates, such as clodronate; an esperamicin; as well as neocarzinostatin chromophore and related chromoprotein enediyne antiobiotic chromophores), aclacinomysins, actinomycin, authramycin, azaserine, bleomycins, cactinomycin, carabicin, caminomycin, carzinophilin, chromomycinis, dactinomycin, daunorubicin, detorubicin, 6-diazo-5-oxo-L-norleucine, ADRIAMYCIN® doxorubicin (including morpholino-doxorubicin, cyanomorpholinodoxorubicin, 2-pyrrolino-doxorubicin and deoxydoxorubicin), epirubicin, esorubicin, idarubicin, marcellomycin, mitomycins such as mitomycin C, mycophenolic acid, nogalamycin, olivomycins, peplomycin, potfiromycin, puromycin, quelamycin, rodorubicin, streptonigrin, streptozocin, tubercidin, ubenimex, zinostatin, zorubicin; anti-metabolites such as methotrexate and 5-fluorouracil (5-FU); folic acid analogues such as denopterin, methotrexate, pteropterin, trimetrexate; purine analogs such as fludarabine, 6-mercaptopurine, thiamiprine, thioguanine; pyrimidine analogs such as ancitabine, azacitidine, 6-azauridine, carmofur, cytarabine, dideoxyuridine, doxifluridine, enocitabine, floxuridine; androgens such as calusterone, dromostanolone propionate, epitiostanol, mepitiostane, testolactone; anti-adrenals such as aminoglutethimide, mitotane, trilostane; folic acid replenisher such as frolinic acid; aceglatone; aldophosphamide glycoside; aminolevulinic acid; eniluracil; amsacrine; bestrabucil; bisantrene; edatraxate; defofamine; demecolcine; diaziquone; elformithine; elliptinium acetate; an epothilone; etoglucid; gallium nitrate; hydroxyurea; lentinan; lonidainine; maytansinoids such as maytansine and ansamitocins; mitoguazone; mitoxantrone; mopidanmol; nitraerine; pentostatin; phenamet; pirarubicin; losoxantrone; podophyllinic acid; 2-ethylhydrazide; procarbazine; PSK® polysaccharide complex (JHS Natural Products, Eugene, Oreg.); razoxane; rhizoxin; sizofuran; spirogermanium; tenuazonic acid; triaziquone; 2,2′,2″-trichlorotriethylamine; trichothecenes (especially T-2 toxin, verracurin A, roridin A and anguidine); urethan; vindesine; dacarbazine; mannomustine; mitobronitol; mitolactol; pipobroman; gacytosine; arabinoside (“Ara-C”); cyclophosphamide; thiotepa; taxoids, e.g., TAXOL® paclitaxel (Bristol-Myers Squibb Oncology, Princeton, N.J.), ABRAXANE® Cremophor-free, albumin-engineered nanoparticle formulation of paclitaxel (American Pharmaceutical Partners, Schaumberg, Ill.), and TAXOTERE® doxetaxel (Rhone-Poulenc Rorer, Antony, France); chloranbucil; GEMZAR® gemcitabine; 6-thioguanine; mercaptopurine; methotrexate; platinum analogs such as cisplatin, oxaliplatin and carboplatin; vinblastine; platinum; etoposide (VP-16); ifosfamide; mitoxantrone; vincristine; NAVELBINE; vinorelbine; novantrone; teniposide; edatrexate; daunomycin; aminopterin; xeloda; ibandronate; irinotecan (Camptosar, CPT-11); topoisomerase inhibitor RFS 2000; difluoromethylomithine (DMFO); retinoids such as retinoic acid; capecitabine; combretastatin; leucovorin (LV); oxaliplatin, lapatinib (Tykerb); inhibitors of PKC-alpha, Raf, H-Ras, EGFR (e.g., erlotinib (Tarceva®)) and VEGF-A that reduce cell proliferation and pharmaceutically acceptable salts, acids or derivatives of any of the above or combinations thereof.

[0142] “Chimeric antigen receptors” (CARs) are artificial (non-naturally occurring) immune cell (e.g., T cell) receptors contemplated for use as a therapy for cancer, using a technique called adoptive cell transfer. CARs are also known as artificial T-cell receptors, chimeric T-cell receptors or chimeric immunoreceptors. CARs are constructed specifically to stimulate T cell activation and proliferation in response to a specific antigen to which the CAR binds. Generally, a CAR refers to a set of polypeptides, typically two in the simplest embodiments, which when expressed in an immune effector cell, provides the cell with specificity for a target cell, typically a cancer cell, and with intracellular signal generation. In some embodiments, a CAR comprises at least an extracellular antigen binding domain, a transmembrane domain and a cytoplasmic signaling domain (also referred to herein as “an intracellular signaling domain”) comprising a functional signaling domain derived from a stimulatory molecule and/or costimulatory molecule. In some aspects, the set of polypeptides are contiguous with each other. In one aspect, the stimulatory molecule is the zeta chain associated with the T cell receptor complex. In one aspect, the cytoplasmic signaling domain further comprises one or more functional signaling domains derived from at least one costimulatory molecule as defined below. In one embodiment, the costimulatory molecule is chosen from the costimulatory molecules described herein, e.g., 4-1BB (i.e., CD137), CD27 and/or CD28. In one embodiment, the CAR comprises an optional leader sequence at the amino-terminus (N-ter) of the CAR fusion protein. In one embodiment, the CAR further comprises a leader sequence at the N-terminus of the extracellular antigen binding domain, wherein the leader sequence is optionally cleaved from the antigen binding domain (e.g., a scFv) during cellular processing and localization of the CAR to the cellular membrane. In various embodiments, CARs are recombinant polypeptides comprising an antigen-specific domain (ASD), a hinge region (HR), a transmembrane domain (TMD), an optional costimulatory domain (CSD) and an intracellular signaling domain (ISD). The optional costimulatory domain is generally absent in the 1^{st} generation CAR constructs. The nucleic acid sequences of several exemplary 2nd generation CARs comprising the different antigen binding domains (e.g., vL and vH fragments, vHH, ligands and receptors etc.) and incorporating the 41BB costimulatory domain are presented in SEQ ID NO: 1455-1703 (Table 8) of PCT/US2020/014237. The corresponding amino acid sequences are provided in SEQ ID NO: 7341-7589 of PCT/US2020/014237. In an embodiment, the disclosure provides bispecific, biparatopic and multispecific CARs.

[0143] The term SAR, as used herein, the comprises CARs and also encompasses newer approaches to conferring antigen specificity onto cells, such as Antibody-TCR chimeric molecules or Ab-TCR (WO 2017/070608 A1 incorporated herein by reference), TCR receptor fusion proteins or TFP (WO 2016/187349 A1 incorporated herein by reference), Synthetic Immune Receptors (SIRs) (see, WO 2018/102795 A1, incorporated herein by reference), Tri-functional T cell antigen coupler (Tri-TAC or TAC) (see, WO 2015/117229 A1, incorporated herein by reference) and zSIR (see, PCT/US2019/035096, incorporated herein by reference). The nucleic acid sequences of several exemplary TFPs comprising the different antigen binding domains (e.g., vL and vH fragments, vHH, ligands and receptors etc.) and based on CD3ε, CD3δ, CD3γ and CD3ζ chains and co-expressing the optional accessory module NEMO-K277A are presented in SEQ ID NO: 1900-2205, 2206-2511, 2512-2817, 2818-3123, respectively (Table 13) of PCT/US18/53247, which is incorporated in its entirety by reference herein. The order of the antigen binding domains contained in the construct of different CAR architectures and BiTE listed in Table 13 of PCT/US18/53247, which is incorporated in its entirety by reference herein is the same as the order of the constructs on the zCAR-K277A architecture presented in Table 12 of PCT/US18/53247, which is incorporated in its entirety by reference herein. Typically, the term “SAR-T cell” is used, to refer to T-cells that have been engineered to express a Synthetic antigen receptor. Thus, T lymphocytes bearing such SARs are generally referred to as SAR-T lymphocytes. If the SAR is a CAR, then the T cells are referred to as CAR-T cells. SARs can be also expressed in cells other than T cells, such as hematopoietic stem cells, induced pluripotent stem cells (iPSC), NK cells and macrophage. This disclosure provides bispecific, biparatopic and mutlispecific SARs with the backbone of CAR, SIR, zSIR, cTCR, Ab-TCR, AABD-TCR, TFP, and TCR etc. comprising one or more AABDs. The AABD domains of the SARs on any of the above backbones can be fully human, humanized or nonhuman. In an embodiment, the disclosure provides SARs on any of the above backbones comprising one or more fully human vH domains. In an embodiment, the disclosure provides SARs on any of the above backbones comprising one or more fully human vL domains.

[0144] “Codon optimization” or “controlling for species codon bias” refers to the preferred codon usage of a particular host cell. As will be understood by those of skill in the art, it can be advantageous to modify a coding sequence to enhance its expression in a particular host.

[0145] As used herein, “co-express” refers to expression of two or more polynucleotides or genes. Genes may be nucleic acids encoding, for example, a single protein or a chimeric protein as a single polypeptide chain. A SAR or a TCR described herein may be encoded by a single polynucleotide chain and expressed as single polypeptide chain, which is subsequently cleaved into different polypeptides, each representing a distinct functional unit. In some embodiments, where the SAR or a TCR consists of two or more functional polypeptide units, the different functional units are coexpressed using one or more polynucleotide chains. In one embodiment, costimulation is provided by an accessory module that is co-expressed with the SAR or a TCR but is not an integral part of the SAR or TCR polypeptide. In another embodiment, the different polynucleotide chains are linked by nucleic acid sequences that encode for cleavable linkers (e.g., T2A, F2A, P2A, E2A etc.) (Table 20). In another embodiment, a Ser-Gly-Ser-Gly (SGSG) motif (SEQ ID NO: 1239 and 11929) is also added upstream of the cleavable linker sequences to enhance the efficiency of cleavage. The polynucleotides encoding the different units of a SAR or a TCR may be linked by IRES (Internal Ribosomal Entry Site) sequences. Alternately, the different functional units of a SAR or TCR are encoded by two different polynucleotides that are not linked via a linker but are instead encoded by, for example, two different vectors. The nucleic acid and amino acid sequences of exemplary cleavable linkers and Furine cleavage sites are provided in Table 20.

[0146] A “conservative substitution” or “conservative sequence modifications” refers to amino acid modifications that do not significantly affect or alter the binding characteristics or function of the encoded protein. For example, “conservative sequence modifications” refers to amino acid modifications that do not significantly affect or alter the binding characteristics or function of a SAR construct of the disclosure (e.g., a conservative change in the constant chain, antibody, antibody fragment, or non-immunoglobulin binding domains). Such conservative modifications include amino acid substitutions, additions and deletions. Modifications can be introduced by standard techniques known in the art, such as site-directed mutagenesis and PCR-mediated mutagenesis. Conservative amino acid substitutions are ones in which the amino acid residue is replaced with an amino acid residue having a similar side chain. Families of amino acid residues having similar side chains have been defined in the art. These families include amino acids with basic side chains (e.g., lysine, arginine, histidine), acidic side chains (e.g., aspartic acid, glutamic acid), uncharged polar side chains (e.g., glycine, asparagine, glutamine, serine, threonine, tyrosine, cysteine, tryptophan), nonpolar side chains (e.g., alanine, valine, leucine, isoleucine, proline, phenylalanine, methionine), beta-branched side chains (e.g., threonine, valine, isoleucine) and aromatic side chains (e.g., tyrosine, phenylalanine, tryptophan, histidine). Thus, one or more amino acid residues within a SAR of the disclosure can be replaced with other amino acid residues from the same side chain family and the altered SAR can be tested using the binding and/or functional assays described herein.

[0147] The term “TCR constant chain” or “constant region of T cell receptor” is defined as the constant chain of TCRα/TCRa, TCRβ1/TCRb1, TCRβ2/TCRb2, TCRγ/TCRd, TCRδ/TCRd and pre-TCRα. Exemplary TCR constant chains are listed in Table 12. A TCR constant chain can be divided into several subdomains such as Ig like C1 domain (e.g., SEQ ID NO: 11848-11865; Table 13), connecting peptide (e.g., SEQ ID NO: 11867-11875; Table 14), transmembrane domain (SEQ ID NO: 11877-11880; Table 15), and cytosolic domain (e.g., SEQ ID NO: 11883-11885; Table 16). The cytosolic domains of TCRα, TCRβ1/β2, TCRγ and TCRδ chains are short and generally not believed to play any significant role in their signaling activities. The disclosure also provides deletion mutants and variants of the TCR chains listed in Table 12 as long as they retain one or more of the functional and biological properties of the TCR chains such as the ability to pair with the complementary TCR chain, the ability to assemble with the TCR/CD3 complex and the ability to transmit a T cell signal (e.g., activate NFAT pathway) when engaged by target antigen expressing cells.

[0148] The term “constant region of T cell receptor-alpha” or “constant chain of T cell receptor-alpha” or “TCRα” or “Cα” is defined as the protein provided as SEQ ID NO: 11735 or 11733 or the equivalent residues (i.e., a homolog or variant) from a non-human species, e.g., mouse, rodent, monkey, ape and the like. The term also covers any deletion or point mutant and variant of TCRα that retains the biological and functional properties of TCRα, such as such as the ability to pair with the complementary TCRβ chain, the ability to assemble with the TCR/CD3 complex and the ability to transmit a T cell signal (e.g., activate NFAT pathway) when engaged by target antigen expressing cells. The disclosure also provides certain mutations to TCRα polypeptides which can be used in the construction of SIRs and Ab-TCR (Tables 12). For example, sites of mutation in Cα that demonstrate increased expression and decreased mispairing are located at positions 91, 92, 93, and 94 of SEQ ID NO 11735. A TCR polypeptide with a Thr 48 Cys (T48C) mutation in Cα and a Ser-57-Cys (S57C) mutation in Cβ1 or Cβ2 chain (described more fully elsewhere herein) results in an additional disulfide bond between the two TCR constant chains (α and β). This, in turn, results in reduced mispairing with endogenous TCR chains in an immune cell and enhanced functionality. Similarly, a SIR with a Ser 61 Arg (S61R) mutation in Cα and an Arg 79 Gly (R79G) mutation in Cβ1 or Cβ2 chain (described more fully elsewhere herein) results in reduced mispairing with the endogenous TCR chains and enhanced functionality due to a “knob and hole” design for pairing. The disclosure provides Cα polypeptides having one or more or all of the mutations according to Table A-8 below and Table 12 which can be used in the construction of SIRs and Ab-TCR.

TABLE A-8

Mutations according to the disclosure in the human constant TCR-alpha region (Cα)

| Position (SEQ ID NO: 11735) | Amino acid in wild-type | Mutation | TYPE |
|---|---|---|---|
| 10 | Y | C | disulfide bond |
| 15 | S | C | disulfide bond |
| 45 | T | C | disulfide bond |
| 48 | T | C | disulfide bond |
| 61 | S | R | Knob into Hole |
| 91 | P | S | Murinization |
| 92 | E | D | Murinization |
| 93 | S | V | Murinization |
| 94 | S | P | Murinization |

[0149] The human genome encodes for two highly homologous TCR beta constant chains; TCR beta1 (TCRβ1 or TCRb1 or cβ1) and TCR beta 2 (TCRβ2 or TCRb2 or cβ2). The SARs (e.g., SIR, Ab-TCR or TFP) of the disclosure can comprise either of these two chains. Similarly, either TCR beta1 or TCR beta2 chains of other mammalian species can be used in the methods of the disclosure.

[0150] The term “constant chain of T cell receptor-beta 1” or “constant region of T cell receptor-beta 1” (TCR-beta1 or TCRβ1 or TCRb1 or hTCR-beta1 or Cβ1) is defined as a protein provided as SEQ ID NO: 11746 or the equivalent residues (i.e., a homolog) from a non-human species, e.g., mouse, rodent, monkey, ape and the like. The term also covers any deletion or point mutant and variant of TCRβ1 that retains the biological and functional properties of TCRβ1, such as such as the ability to pair with the complementary TCRα chain, the ability to assemble with the TCR/CD3 complex and the ability to transmit a T cell signal (e.g., activate NFAT pathway) when engaged by target antigen expressing cells. The disclosure also provides certain mutations to TCRβ1 polypeptides which can be used in the construction of SARs (e.g., SIRs and Ab-TCR) (Table 12). The disclosure also provides several deletion mutants of TCRβ1 that can be used in the construction of SARs (Table 12).

[0151] The term “constant chain of T cell receptor-beta 2” or “constant region of T cell receptor-beta 2” (TCR-beta2 or TCRβ2 or TCRb2 or Cβ2) is defined as the protein provided as SEQ ID NO: 11747 or the equivalent residues (i.e., a homolog) from a non-human species, e.g., mouse, rodent, monkey, ape and the like. The term also covers any deletion or point mutant and variant of TCRβ2 that retains the biological and functional properties of TCRβ2, such as such as the ability to pair with the complementary TCRα chain, the ability to assemble with the TCR/CD3 complex and the ability to transmit a T cell signal (e.g., activate NFAT pathway) when engaged by target antigen expressing cells. The disclosure also provides certain mutations to TCRβ2 polypeptides which can be used in the construction of SARs (e.g., SIRs and Ab-TCR) (Table 12). The disclosure also provides several deletion mutants of TCRβ2 that can be used in the construction of SARs (Table 12).

[0152] The protein sequences for both Cβ1 (SEQ ID NO: 11746) and Cβ2 (SEQ ID NO: 11747) are known (Table 6). Differences between the sequences of Cβ2 and Cβ1 are easily identified by alignment of the sequences using typical and ordinary skill in the art. In general, Cβ1 and Cβ2 chains are highly homologous. Therefore, unless specified otherwise, the term constant chain of TCRβ, TCR-beta or TCRb refers to constant chain of either TCRβ1 or TCRβ2. Similarly, unless specified otherwise, the term Cβ applies to either Cβ1 or Cβ2. The disclosure also provides certain mutations to TCRβ chains that can be used in the construction of SIRs and Ab-TCRs. For example, sites of mutation in Cβs that demonstrate increased expression and decreased mispairing with the endogenous TCRα chains are provided herein. These mutation sites in Cβ1 and Cβ2 are located at positions 18, 22, 57, 79 133, 136, and 139 of SEQ ID NOs: 11746 and 11747 and are summarized in the Tables A-9 and A10 below. The mutation sites in Cβ1 and Cβ2 are identical in their positions. The only difference between the two sequences is that a mutation at position 136. At this position, a glutamic acid (E) is present in Cβ2, whereas a valine is present in Cβ1.

TABLE A-9

Mutations according to the disclosure in the human constant TCR-beta region1 (Cβ1)

| Position (SEQ ID NO: 11746) | Amino acid in wild-type | Mutation | TYPE |
|---|---|---|---|
| 15 | E | C | disulfide bond |
| 17 | S | C | disulfide bond |
| 18 | E | K or R | Murinization |
| 22 | S | A | Murinization |
| 57 | S | C | disulfide bond |
| 59 | D | C | disulfide bond |
| 77 | S | C | disulfide bond |
| 79 | R | G | Knob into Hole |
| 133 | F | I | Murinization |
| 136 | V | A | Murinization |
| 139 | Q | H | Murinization |

TABLE A-10

Mutations according to the disclosure in the human constant TCR-beta region2 (Cβ2)

| Position (SEQ ID NO: 11747) | Amino acid in wild-type | Mutation | TYPE |
|---|---|---|---|
| 15 | E | C | disulfide bond |
| 17 | S | C | disulfide bond |
| 18 | E | K or R | Murinization |
| 22 | S | A | Murinization |
| 57 | S | C | disulfide bond |
| 59 | D | C | disulfide bond |
| 77 | S | C | disulfide bond |
| 79 | R | G | Knob into Hole |
| 133 | F | I | Murinization |
| 136 | E | A | Murinization |
| 139 | Q | H | Murinization |

[0153] The term “constant chain of TCR-gamma” or “constant region of TCR-gamma” (TCR-gamma or TCRγ or TCRg or TCR-gamma1 or TCRγ1 or TCRg1 or Cy) is defined as the protein provided as SEQ ID NO: 11771 or the equivalent residues (i.e., a homolog) from a non-human species, e.g., mouse, rodent, monkey, ape and the like. The term also covers any deletion or point mutant and variant of TCRγ that retains the biological and functional properties of TCRγ, such as such as the ability to pair with the complementary TCR (e.g., TCRδ) chain, the ability to assemble with the TCR/CD3 complex and the ability to transmit a T cell signal (e.g., activate NFAT pathway) when engaged by target antigen expressing cells. The disclosure also provides certain mutations to TCRγ polypeptides which can be used in the construction of SARs (e.g., SIRs and Ab-TCR) (Table 12). The disclosure also provides several deletion mutants of TCRβ that can be used in the construction of SARs (Table 12).

[0154] The term “constant chain of TCR-delta” or “constant region of TCR-delta” (TCR-delta or TCRδ or TCRd or Cδ) is defined as the proteins provided as SEQ ID NO: 5982 or the equivalent residues (i.e., a homolog) from a non-human species, e.g., mouse, rodent, monkey, ape and the like. The term also covers any deletion or point mutant and variant of TCRδ that retains the biological and functional properties of TCRδ, such as such as the ability to pair with the complementary TCR (e.g., TCRγ) chain, the ability to assemble with the TCR/CD3 complex and the ability to transmit a T cell signal (e.g., activate NFAT pathway) when engaged by target antigen expressing cells. The disclosure also provides certain mutations to TCRδ polypeptides which can be used in the construction of SARs (e.g., SIRs and Ab-TCR) (Table 12). The disclosure also provides several deletion mutants of TCRβ that can be used in the construction of SARs (Table 12).

[0155] The term “constant chain of pretc.R-α” or “constant region of pretc.R” (pretc.Rα or pretc.R-α or preCα) is defined as the protein provided as SEQ ID NO: 11769 or the equivalent residues (i.e., a homolog) from a non-human species, e.g., mouse, rodent, monkey, ape and the like. The term also covers any deletion or point mutant and variant of pretc. Rα that retains the biological and functional properties of pretc. Rα, such as such as the ability to pair with the complementary TCR (e.g., TCRβ) chain, the ability to assemble with the TCR/CD3 complex and the ability to transmit a T cell signal (e.g., activate NFAT pathway) when engaged by target antigen expressing cells. The disclosure also provides certain mutations to pretc.Rα polypeptides which can be used in the construction of SARs (e.g., SIRs and Ab-TCR) (Table 12). The disclosure also provides several deletion mutants of pretc. Rα that can be used in the construction of SARs (Table 12).

[0156] It will be recognized that proteins can have identity or homology to one another and retain similar or identical functions. The disclosure includes TCR constant regions that have 70%, 80%, 85%, 90%, 95%, 97%, 98%, 98.5%, 99% or 99.9% identity to any of the sequences described herein while retaining the biological activity.

[0157] Accordingly, the disclosure provides SARs (e.g., SIR, cTCR, zSIR, Ab-TCR, TFP and the like) having a T-cell receptor constant chain having a sequence selected from the group consisting of: (a) an amino acid sequence that is at least 70% identical to any of the SEQ ID NO: 11733-11742, 11744, 11745, 11793-11803 and which can optionally have one or more mutations at positions 61, 91, 92, 93, 94, 120, 127 and/or 129; (b) an amino acid sequence that is at least 75% identical to any of the SEQ ID NO:11746- 11766, 11804-11817 and which can optionally have one or more mutations at positions 18, 22, 57, 79, 133, 136 and/or 139; c) an amino acid sequence that is at least 70% identical to any of the SEQ ID NO: 11818-11823; (d) an amino acid sequence that is at least 70% identical to any of the SEQ ID NO:11824-11830; and (e) an amino acid sequence that is at least 70% identical to any of the SEQ ID NO: 11769-11770; and The T-cell receptor constant chains of any of (a)-(d) retain at least one biological activity of the wild-type T-cell receptor constant chain to which it has identity or homology.

[0158] In one embodiment, the disclosure provides a modified TCR is selected from the group consisting of a wild-type TCR, a high affinity TCR, and a chimeric TCR. In another embodiment, the modified TCR comprises at least one extra disulfide bond. In yet another embodiment, the modified TCR comprises a TCR alpha chain and TCR beta chain.

[0159] The term “constitutively active” refers to a molecule, e.g., a protein that has signaling activity without the need of a stimulus. Exemplary constitutive active proteins are NEMO-K277A and vFLIP K13 as they can activate NF-κB signaling when expressed in a suitable cell without the need of an additional stimulus.

[0160] The term a “costimulatory molecule” or a “costimulatory receptor” refers to a cognate binding partner on a T cell that specifically binds with a costimulatory ligand, thereby mediating a costimulatory response by the T cell, such as, but not limited to, proliferation. Costimulatory extracellular molecules are cell surface molecules other than antigen receptors or their ligands that contribute to an efficient immune response. Costimulatory molecules include, but are not limited to, an MHC class I molecule, BTLA and a Toll ligand receptor, as well as OX40, CD28, 2B4 and 4-1BB (CD137). A co-stimulatory receptor may be expressed on cells other T cells, such as NK cells or macrophages.

[0161] A “costimulatory intracellular signaling domain” or “costimulatory domain” (CSD) can be the intracellular portion of a costimulatory receptor. A costimulatory molecule can be represented in the following protein families: TNF receptor proteins, Immunoglobulinlike proteins, cytokine receptors, integrins, signaling lymphocytic activation molecules (SLAM proteins), and activating NK cell receptors. Examples of such molecules include CD27, CD28, 4-1BB (CD137), OX40, GITR, CD30, 2B4, CD40, ICOS and the like. The intracellular signaling domain can comprise the entire intracellular portion, or the entire native intracellular signaling domain, of the molecule from which it is derived, or a functional fragment or derivative thereof. The SARs of the disclosure may comprise one or more costimulatory domains.

[0162] The term “cTCR” refers to a wild-type TCR nucleic acid coding sequence and the corresponding wild-type TCR protein linked to an antigen binding domain that is not derived from a TCR. The TCR chains of a cTCR are not codon optimized and lack mutations that can enhance their expression or reduce pairing with endogenous TCR chains. In exemplary embodiment, the antigen binding domaino of a cTCR may comprise of a vL, vH or scFv fragments. cTCR have been described in (Gross, Waks & Eshhar, Proc. Natl. Acad. Sci. USA, 1989). cTCRs are used in some embodiments and as reference controls. For example, a cTCR having a CD 19 binding domain and a CD 19-SIR (comprising a mutant TCR chain or codon optimized TCR chain and CD19 binding domain) will have different expression and/or difference binding affinities to the target antigen. This disclosure provides bispecific, biparatopic and mutlispecific SARs with the backbone of a cTCR comprising one or more AABDs. The AABD domains of the SARs of the disclosure with the backbone of a cTCR can be fully human, humanized or non-human. In an embodiment, the disclosure provides a cTCR comprising one or more fully human vH domains. In an embodiment, the disclosure provides a cTCR comprising one or more fully human vL domains.

[0163] The term “cytosolic” or “cytoplasmic” refers to an agent, e.g., a protein that is situated in the cytoplasm of a cell in its mature form. A cytosolic protein can translocate into the nucleus but is not a transmembrane protein and is not secreted outside the cell. An exemplary cytosolic protein is MC159 and K13.

[0164] Cytokine Release Syndrome (CRS) is a complication of cell therapies (e.g., SAR-T, bispecific T cell engaging antibodies etc.) that manifests itself with a constellation of signs and symptoms such as fever, hypotension, shortness of breath, renal dysfunction, pulmonary dysfunction and/or capillary leak syndrome.

[0165] DARPIN or DARPins (Designed ankyrin repeat proteins) are genetically engineered antibody mimetic proteins typically exhibiting highly specific and high-affinity target protein binding. An exemplary DARPINs are presented in Table 7.

[0166] The term “degenerative disorders” refers to a disease that is the result of a continuous process based on degenerative cell changes, affecting tissues or organs, which will increasingly deteriorate over time, whether due to normal bodily wear or lifestyle choices such as exercise or eating habits. Exemplary degenerative diseases include Alzheimer’s disease, Creutzfeldt-Jakob disease, Diabetes mellitus (type II), and Atherosclerosis.

[0167] “Derived from” as that term is used herein, indicates a relationship between a first and a second molecule. It generally refers to structural similarity between the first molecule and a second molecule and does not connotate or include a process or source limitation on a first molecule that is derived from a second molecule. For example, in the case of an antigen binding domain that is derived from an antibody molecule, the antigen binding domain retains sufficient antibody structure such that is has the required function, namely, the ability to bind to an antigen. It does not connotate or include a limitation to a particular process of producing the antibody, e.g., it does not mean that, to provide the antigen binding domain, one must start with an antibody sequence and delete unwanted sequence, or impose mutations, to arrive at the antigen binding domain.

[0168] “Dimerization molecule,” as that term is used herein refers to a molecule that promotes the association of a first switch domain with a second switch domain.

[0169] The phrase “disease associated with expression of a target antigen” or “disease associated antigen as described herein” includes, but is not limited to, a disease associated with expression of a target antigen as described herein or condition associated with cells which express a target antigen as described herein including, e.g., proliferative diseases such as a cancer or malignancy or a precancerous condition such as a myelodysplasia, a myelodysplastic syndrome or myeloproliferative disorder or a pre leukemia; or a noncancer related indication associated with cells which express a target antigen as described herein. In one aspect, a cancer associated with expression of a tumor antigen as described herein is a hematological cancer. In one aspect, a cancer associated with expression of a tumor antigen as described herein is a solid cancer. Further diseases associated with expression of a tumor antigen described herein include, but are not limited to, atypical and/or non-classical cancers, malignancies, precancerous conditions or proliferative diseases associated with expression of a tumor antigen as described herein. Non-cancer related indications associated with expression of a target antigen as described herein include, but are not limited to, e.g., autoimmune disease, (e.g., lupus), inflammatory disorders (allergy and asthma) and transplantation. In some embodiments, the target antigen-expressing cells express, or at any time expressed, mRNA encoding the target antigen. In another embodiment, the target antigen -expressing cells produce the target antigen protein (e.g., wild-type or mutant), and the target antigen protein may be present at normal levels or reduced levels. In another embodiment, the target antigen -expressing cells produced detectable levels of a target antigen protein at one point, and subsequently produced substantially no detectable target antigen protein.

[0170] “Disease targeted by genetically modified cells” as used herein encompasses the targeting of any cell involved in any manner in any disease by the genetically modified cells of the disclosure, irrespective of whether the genetically modified cells target diseased cells or healthy cells to effectuate a therapeutically beneficial result. The genetically modified cells include, but are not limited to, genetically modified T-cells, NK cells, hematopoietic stem cells, pluripotent embryonic stem cells, induced pluripotent stem cells (iPSC) or embryonic stem cells. The genetically modified cells express the conventional SARs and novel backbones containing conventional SARs with accessory modules of the disclosure, which SARs may target any of the antigens expressed on the surface of target cells. Examples of antigens which may be targeted include, but are not limited to, antigens expressed on B-cells; antigens expressed on Carcinomas, sarcomas, lymphomas, leukemia, germ cell tumors, and blastomas; antigens expressed on various immune cells; and antigens expressed on cells associated with various hematologic diseases, autoimmune diseases, and/or inflammatory diseases. Other antigens that may be targeted will be apparent to those of skill in the art and may be targeted by the SARs of the disclosure in connection with alternate embodiments thereof.

[0171] The term “Dissociation constant (Kd)” is defined as the equilibrium constant of the dissociation of a receptor-ligand (e.g., binding domain - cognate) interaction.

[0172] As used herein a “diverse set of non-naturally occurring immune receptors” or “diverse set of SARs” or “diverse set of SARs” refers to a plurality of non-naturally occurring immune receptors having the same or different binding domains linked to a diverse set of signaling chains or “backbones” wherein each construct comprising a binding domain and a different signaling chain or “backbone” provide a diverse range of binding to a target antigen and/or varied expression levels. For example, depending upon the mutation composition of the constant domain (e.g., mutant TCRa+TCRb), the binding affinity of the binding domain to its target varies. In some embodiments, a bispecific and/or multispecific SAR with the backbone of a SIR, Ab-TCR or TFP of the disclosure comprises a binding affinity that is lower than a 2^{nd} generation CAR but greater than a wild-type TCR (e.g., cTCR) with the same binding domain(s).

[0173] As used herein, an “epitope” is defined to be the portion of an antigen capable of eliciting an immune response, or the portion of an antigen that binds to an antibody or antibody fragment. Epitopes can be a protein sequence or subsequence.

[0174] The term “expression vector” refers to a vector comprising a recombinant polynucleotide comprising expression control sequences operatively linked to a nucleotide sequence to be expressed. Expression vectors include all those known in the art, including cosmids, plasmids (e.g., naked or contained in liposomes) and viruses (e.g., lentiviruses, retroviruses, adenoviruses, and adena-associated viruses) that incorporate the recombinant polynucleotide.

[0175] As used in the art, “Fc receptor” and “FcR” describe a receptor that binds to the Fc region of an antibody. In some embodiments, the FcR is a native sequence human FcR.

[0176] The term “functional portion” when used in reference to a SAR refers to any part or fragment of the SAR, which part or fragment retains the biological activity of the SAR of which it is a part (the parent SAR). Functional portions encompass, for example, those parts of a SAR that retain the ability to recognize target cells, or detect, treat, or prevent a disease, to a similar extent, the same extent, or to a higher extent, as the parent SAR. In reference to the parent SAR, the functional portion can comprise, for instance, about 10%, 25%, 30%, 50%, 68%, 80%, 90%, 95%, or more, of the parent SAR.

[0177] “Genetically modified cells”, “redirected cells”, “genetically engineered cells” or “modified cells” as used herein refer to cells that express a SAR of the disclosure. In some embodiments, the genetically modified cells comprise vectors that encode a SAR. In some embodiments, the genetically modified cells comprise vectors that encode a SAR and one or more accessory molecules (e.g., PDL1, PDL2, crmA, MC159 etc.).

[0178] “Hinge region” (HR) as used herein refers to the hydrophilic region which is between the antigen binding domain and the transmembrane domain of a SAR. The hinge regions include but are not limited to Fc fragments of antibodies or fragments or derivatives thereof, hinge regions of antibodies or fragments or derivatives thereof, CH2 regions of antibodies, CH3 regions of antibodies, artificial spacer sequences or combinations thereof. Examples of hinge regions include but are not limited to CD8a hinge, and artificial spacers made of polypeptides which may be as small as, for example, Gly3 or CH1 and CH3 domains of IgGs (such as human IgG4). Exemplary HR are provided in Table 17 (SEQ ID NO: 1198-1204).

[0179] “Immune cell” as used herein refers to the cells of the mammalian immune system including but not limited to antigen presenting cells, B-cells, basophils, cytotoxic T-cells, dendritic cells, eosinophils, granulocytes, helper T-cells, leukocytes, lymphocytes, macrophages, mast cells, memory cells, monocytes, natural killer cells, neutrophils, phagocytes, plasma cells and T-cells.

[0180] The term “immune disorder” refers to a disease characterized by dysfunction of immune system. An autoimmune disease is a condition arising from an abnormal immune response to a normal body part. There are at least 80 types of autoimmune diseases.

[0181] “Immune effector cell,” as that term is used herein, refers to a cell that is involved in an immune response, e.g., in the promotion of an immune effector response. Examples of immune effector cells include T cells, e.g., alpha/beta T cells and gamma/delta T cells, B cells, natural killer (NK) cells, natural killer T (NKT) cells, mast cells, and myeloicderived phagocytes.

[0182] “Immune effector function” or “immune effector response,” “effector function” refers to the specialized function of a differentiated cell. Effector function of a T-cell, for example, may be cytolytic activity or helper activity including the secretion of cytokines. For example, an immune effector function or response refers a property of a T or NK cell that promotes killing or the inhibition of growth or proliferation, of a target cell. In the case of a T cell, primary stimulation and co-stimulation are examples of immune effector function or response. In case of antigen presenting cells (e.g., dendritic cells) antigen presentation and cytokine secretion are examples of effector functions.

[0183] “Immune response” as used herein refers to immunities including but not limited to innate immunity, humoral immunity, cellular immunity, immunity, inflammatory response, acquired (adaptive) immunity, autoimmunity and/or overactive immunity.

[0184] An “intracellular signaling domain,” (ISD) or “cytoplasmic domain” or “primary intracellular signaling domain” or “activation domain” as the term is used herein, refers to an intracellular signaling portion of a molecule. The intracellular signaling domain generates a signal that promotes an immune effector function of the cell. Examples of immune effector function include cytolytic activity and helper activity, including the secretion of cytokines. A primary intracellular signaling domain can comprise a signaling motif which is known as an immunoreceptor tyrosine-based activation motif or ITAM. Examples of ITAM containing primary cytoplasmic signaling sequences include, but are not limited to, those derived from CD3 zeta, common FcR gamma (FCER1G), Fc gamma RIIa, FcR beta (Fc Epsilon R1b), CD3 gamma, CD3 delta, CD3 epsilon, CD79a, CD79b, DAP10, and DAP12.

[0185] The term “isolated” as used herein refers to molecules or biologicals or cellular materials being substantially free from other materials. In one aspect, the term “isolated” refers to nucleic acid, such as DNA or RNA, or protein or polypeptide (e.g., an antibody or derivative thereof), or cell or cellular organelle, or tissue or organ, separated from other DNAs or RNAs, or proteins or polypeptides, or cells or cellular organelles, or tissues or organs, respectively, that are present in the natural source. The term “isolated” also refers to a nucleic acid or peptide that is substantially free of cellular material, viral material, or culture medium when produced by recombinant DNA techniques, or chemical precursors or other chemicals when chemically synthesized. Moreover, an “isolated nucleic acid” is meant to include nucleic acid fragments which are not naturally occurring as fragments and would not be found in the natural state. The term “isolated” is also used herein to refer to polypeptides which are isolated from other cellular proteins and is meant to encompass both purified and recombinant polypeptides. The term “isolated” is also used herein to refer to cells or tissues that are isolated from other cells or tissues and is meant to encompass both, cultured and engineered cells or tissues.

[0186] As used herein, the term “linker” (also “linker domain” or “linker region”) refers to an oligo or a polypeptide (or an oligo encoding the polypeptide) that joins together two or more domains or regions of a SAR polynucleotide or polypeptide, respectively, disclosed herein. The linker can be anywhere from 1 to 500 amino acids in length or 3 to 1500 nucleotide in length. In an embodiment, the linker is 1 or more amino acids (e.g., 1, 2, 3, 4, 5, 6, 7, 8, 9, 10, 15, 20, 25, 30, 35, 40, 45, 50, 55, 60, 65, 70, 75, 80, 85, 90, 95, 100, 105, 110, 115, 120, 125, 130, 135, 140, 145, 150, 160, 170, 180, 190, 200, 210, 220, 230, 250, 275, 300, 325, 350, 375, 400, 450, 500 amino acids and any number in between) in length. In an embodiment, the linker is between 1 and 100, between 1 and 125, between 1 and 150, between 1 and 200, between 1 and 250, between 1 and 300, between 1 and 350, between 1 and 400, between 1 and 450, between 3 and 500 amino acids in length. In an embodiment, the SARs of the disclosure may comprise one or more than one linker (e.g., 2, 3, 4 or more).

[0187] A “long linker” or “long linker domain” is a linker that is between 25 to 500 amino acid in length. In an embodiment, a long linker is about 25, 30, 35, 40, 45, 50, 55, 60, 65, 70, 75, 80, 85, 90, 95, 100, 105, 110, 115, 120, 125, 130, 135, 140, 145, 150, 160, 170, 180, 190, 200, 210, 220, 230, 250, 275, 300, 325, 350, 375, 400, 450, 500 amino acids and any number in between in length. In an embodiment, a long linker is between 25 and 125 amino acids in length. In an embodiment, a long linker is between 50 and 150 amino acids in length. In an embodiment, a long linker is between 75 and 175 amino acids in length. In an embodiment, along linke is between 100 and 200 amino acids in length. In an embodiment, a long linker is between 120 and 220 amino acids in length. In an embodiment, a long linker is between 100 and 300 amino acids in length.

[0188] In an embodiment, the linker encodes for or comprises of an immunoglobulin (Ig) domain or an Ig like domain or a fragment thereof. The terms “Ig domain”, “Ig linker domain”, “Ig like domains” or “Ig like linker domains” are used interchangeably in this disclosure. The immunoglobulin domain is a type of protein domain that consists of a 2-layer sandwich of 7-9 antiparallel β-strands arranged in two β-sheets with a Greek key topology, consisting of about 125 amino acids. The Ig domains can be classified as IgV, IgC1 IgC2, or Igl. IgV domains with 9 beta strands are generally longer than IgC domains with 7 beta strands. In an embodiment, the linker comprises an IgV domain or a fragment thereof. In an embodiment, the linker comprises an IgC domain or a fragment thereof. Ig domains are found in immunoglobulins, T cell receptor chains, class I MHC, class II MHC, β2 microglobulin, coreceptors (e.g., CD4, CD8, CD19 etc.), antigen receptor accessory molecules (e.g., CD3γ, CD3δ, CD3ε, CD79a, CD79b), costimulatory or inhibitory molecules (e.g., CD28, CD80, CD86), NK cell receptors (e.g., KIR), Leukocyte immunologlobulin like receptor (LILR), IgSF CAMs (e.g., NCAM, ICAM, CD2 etc.), cytokine receptors (e.g., IL-1R, CSF-IR etc.). growth factor receptors (e.g., PDGFR), Receptor tyrosine kinases and phosphatases, Ig binding receptors, cytoskeleton proteins (e.g., titin, palladin etc.) and other proteins (e.g., CD147, CD90 etc.). Exemplary Ig linker domains are IgCL (SEQ ID NO: 1142) and IgG1-CH1 (SEQ ID NO: 1143). Additional exemplary Ig linkers are presented in Table 13 (SEQ ID NO (PRT): 11832-11865). In an embodiment, the linker possesses an E set domain. An E set domain is an “Early” Ig-like fold families possibly related to the immunoglobulin and/or fibronectin type III superfamilies. In an embodiment, the linker possesses a Fibronectin type III domain.

[0189] The linker can be a flexible linker. The term “flexible polypeptide linker” as used herein refers to a peptide linker that consists of or consists mostly of amino acids such as glycine and/or serine residues used alone or in combination, to link polypeptide chains together (e.g., variable heavy and variable light chain regions together). In one embodiment, the flexible polypeptide linker is a Gly/Ser linker and comprises the amino acid sequence (Gly-Gly-Gly-Ser)ₙ, (e.g., SEQ ID NO:11715) where n is a positive integer equal to or greater than 1. For example, n=1, n=2, n=3. n=4, n=5 and n=6, n=7, n=8, n=9 and n=10. In one embodiment, the flexible polypeptide linkers include, but are not limited to, (Gly₄Ser)₄ or (Gly₄Ser)₃.

[0190] In some embodiments the “linker” is cleavable or non-cleavable. Unless specified otherwise, the term “linker” used herein means a non-cleavable linker. Said non-cleavable linkers may be composed of flexible residues which allow freedom of motion of adjacent protein doamins relative to one another. Non-limiting examples of such residues include glycine and serine. In some embodiments, linkers include non-flexible residues. Examples of cleavable linkers include 2A linkers (for example T2A), 2A-like linkers or functional equivalents thereof and combinations thereof. In some embodiments, the linkers include the picornaviral 2A-like linker, CHYSEL sequences of porcine teschovirus (P2A), Thosea asigna virus (T2A) or combinations, variants and functional equivalents thereof. In some embodiments, the linker sequences may comprise a motif that results in cleavage between the 2A glycine and the 2B proline (see, e.g., T2A sequence). The nucleic sequences of several exemplary cleavable linkers are provided in SEQ ID NO: 1233 to SEQ ID NO: 1238 and amino acid sequences of several exemplary linkers are provided in SEQ ID NO: 11923 to SEQ ID NO: 11928. Other cleavable linkers that may be used herein are readily appreciated by those of skill in the art.

[0191] In an embodiment, a Ser-Gly-Ser-Gly (SGSG) motif (SEQ ID NOs: 11929) is also added upstream of the cleavable linker sequences to enhance the efficiency of cleavage. A potential drawback of the cleavable linkers is the possibility that the small 2A tag left at the end of the N-terminal protein may affect protein function or contribute to the antigenicity of the proteins. To overcome this limitation, in some embodiments, a furine cleavage site (RAKR) (SEQ ID NO: 11931) is added upstream of the SGSG motifs to facilitate cleavage of the residual 2A peptide following translation.

[0192] A linker may be a protease cleavable linker. Exemplary protease cleavable linkers are presented in Table 19.

[0193] The term “lentivirus” refers to a genus of the Retroviridae family. Lentiviruses are unique among the retroviruses in being able to infect non-dividing cells; they can deliver a significant amount of genetic information into the DNA of the host cell, so they are one of the most efficient methods of a gene delivery vector. HIV, SIV, and FIV are all examples of lenti viruses.

[0194] The term “lentiviral vector” refers to a vector derived from at least a portion of a lentivirus genome, including especially a self-inactivating lentiviral vector as provided in Milone et al., Mol. Ther. 17(8): 1453-1464 (2009). Other examples of lentivirus vectors that may be used in the clinic include but are not limited to, e.g., the LENTIVECTOR® gene delivery technology from Oxford BioMedica, the LENTIMAX™ vector system from Lentigen and the like. Nonclinical types of lentiviral vectors are also available and would be known to one skilled in the art. Other examples of lentivirus vectors are pLENTI-EFlα (SEQ ID NO: 1), pLENTI-EF1α-DWPRE (SEQ ID NO: 2), pCCLc-MNDU3-WPRE (SEQ ID NO: 4) and pCCLc-MNDU3-Eco-Nhe-Sal-WPRE (SEQ ID NO: 5). In an exemplary embodiment, the nucleic acid fragment encoding a SAR, or SAR plus accessory module(s), or the accessory module(s) can be cloned between the Nhe I and Sal I sites present in the pLENTI-EF1α and the pCCLc-MNDU3-Eco-Nhe-Sal-WPRE vectors using methods known in the art.

[0195] “Mammal” as used herein refers to any member of the class Mammalia, including, without limitation, humans and nonhuman primates such as chimpanzees and other apes and monkey species; farm animals such as cattle, sheep, pigs, goats and horses; domestic mammals such as dogs and cats; laboratory animals including rodents such as mice, rats and guinea pigs, and the like.

[0196] “Native” or “Naturally occurring” or “endogenous” as used herein refers to a gene, protein, nucleic acid (e.g., DNA, RNA etc.) or fragment thereof that is native to a cell or is naturally expressed in a cell. Thus, a native or endogenous TCRα chain polypeptide of a T cell consists of a variable domain (Vα) joined to a TCRα constant chain. The native or endogenous TCRα chain precursor polypeptide also consists of an amino-terminal signal peptide that is cleaved from the mature polypeptide.

[0197] The term “NIK agonist” as used herein refers to an agent that activates the activity of NF-κB inducing kinase. In an embodiment, a NIK agonist is a SMAC mimetic.

[0198] The term “SMAC mimetic” as used herein refers to an agent that mimics the actaivity of SMAC/DIABLO protein.

[0199] The term “near the N-terminus” as used herein means within the N-terminal 30 amino acids. For example, the term “an AABD operably linked to the N-terminus or near the N-terminus of a vL and/or vH domain”, mean an AABD that is operably linked at the N-terminus of a vL or a vH fragment or operably linked to the N-terminal 2, 3, 4, 5, 6, 7, 8, 9, 10, 11, 12, 13, 14, 15, 16, 17, 18, 19, 25 or 30 amino acid comprising the vL or the vH domain. Similarly, the term “an AABD operably linked to the N-terminus or near the N-terminus of a Va and/or Vb domain”, mean an AABD that is operably linked at the N-terminus of a Va or a Vb fragment or operably linked to the N-terminal 2, 3, 4, 5, 6, 7, 8, 9, 10, 11, 12, 13, 14, 15, 16, 17, 18, 19, 20, 21, 22, 23, 24, 25 or 30 amino acid comprising the Va or the Vb domain. An AABD of the disclosure may be operably linked to or near the N-terminus of another domain either directly or via an intervening linker sequence.

[0200] As used herein a “non-naturally occurring agent” or “non-native” or “exogenous” refers to an agent that is not naturally expressed in a cell. Stated another way, the non-naturally occurring agent is “engineered” to be expressed in a cell. A non-naturally occurring agent may be a cloned version of a naturally occurring agent. Exemplary non-naturally occurring agents include SARs (e.g., CAR, SIRs, Ab-TCRs, TFPs, recombinant TCR, NEMO-K277A, vFLIP-K13 and K13-opt). A non-naturally occurring agent may be expressed into a cell using techniques of gene transfer known in the art, such as lentiviral or retroviral mediated gene transfer. A non-naturally occurring agent may be expressed in an immune cell using an exogenous promoter (e.g., EF1α promoter) or an endogenous promoter (e.g., TCRα promoter).

[0201] As used herein a “non-naturally occurring immune receptor” or “exogenous immune receptor” refers to an immune receptor that is not naturally expressed in an immune cell. Stated another way, the non-naturally occurring immune receptor is “engineered” to be expressed in an immune cell. A non-naturally occurring immune receptor may be a cloned version of a naturally occurring immune receptor. Alternatively, a non-naturally occurring immune receptor may be a chimeric receptor that is produced using recombinant molecular biology techniques. Exemplary non-naturally occurring immune receptors include SARs, SIR, Ab-TCRs, TFPs and recombinant TCR. A non-naturally occurring immune receptor may be introduced into an immune cell using techniques of gene transfer known in the art, such as lentiviral or retroviral mediated gene transfer. A non-naturally occurring immune receptor may be expressed in an immune cell using an exogenous promoter (e.g., EF1α promoter) or an endogenous promoter (e.g., TCRα promoter).

[0202] As used herein a “non-scFv antigen binding domain” or “non-scFv based antigen binding domain” refers to an antigen binding domain that is not comprised of a single chain variable fragment (i.e., vL-linker-vH or vH-linker-vL). Exemplary non-scFv based antigen binding domains include but are not limied to vHH, FHVH, SVL, non-immunoglobulin antigen binding scaffolds (e.g., DARPIN, Centyrin, affibodies etc.) ligand-binding domain of a receptor, receptor binding domain of a ligand, adaptor binding domains (e.g., RZIP, EZIP, E4, K4, D domains, NKG2D-YA, NKG2D-AF, CD16A-V158, CD32 or CD64 etc.) and auto-antigens. AABD are non-scFv based antigen binding domains.

[0203] As used herein a “non-naturally occurring TCR antigen binding domain” or “exogenous TCR antigen binding domain” refers to a binding domain operably linked to a TCR constant region that is chimeric and non-naturally occurring with respect to a TCR present in nature. Stated another way, the non-naturally occurring TCR antigen binding domain is “engineered” using recombinant molecular biology techniques to be operably linked to a TCR and moreover, that the antigen binding domain is obtain or derived from a molecule that is distinct from a TCR found in nature. An antigen binding domain that is distinct from a TCR in nature includes antibody vH and vL fragments, humanized antibody fragments, chimeric antibody fragments, receptor ligands, and the like.

[0204] The term “NKT cells” as used here refers to a subset of T cells that coexpress an aβ T-cell receptor, but also express a variety of molecular markers that are typically associated with NK cells, such as NK1.1. The best-known NKT cells differ from conventional aβ T cells in that their T-cell receptors are far more limited in diversity (‘invariant’ or ‘type 1’ NKT). They and other CD1d-restricted T cells (‘type 2’ NKT) recognize lipids and glycolipids presented by CD1d molecules, a member of the CD1 family of antigen-presenting molecules, rather than peptide-major histocompatibility complexes (MHCs).

[0205] The term “operably linked” or “functionally linked” or “operably joined” or “operably attached” refers to functional linkage or association between a first component and a second component such that each component can be functional. For example, operably linked includes the association between a regulatory sequence and a heterologous nucleic acid sequence resulting in expression of the latter. For example, a first nucleic acid sequence is operably linked with a second nucleic acid sequence when the first nucleic acid sequence is placed in a functional relationship with the second nucleic acid sequence. In the context of two different modules of a molecule, the first module is operably linked to the second module when their nucleotide sequences are joined in frame. In the context of two polypeptides that are operably linked a first polypeptide functions in the manner it would independent of any linkage and the second polypeptide functions as it would absent a linkage between the two. The terms “operably linked” or “operably attached” are used interchangeably with the terms “linked”, “attached” or “joined”.

[0206] “Percent identity” in the context of two or more nucleic acids or polypeptide sequences, refers to two or more sequences that are the same. Two sequences are “substantially identical” if two sequences have a specified percentage of amino acid residues or nucleotides that are the same (e.g., 60% identity, optionally 70%, 71%. 72%. 73%, 74%, 75%, 76%, 77%, 78%, 79%, 80%,81%, 82%, 83%, 84%, 85%, 86%, 87%, 88%, 89%, 90%, 91%, 92%, 93%, 94%, 95%, 96%, 97%, 98%, 99% identity over a specified region, or, when not specified, over the entire sequence), when compared and aligned for maximum correspondence over a comparison window, or designated region as measured using one of the following sequence comparison algorithms or by manual alignment and visual inspection. Optionally, the identity exists over a region that is at least about 50 nucleotides (or 10 amino acids) in length, or more typically over a region that is 100 to 500 or 1000 or more nucleotides (or 20, 50, 200 or more amino acids) in length.

[0207] For sequence comparison, generally one sequence acts as a reference sequence, to which test sequences are compared. Two examples of algorithms that can be used for determining percent sequence identity and sequence similarity are the BLAST and BLAST 2.0 algorithms, which are described in Altschul et al., (1977) Nuc. Acids Res. 25:3389-3402; and Altschul et al., (1990) J. Mol. Bioi. 215:403-410, respectively. Software for performing BLAST analyses is publicly available through the National Center for Biotechnology Information.

[0208] The term “retrovirus vector” refers to a vector derived from at least a portion of a retrovirus genome. Examples of retrovirus vector include MSCVneo, MSCV-pac (or MSCV-puro), MSCV-hygro as available from Addgene or Clontech.

[0209] The term “Sleeping Beauty Transposon” or “Sleeping Beauty Transposon Vector” refers to a vector derived from at least a portion of a Sleeping Beauty Transposon genome.

[0210] The term “single chain variable region” or “scFv” refers to a fusion protein comprising at least one antibody fragment comprising a variable region of a light chain and at least one antibody fragment comprising a variable region of a heavy chain, wherein the light and heavy chain variable regions are contiguously linked, e.g., via a synthetic linker, e.g., a short flexible polypeptide linker, and capable of being expressed as a single chain polypeptide, and wherein the scFv retains the specificity of the intact antibody from which it is derived. Unless specified, as used herein an scFv may have the vL and vH variable regions in either order, e.g., with respect to the N-terminal and C-terminal ends of the polypeptide, the scFv may comprise vL-linker-vH or may comprise vH-linker-vL. In this disclosure, a scFv is also described as vL-Gly-Ser-Linker-vH. Alternatively, a scFv is also described as (vL+vH) or (vH+vL).

[0211] The term “signaling domain” refers to the functional region of a protein which transmits information within the cell to regulate cellular activity via defined signaling pathways by generating second messengers or functioning as effectors by responding to such messengers.

[0212] The term “Synthetic Antigen Receptor” or “SAR” refers to a non-natural polypeptide, which when expressed in an effector cell, provides the cell with specificity for a target cell, typically a cancer cell. SARs are engineered receptors that graft an antigen specificity onto cells (e.g., T cells, NK cells, NKT cells, monocytes/macrophages, B lymphocytes or combination thereof) thus combining the antigen binding properties of the antigen binding domain with the effector function of the cells. Exemplary effector functions for T and NK cells may include target-cell lysis, cytokine production and self renewal. For monocytes/macrophages, effector function may include phagocytosis of the target cell. SAR, as the term is defined herein, covers first generation CARs, 2^{nd} generation CARs, 3^{rd} generation CARs, and next generation CARs, such as Synthetic immune receptors (SIR), cTCR, Ab-TCR, AABD-TCR, TFP (e.g., TFPε, TFPγ, TFPδ), TAC, recombinant TCR and the like. A SAR can be single chain, double chain or one and half chain. A SAR can be unispecific, bispecific or multispecific. A SAR may have one or more antigen binding domains. A SAR may have the backbone of a CAR (e.g., a 2^{nd} generation CAR), SIR, cTCR, Ab-TCR, AABD-TCR, TFP, TAC or a TCR. SARs, as referred to herein, encompass artificial T cell receptors, chimeric T cell receptors or chimeric immunoreceptors. However, the term SAR is not limited to a T cell receptor or to an immunoreceptor. A SAR may or may not have a signaling domain of its own. An exemplary SAR that lacks a signaling domain of its own is a SAR with the backbone of an SIR or a TCR, which transmit a signal via recruitment of other signaling proteins that possess a signaling domain. A SAR can be any non-natural antigen binding receptor (ABR). The term “antigen binding domain or “antigen-specific targeting domain” as used herein refers to the region of the SAR which targets and binds to specific antigens. The antigen binding domain of a SAR may comprise of an antibody or antibody fragment (e.g., vL, vH, Fv, Fab, scFv, vHH, single domain antibody etc.), a T cell receptor (TCR) or a fragment of a TCR (e.g., Va, Vb, Vg, Vd or a single variable domain TCR etc.). The antigen binding domain(s) of a SAR may comprise of one or more autonomous antigen binding domains (AABD) such as a non-immunologlobulin antigen binding scaffold (e.g., DARPIN, Centyrin, affibody, D domain etc.), a receptor binding domain of a ligand, the ligand binding domain of a receptor, an autoantigen, an adaptor binding domain (e.g., RZIP, EZIP, E4, K4, NKG2D-AF etc.), an Fc binding domain of a receptor (e.g., Fc binding region of CD16A-V158, CD32, CD64 etc.), or combination thereof. A SAR may have one or more than one antigen binding domains. The different modules and domains of a SAR may be connected by one or more linkers. The SAR may also comprise one or more epitope tags or mimotopes, which may be used to detect the expression of the SAR, to isolate and purify SAR expressing cells, to monitor persistence of SAR-expressing cells and to deplete SAR-expressing cells. In an embodiment, the epitope and/or mimotops are targeted by an antibody, an antibody fragment, an antibody derivative (e.g., antibody drug conjugate) to serve as a “suicide switch” to diminish or eliminate SAR-expressing cells in case of toxicity. When a SAR is expressed in a host cell, this domain forms the extracellular domain (ectodomain).

[0213] The term SVH domain as used herein refers to a single human V_{H} domain antibody (V_{H} sdAb). These terms are thus used interchangeably. The term SVH is also used interchangeably with independent vH domains. A SVH is an example of an autonomous antigen binding domain (AABD). An exemplary SVH is a fully human vH domain (FHVH) presented in SEQ ID NO (DNA): 827-828 and SEQ ID NO (PRT): 11517-11518. Another exemplary SVH is a chVH domain presented in SEQ ID NO (DNA): 830-831 and SEQ ID NO (PRT): 11520-11521. Another exemplary SVH is an aVH domain presented in SEQ ID NO (DNA): 850-851 and SEQ ID NO (PRT): 11540-11541. The SEQ ID numbers of other exemplary SVH domains are presented in Table 5. Additional SVH domains that can be used in the construction of the SARs of the disclosure are provided in WO2016062988, WO2016113556, WO2017191476, WO2018039180, WO2019006072, WO2018237037, WO2018119215, WO2019126756, WO2019055689 and WO2020018922, which are incorporated in their entirety by reference herein.

[0214] The term SVL domain as used herein refers to a single human vL domain antibody (vL sdAb). These terms are thus used interchangeably. The term SVL is also used interchangeably with independent vL domains. A SVL is an example of an autonomous antigen binding domain (AABD).

[0215] As used herein, “single variable domain T cell receptor” or “svd-TCR” refer to the variable domain of a T cell receptor capable of specifically binding to an epitope in the absence of a second TCR variable domain. For example, an svd-TCR comprising a Vb variable domain is capable of binding to an epitope independent of and/or in the absence of a Va variable domain, and an svd-TCR comprising a Va variable domain is capable of binding to an epitope independent of and/or in the absence of a nb variable domain. Illustrative epitopes recognized by svd-TCRs include peptide:MHC complexes (pMHC complexes).

[0216] The term “Synthetic Immune Receptor” or alternatively a “SIR” refers to a set of polypeptides, typically two in some embodiments, which when expressed in an effector cell, provides the cell with specificity for a target cell, typically a cancer cell, and with intracellular signal generation. SIRs represent next generation CAR platforms that are described in WO 2018/102795 A1 which is incorporated herein by reference. In a typical embodiment, a SIR comprises one or more antigen binding domains (e.g., antibody or antibody fragment, a ligand or a receptor) that bind to antigens as described herein, and are joined to one or more T cell receptor constant chains or regions via an optional linker. In some embodiments, the set of polypeptides are contiguous with each other. In some embodiments, a SIR comprises two or more sets of two or more polypeptides. The polypeptides of each set of SIR are contiguous with each other (functional polypeptide unit 1) but are not contiguous with the polypeptides of the other set (functional polypeptide unit 2). In some embodiments, the T cell receptor constant chains (or regions) of the SIR is chosen from the constant chain of human T cell receptor-alpha (TCR-alpha or TCRα or TCRa or hTCR-alpha or hTCRα or hTCRa or Cα), human T cell receptor-betal(TCR-betal or TCRβ1 or TCRb1 or hTCR-betal or hTCRβ1 or hTCRb1 or Cβ1), human T cell receptor-beta 2 (TCR-beta2 or TCRβ2 or TCRb2 or hTCR-beta2 or hTCRβ2 or hTCRb2 or Cβ2 also designated TCR-beta, TCRβ or TCRb or Cβ), human Pre-T cell receptor alpha ((pretc.R-alpha or pretc.Rα or pretc.Ra or preCα), human T cell receptor-gamma (TCR-gamma or TCRγ or TCRg or or hTCR-gamma or hTCRγ or hTCRg or hTCRγl or hTCRgammal, or Cy), or human T cell receptor-delta (TCR-delta or TCRd or TCRδ or hTCR-delta or hTCRd or hTCRδ or Cδ). In some embodiments, the TCR constant chains of SIR are encoded by their wild-type nucleotide sequences while in other aspects the TCR constant chains of SIR are encoded by the nucleotide sequences that are not wild-type. In some embodiments, the TCR constant chains of SIR are encoded by their codon optimized sequences. In some embodiments, the TCR constant chains of SIR encode for the wild-type polypeptide sequences while in other embodiments the TCR constant chains of SIR encoded for polypeptides that carry one or more mutations. In some embodiments, the TCR constant chains of SIR are encoded by their codon optimized sequences that carry one or more mutations. The disclosure also covers deletion mutants of TCR constant chains that retain at least one of the biological and functional properties of the corresponding full-length TCR chain. A SIR that comprises an antigen binding domain (e.g., a scFv, or vHH) that targets a specific tumor maker “X”, such as those described herein, is also referred to as X-SIR or XSIR. For example, a SIR that comprises an antigen binding domain that targets CD19 is referred to as CD19-SIR or CD19SIR. The TCR constant chain/domain of a SIR can be derived from the same species in which the SIR will ultimately be used. For example, for use in humans, it may be beneficial for the TCR constant chain of the SIR to be derived from or comprised of human TCR constant chains. However, in some instances, it is beneficial for the TCR constant chain to be derived from the same species in which the SIR will ultimately be used in, but modified to carry amino acid substitutions that enhance the expression of the TCR constant chains. For example, for use in humans, it may be beneficial for the TCR constant chain of the SIR to be derived from or comprised of human TCR constant chains but in which certain amino acids are replaced by the corresponding amino acids from the murine TCR constant chains. Such murinized TCR constant chains provide increased expression of the SIR. The SIR or functional portion thereof, can include additional amino acids at the amino or carboxy terminus, or at both termini, which additional amino acids are not found in the amino acid sequence of the TCR or antigen binding domain which make up the SIR. Desirably, the additional amino acids do not interfere with the biological function of the SIR or functional portion, e.g., recognize target cells, detect cancer, treat or prevent cancer, etc. More desirably, the additional amino acids enhance the biological activity, as compared to the biological activity of the parent SIR. This disclosure provides bispecific, biparatopic and mutlispecific SARs with the backbone of SIR comprising one or more AABDs. The AABD domains of the SARs of the disclosure with the backbone of SIR can be fully human, humanized or non-human. In an embodiment, the disclosure provides SIR comprising one or more fully human vH domains. In an embodiment, the disclosure provides Ab-TCR comprising one or more fully human vL domains.

[0217] The term “stimulation,” refers to a primary response induced by binding of a stimulatory molecule (e.g., a TCR/CD3 complex) with its cognate ligand (or target antigen) thereby mediating a signal transduction event, such as, but not limited to, signal transduction via the TCR/CD3. Stimulation can mediate altered expression of certain molecules.

[0218] The term “stimulatory molecule,” refers to a molecule expressed by an immune cell (e.g., T cell, NK cell, B cell) that provides the cytoplasmic signaling sequence(s) that regulate activation of the immune cell in a stimulatory way for at least some aspect of the immune cell signaling pathway.

[0219] The term “subject” is intended to include living organisms in which an immune response can be elicited (e.g., any domesticated mammals or a human). The terms “subject” or “individual” or “animal” or “patient” are used interchangeably herein to refer to any subject, particularly a mammalian subject, for whom administration of a composition or pharmaceutical composition of the disclosure is desired. Mammalian subjects include humans, non-human primates, dogs, cats, guinea pigs, rabbits, rats, mice, horses, cattle, cows, and the like, with humans being preferred.

[0220] “Switch domain,” or a “dimerization domain” as used herein, typically refers to a polypeptide-based entity that, in the presence of a dimerization molecule, associates with another switch domain. The association results in a functional coupling of a first entity linked to, e.g., fused to, a first switch domain, and a second entity linked to, e.g., fused to, a second switch domain. A first and second switch domain are collectively referred to as a dimerization switch.

[0221] The term “target antigen” refers to an antigen that is bound by an antigen binding agent (e.g., an antibody, antibody fragment, SAR-T cell, SAR adaptor etc.). The term “target antigen expressing cell” refers to a cell, i.e., a target cell that expresses an antigen bound by an antigen binding agent. In an embodiment, a cell expressing a SAR of the disclosure undergoes activation, proliferation and induces effector functions (e.g., cytokine production, cytotoxicity etc.) when it binds its target antigen expressing cell either directly or indirectly via a SAR adaptor. Non-limiting examples of target antigens are listed in Table B. A SAR of the disclosure may bind one or more (e.g., 2, 3, 4, 5 or more) target antigens listed in Table B either directly or via SAR adaptors described herein.

TABLE B

Exemplary Antigens Targeted by Antibodies, antibody fragments (e.g., scFv), AABD (e.g., FHVH, vHH, DARPIN, Centryin, D domains, Adaptors etc.) and SARS of the disclosure
CD5; CD19; CD123; CD22; CD30; CD171; CS1 (also referred to as CD2 subset 1, CRACC, SLAMF7, CD319, and 19A24); C-type lectin-like molecule-1 (CLL-1 or CLECL1); CD33; epidermal growth factor receptor variant III (EGFRviii); ganglioside G2 (GD2); ganglioside GD3 (aNeu5Ac(2-8)aNeu5Ac(2-3)bDGalp(1-4 )bDGlcp(1-1)Cer); TNF receptor family member B cell maturation (BCMA); Tn antigen ((Tn Ag) or (GalNAcα-Ser/Thr)); prostate-specific membrane antigen (PSMA); Receptor tyrosine kinase-like orphan receptor 1 (ROR1); Fms Like Tyrosine Kinase 3 (FLT3); Tumor-associated glycoprotein 72 (TAG72); CD38; CD44v6; a glycosylated CD43 epitope expressed on acute leukemia or lymphoma but not on hematopoietic progenitors, a glycosylated CD43 epitope expressed on non-hematopoietic cancers, Carcinoembryonic antigen (CEA); Epithelial cell adhesion molecule (EPCAM); B7H3 (CD276); KIT (CD117); Interleukin-13 receptor subunit alpha-2 (IL-13Ra2 or CD213A2); Mesothelin; Interleukin 11 receptor alpha (IL-11Ra); prostate stem cell antigen (PSCA); Protease Serine 21 (Testisin or PRSS21); vascular endothelial growth factor receptor 2 (VEGFR2); Lewis(Y) antigen; CD24; Platelet-derived growth factor receptor beta (PDGFR-beta); Stage-specific embryonic antigen-4 (SSEA-4); CD20; Folate receptor alpha (FRa or FR1); Folate receptor beta (FRb); Receptor tyrosine-protein kinase ERBB2 (Her2/neu); Mucin 1, cell surface associated (MUC1); epidermal growth factor receptor (EGFR); neural cell adhesion molecule (NCAM); Prostase; prostatic acid phosphatase (PAP); elongation factor 2 mutated (ELF2M); Ephrin B2; fibroblast activation protein alpha (FAP); insulin-like growth factor 1 receptor (IGF-I receptor), carbonic anhydrase IX (CA1X); Proteasome (Prosome, Macropain) Subunit, Beta Type, 9 (LMP2); glycoprotein 100 (gp100); oncogene fusion protein consisting of breakpoint cluster region (BCR) and Abelson murine leukemia viral oncogene homolog 1 (Abl) (bcr-abl); tyrosinase; ephrin type-A receptor 2 (EphA2); sialyl Lewis adhesion molecule (sLe); ganglioside GM3 (aNeuSAc(2-3)bDClalp(1- 4)bDGlcp(1-1)Cer); transglutaminase 5 (TGS5); high molecular weight-melanoma associated antigen (HMWMAA); o-acetyl-GD2 ganglioside (OAcGD2); tumor endothelial marker 1 (TEM1/CD248); tumor endothelial marker 7-related (TEM7R); claudin 6 (CLDN6); thyroid stimulating hormone receptor (TSHR); G protein coupled receptor class C group 5, member D (GPRC5D); chromosome X open reading frame 61 (CXORF61); CD97; CD179a; anaplastic lymphoma kinase (ALK); Polysialic acid; placenta-specific 1 (PLAC1); hexasaccharide portion of globoH glycoceramide (GloboH); mammary gland differentiation antigen (NY-BR-1); uroplakin 2 (UPK2); Hepatitis A virus cellular receptor 1 (HAVCR1); adrenoceptor beta 3 (ADRB3); pannexin 3 (PANX3); G protein-coupled receptor 20 (GPR20); lymphocyte antigen 6 complex, locus K 9 (LY6K); Olfactory receptor 51E2 (OR51E2); TCR Gamma Alternate Reading Frame Protein (TARP); Wilms tumor protein (WT1); Cancer/testis antigen 1 (NY-ESO-1); Cancer/testis antigen 2 (LAGE-1a); Melanoma-associated antigen 1 (MAGE-A1); ETS translocation-variant gene 6, located on chromosome 12p (ETV6-AML); sperm protein 17 (SPA17); X Antigen Family, Member 1A (XAGE1); angiopoietin-binding cell surface receptor 2 (Tie 2); melanoma cancer testis antigen-1 (MAD-CT-1); melanoma cancer testis antigen-2 (MAD-CT-2); Fos-related antigen 1; tumor protein p53 (p53); p53 mutant; prostein; survivin; telomerase; prostate carcinoma tumor antigen-1 (PCT A-1 or Galectin 8), melanoma antigen recognized by T cells 1 (MelanA or MARTI); Rat sarcoma (Ras) mutant; human Telomerase reverse transcriptase (hTERT); sarcoma translocation breakpoints; melanoma inhibitor of apoptosis (ML-IAP); ERG (transmembrane protease, serine 2 (TMPRSS2) ETS fusion gene); N-Acetyl glucosaminyl-transferase V (NA17); paired box protein Pax-3 (PAX3); Androgen receptor; Cyclin B1; v-myc avian myelocytomatosis viral oncogene neuroblastoma derived homolog (MYCN); Ras Homolog Family Member C (RhoC); Tyrosinase-related protein 2 (TRP-2); Cytochrome P450 1B 1(CYP1B 1); CCCTC-Binding Factor (Zinc Finger Protein)-Like (BORIS or Brother of the Regulator of lmprinted Sites), Squamous Cell Carcinoma Antigen Recognized By T Cells 3 (SART3); Paired box protein Pax-5 (PAX5); proacrosin binding protein sp32 (OY-TES1); lymphocyte-specific protein tyrosine kinase (LCK); A kinase anchor protein 4 (AKAP-4); synovial sarcoma, X breakpoint 2(SSX2); Receptor for Advanced Glycation Endproducts (RAGE-1); renal ubiquitous 1 (RU1); renalubiquitous 2 (RU2); legumain; human papilloma virus E6 (HPV E6); human papilloma virus E7 (HPV E7); intestinal carboxyl esterase; heat shock protein 70-2 mutated (mut hsp70-2); CD79a; CD79b; CD72; Leukocyte-associated immunoglobulin-like receptor 1 (LAIR1); Fc fragment of IgA receptor (FCAR or CD89); Leukocyte immunoglobulin-like receptor subfamily A member 2 (LILRA2); CD300 molecule-like family member f (CD300LF); C-type lectin domain family 12 member A (CLEC12A); bone marrow stromal cell antigen 2 (BST2); EGF-like module-containing mucin-like hormone receptor-like 2 (EMR2); lymphocyte antigen 75 (LY75); Glypican-3 (GPC3); Fc receptor-like 5 (FCRL5); and immunoglobulin lambda-like polypeptide 1 (IGLL1), MPL, Biotin, c-MYC epitope Tag, CD34, LAMP1 TROP2, GFRalpha4, CDH17, CDH6, NYBR1, CDH19, CD200R, Slea (CA19.9; Sialyl Lewis Antigen); Fucosyl-GM1, PTK7, gpNMB, CDH1-CD324, DLL3, CD276/B7H3, IL11Ra, IL13Ra2, CD179b-IGL11, TCRgamma-delta, NKG2D, CD32 (FCGR2A), Tn ag, Tim1-/HVCR1, CSF2RA (GM-CSFR-alpha), TGFbetaR2, Lews Ag, TCR-betal chain, TCR-beta2 chain, TCR-gamma chain, TCR-delta chain, FITC, Leutenizing hormone receptor (LHR), Follicle stimulating hormone receptor (FSHR), Gonadotropin Hormone receptor (CGHR or GR), CCR4, GD3, SLAMF6, SLAMF4, HIV1 envelope glycoprotein, HTLV1-Tax, CMV pp65, EBV-EBNA3c, KSHV K8.1, KSHV-gH, influenza A hemagglutinin (HA), GAD, PDL1, Guanylyl cyclase C (GCC), auto antibody to desmoglein 3 (Dsg3), auto antibody to desmoglein 1 (Dsg1), HLA, HLA-A, HLA-A2, HLA-B, HLA-C, HLA-DP, HLA-DM, HLA-DOA, HLA-DOB, HLA-DQ, HLA-DR, HLA-G, IgE, CD99, Ras G12V, Tissue Factor 1 (TF1), AFP, GPRC5D, Claudin18.2 (CLD18A2 or CLDN18A.2), P-glycoprotein, STEAP1, Liv1, Nectin-4, Cripto, gpA33, BST1/CD157, low conductance chloride channel (LCCC), TAJ/TROY, MPL (TPO-R), KIR3DL2, CD32b, CD229, Toso and BAFF-R.

[0222] The terms “T-cell” and “T-lymphocyte” are interchangeable and used synonymously herein. Examples include but are not limited to naive T cells (“lymphocyte progenitors”), central memory T cells, effector memory T cells, stem memory T cells (T_{scm}), iPSC-derived T cells, synthetic T cells or combinations thereof.

[0223] The term “T/NK cell activating antibody therapy” as used herein refers to an antibody therapy that activates the T and/or NK cells. Examples of T/NK cell activating antibody therapy include bispecific T cell engaging antibody (e.g., Blinatumomab) or bispecific NK cell engaging antibody.

[0224] TCRs are described using the International Immunogenetics (IMGT) TCR nomenclature, and links to the IMGT public database of TCR sequences. Native alpha-beta heterodimeric TCRs have an alpha chain (TCRα or TCRa) and a beta chain (TCRβ or TCRb). Gamma-delta heterodimeric TCRs have a gamma (TCRg) and TCR-delta (TCRd) chain. Broadly, each chain comprises variable, joining and constant regions, and the beta chain also usually contains a short diversity region between the variable and joining regions, but this diversity region is often considered as part of the joining region. Each variable region comprises three CDRs (Complementarity Determining Regions) embedded in a framework sequence, one being the hypervariable region named CDR3. There are several types of alpha chain variable (Vα or Va) regions and several types of beta chain variable (Vβ or Vb) regions distinguished by their framework, CDR1 and CDR2 sequences, and by a partly defined CDR3 sequence. The Vα/Va types are referred to in IMGT nomenclature by a unique TRAV number. Thus “TRAV21” defines a TCR Vα/Va region having unique framework and CDR1 and CDR2 sequences, and a CDR3 sequence which is partly defined by an amino acid sequence which is preserved from TCR to TCR but which also includes an amino acid sequence which varies from TCR to TCR. In the same way, “TRBV5-1” defines a TCR Vβ/Vb region having unique framework and CDR1 and CDR2 sequences, but with only a partly defined CDR3 sequence. The variable regions of TCRγ (TCRg) and TCRδ (TCRd) are referred to as Vg and Vd, respectively. The variable regions of a TCR (e.g., Vα, Vβ, Vy, Vδ) may bind to an antigen in an MHC (or HLA) dependent manner. The variable regions of a TCR (e.g., Vα, Vβ, Vy, Vδ) may bind to an antigen in an MHC (or HLA) independent manner. In an exemplary embodiment, variable regions of a TCR (e.g., Vα, Vβ, Vγ, Vδ) may bind to extracellular antigens (e.g., CD19, CD20, CD22, Mesothelin etc.) in an MHC (or HLA)-independent manner. Such TCRs are designated HLA-independent TCR. In an embodiment, the SARs of the present disclosure may comprise of HLA-dependent and/or HLA-independent TCR variable regions. In another exemplary embodiment, SARs of the disclosure may comprise of one variable region of TCR and one variable region of an antibody. Thus, a double chain SAR may comprise of a Va fragment attached to TCRα constant chain and vH (or vL) fragment attached to TCRβ constant chain. An AABD may be attached to one or both the chains.

[0225] The α and β chains of αβ TCRs are generally regarded as each having two “domains”, namely variable and constant domains. The variable domain consists of a concatenation of variable region and joining region. In the present specification and claims, the term “TCR alpha variable domain or Va or Vα” therefore refers to the concatenation of TRAV and TRAJ regions, and the term TCR alpha constant domain (Cα) refers to the extracellular TRAC region, or to a C-terminal truncated TRAC sequence. Likewise, the term “TCR beta variable domain or Vβ or Vb” refers to the concatenation of TRBV and TRBD/TRBJ regions, and the term TCR beta constant domain (Cβ) refers to the extracellular TRBC region, or to a C-terminal truncated TRBC sequence.

[0226] TCRs of the disclosure may be non-naturally occurring and/or purified and/or engineered. TCRs of the disclosure may have more than one mutation present in the alpha chain variable domain and/or the beta chain variable domain relative to the parental TCR. “Engineered TCR” and “mutant TCR” are used synonymously herein and generally mean a TCR which has one or more mutations introduced relative to the parental TCR, in particular in the Va and/or Vb or Vg and/or Vd domain thereof. An engineered TCR may bind to an antigen in an HLA-dependent or HLA-independent manner.

[0227] An “HLA-independent TCR” or an “MHC-independent TCR” as defined herein is a TCR that can recognize an antigen independent of MHC restriction. In an exemplary embodiment, an HLA-independent TCR may bind to an antigen on the cell surface that is not presented by the MHC complex. In an embodiment, an HLA-independent TCR may bind to an antigen that is expressed on the cell surface independent of presentation by the MHC complex. An HLA-indendent TCR may be a naturally occurring TCR. In an exemplary embodiment, an HLA-independent TCR is MC.7.G5 (MC7G5) that recognizes MR1, a ubiquitously expressed, monomorphic antigen presenting molecule. An HLA-independent TCR may be an engineered or recombinant TCR. In an exemplary embodiment, an HLA-indepenent TCR is an engineered TCR that may bind to proteins that are expressed on cell surface such as CD19, CD20, Mesothelin, PSMS or BCMA. Methods to engineer the variable domains of a TCR (e.g., CDR grafting etc.) are known in the art and can be used to generate HLA-independent TCR that can bind to proteins (e.g., CD19, MSLN, PSMA etc.) or protein epitopes expressed extracellularly independent of the MHC complex. This disclosure provides bispecific, biparatopic and mutlispecific SARs with the backbone of a TCR, including HLA-independent TCR, comprising one or more AABDs. The AABD domains of the SARs of the disclosure with the backbone of a TCR (e.g., HLA independent TCR) can be fully human, humanized or non-human. In an embodiment, the disclosure provides TCR (e.g., HLA independent TCR) comprising one or more fully human vH domains. In an embodiment, the disclosure provides TCR (e.g., HLA independent TCR) comprising one or more fully human vL domains.

[0228] An ““HLA-independent TCR variable domain” as defined herein is the variable domain of a TCR that can bind to an antigen in an HLA-independent manner. An HLA independent variable domain may be the variable domain of an HLA independent TCRα, TCRβ, TCRγ, TCRδ or pre-TCRα. An HLA independent TCR variable domain may be a single variable domain TCR (i.e., svd-TCR). An HLA independent TCR variable domain may be a naturally occurring HLA-independent variable domain or an engineered HLA-independent variable domain. In an exemplary embodiment, an engineered HLA-independent variable domain can be generated against the extracellular domain of a protein (e.g., CD19, CD22, BCMA, MSLN, PSMA) using techniques known in the art (e.g., CDR grafting, screening phage display libraries etc.).

[0229] The term “T cell receptor module,” or “TCRM,” refers to a heterodimer comprising sequences derived from a T cell receptor. The TCRM comprises T cell receptor transmembrane domains and may further comprise all or a portion of T cell receptor connecting peptides and/or intracellular domains.

[0230] The term “TCR-associated signaling module” refers to a molecule having a cytoplasmic immunoreceptor tyrosine-based activation motif (ITAM) that is part of the TCR-CD3 complex. TCR-associated signaling modules include CDγε, CDδε and CD3ζζ.

[0231] “Therapeutic agents” as used herein refers to agents that are used to, for example, treat, inhibit, prevent, mitigate the effects of, reduce the severity of, reduce the likelihood of developing, slow the progression of and/or cure, a disease. Diseases targeted by the therapeutic agents include but are not limited to infectious diseases, Carcinomas, sarcomas, lymphomas, leukemia, germ cell tumors, blastomas, antigens expressed on various immune cells, and antigens expressed on cells associated with various hematologic diseases, and/or inflammatory diseases.

[0232] “Therapeutic Controls” as used herein refers to an element used for controlling the activity of a SAR (including next generation CAR) expressing cell. In some embodiments, therapeutic controls for controlling the activity of the SAR expressing cells of the disclosure comprise any one or more of truncated epidermal growth factor receptor (tEGFR), truncated epidermal growth factor receptor viii (tEGFRviii), truncated CD30 (tCD30), truncated BCMA (tBCMA), truncated CD19 (tCD19), thymidine kinase, cytosine deaminase, nitroreductase, xanthine-guanine phosphoribosyl transferase, human caspase 8, human caspase 9, inducible caspase 9, purine nucleoside phosphorylase, linamarase/linamarin/glucose oxidase, deoxyribonucleoside kinase, horseradish peroxidase (HRP)/indole-3-acetic (IAA), Gamma-glutamylcysteine synthetase, CD20/alphaCD20, CD34/thymidine kinase chimera, dox-dependent caspase-2, mutant thymidine kinase (HSV-TKSR39), AP1903/Fas system, a chimeric cytokine receptor (CCR), a selection marker, and combinations thereof.

[0233] The term “therapeutic effect” refers to a biological effect which can be manifested by various means, including but not limited to, e.g., decrease in tumor volume, a decrease in the number of cancer cells, a decrease in the number of metastases, an increase in life expectancy, decrease in cancer cell proliferation, decrease in cancer cell survival, decrease in the titer of the infectious agent, a decrease in colony counts of the infectious agent, amelioration of various physiological symptoms associated with a disease condition. A “therapeutic effect” can also be manifested by the ability of the peptides, polynucleotides, cells and antibodies in prevention of the occurrence of disease in the first place or in the prevention of relapse of the disease.

[0234] The term “therapeutically effective amount” as used herein refers to the amount of a pharmaceutical composition comprising one or more peptides as disclosed herein or a mutant, variant, analog or derivative thereof, to decrease at least one or more symptom of the disease or disorder, and relates to a sufficient amount of pharmacological composition to provide the desired effect. The phrase “therapeutically effective amount” as used herein means a sufficient amount of the composition to treat a disorder, at a reasonable benefit/risk ratio applicable to any medical treatment.

[0235] A therapeutically or prophylactically significant reduction in a symptom is, e.g., at least about 10%, at least about 20%, at least about 30%, at least about 40%, at least about 50%, at least about 60%, at least about 70%, at least about 80%, at least about 90%, at least about 100%, at least about 125%, at least about 150% or more in a measured parameter as compared to a control or non-treated subject or the state of the subject prior to administering the oligopeptides described herein.

[0236] The term “TCR receptor fusion proteins” or “TFP” refers to a next generation SAR platform as described in WO 2016/187349 A1 which is incorporated herein by reference. In an embodiment, a TFP comprises an antibody moiety that specifically binds to a target antigen fused to a TCR chain such as CD3ε, CD3γ, CD3δ, TCRα or TCRβ. Exemplary TCR chains that can be used in the construction of TFP are represented by SEQ ID NOs: 11903-11906 of this disclosure and are provided in WO 2017/070608 A1 which is incorporated herein by reference. A TFP incorporating CD3ε chain is referred to as a CD3ε TFP or TFPε. A TFP incorporating CD3γ chain is referred to as a CD3γ TFP or TFPγ. A TFP incorporating CD3δ chain is referred to as a CD3δ TFP or TFPδ. The TFP incorporating CD3ε, CD3γ or CD3δ chains are collectively referred to as CD3s/γ/δ TFP or TFPs/γ/δ. This disclosure provides bispecific, biparatopic and mutlispecific SARs with the backbone of a TFP (e.g., TFPε), comprising one or more AABDs. The AABD domains of the SARs of the disclosure with the backbone of a TFP can be fully human, humanized or non-human. In an embodiment, the disclosure provides TFP comprising one or more fully human vH domains. In an embodiment, the disclosure provides TFP comprising one or more fully human vL domains. In an embodiment, the disclosure provides TFP comprising a non-immunoglobulin antigen binding scaffold (e.g., Centyrin or DARPIN). In an embodiment, the disclosure provides TFP comprising an adaptor binding domain (e.g., leucine zipper domain, e.g., RZip, Ezip, E4, K4 etc.).

[0237] The term “transfer vector” refers to a composition of matter which comprises an isolated nucleic acid and which can be used to deliver the isolated nucleic acid to the interior of a cell. Examples of viral transfer vectors include, but are not limited to, adenoviral vectors, adena-associated virus vectors, retroviral vectors, lentiviral vectors, and the like.

[0238] “Transmembrane domain” (TMD) as used herein refers to the region of the SAR which crosses the plasma membrane. The transmembrane domain of the SAR of the disclosure is the transmembrane region of a transmembrane protein (for example Type I transmembrane proteins), an artificial hydrophobic sequence or a combination thereof. Other transmembrane domains will be apparent to those of skill in the art and may be used in connection with alternate embodiments of the disclosure. In some embodiments, the TMD encoded SAR comprises a transmembrane domain selected from the transmembrane domain of TCRα, TCRβ. TCRγ, TCRδ chain of a T-cell receptor, CD3γ, CD3ε, CD3δ, CD3ζ, FcRγ, CD28, CD45, CD4, CD5, CD8, NKp44, NKp30, NKp46, NKG2D, and/or NKG2C.

[0239] As used herein “Tri-functional T cell antigen coupler” or “Tri-TAC” or “TAC” refer to a next generation SAR platform described in WO 2015/117229 A1, which is incorporated herein by reference. Tri-TAC targeting different antigens can be constructed using the antigen binding domains (e.g., vL and vH fragments, scFv, vHH, ligands and receptors etc.) described in this disclosure using techniques known in the art.

[0240] As used herein, the terms “treat,” “treatment,” “treating,” or “amelioration” refer to therapeutic treatments, wherein the object is to reverse, alleviate, ameliorate, inhibit, slow down or stop the progression or severity of a condition associated with, a disease or disorder.

[0241] “Tumor,” as used herein refers to all neoplastic cell growth and proliferation, whether malignant or benign, and all pre-cancerous and cancerous cells and tissues.

[0242] “Vector”, “cloning vector” and “expression vector” as used herein refer to the vehicle by which a polynucleotide sequence (e.g., a foreign gene) can be introduced into a host cell, so as to transform the host and promote expression (e.g., transcription and translation) of the introduced sequence. Vectors include plasmids, phages, viruses, etc.

[0243] The term “viral vector” refers to a vector obtained or derived from a virus. Typically, the virus is a retrovirus including, but not limited to, lentiviruses and gamma retroviruses. The viral vector of the disclosure may be a retroviral vector, such as a gammaretroviral vector. The viral vector of the disclosure may be a lentiviral vector.

[0244] The term “zeta” or alternatively “zeta chain”, “CD3-zeta” or “TCR-zeta” is defined as the protein provided as GenBank Acession No. BAG36664.1, or the equivalent residues from a non-human species.

[0245] The binding domain of a SAR binds to a desired epitope or antigen. For example, the epitope recognized by a SAR is determined from the epitope recognized by the scFv used as the binding domain of the SAR. For example, since the antigen specific domain of the SAR CD8SP-hu-mR005-1-vL-Gly-Ser-Linker-hu-mR005-1-vH-Myc-CD8TM-BBz-T2A-PAC (SEQ ID NO: 7340) targeting CD19 is comprised of humanized scFv (SEQ ID NO: 11323), it is expected that the SAR targets the same epitope as the scFv and/or the parental antibody from which the scFv is derived. The epitopes recognized by several scFv and/or their parental antibodies used in the construction of the SARs and backbones of this disclosure are known in the art. Alternatively, the epitope targeted by an AMR or a SAR can be determined by generating a series of mutants of its target antigen and testing the ability of the mutants to bind to the SAR-expressing cells using techniques known in the art, for example, using the Topanga Assay. As an example, the epitope recognized by the SAR CD8SP-hu-mROO5-l-vL-Gly-Ser-Linker-hu-mROO5-l-vH-Myc-CD8TM-BBz-T2A-PAC (SEQ ID NO: 7340) targeting CD19 can be determined by generating a panel of deletion and point mutants of the CD19-ECD-GGSG-NLuc-4xFlag-2xStreptag-8xHis-T2A-Pac (DNA SEQ ID NO: 1282 and PRT SEQ ID NO: 11972). The mutant constructs would be transfected into a suitable cell line (e.g., 293FT cells) and the supernatant containing the fusion protein collected and assayed for NLuc activity to assure that the different mutant CD19-ECD-GGSG-NLuc-4xFlag-2xStreptag-8xHis fusion proteins are being secreted in the supernatant. Subsequently, the fusion proteins would be tested for their ability to bind to cells (e.g., Jurkat cells or T cells) expressing the SAR (SEQ ID NO: 7340) construct. The mutant that fails to bind to the SAR-expressing cells is a candidate for containing the epitope targeted by the CD19-specific SAR. An alternate approach to determine the epitope recognized by a particular SAR could include a functional competitive assay with different test antibodies. For example, T cells expressing the SAR (SEQ ID NO: 7340) could be cocultured with a cell line expressing CD19 (e.g., RAJI cells) in the absence and presence of increasing concentrations of different test CD19 antibodies. In case the epitope recognized by a test CD19 antibody overlaps with the epitope recognized by the SAR ((SEQ ID NO: 7340), then the test antibody would be expected to block target-cell killing and cytokine production induced by T cells expressing the SAR (SEQ ID NO: 7340) in a dose-dependent manner. A non-specific antibody of the same isotype as the test antibody would be included as a control and would be expected to have no effect on the target-cell killing and cytokine production induced by T cells expressing the SAR. Similarly, a specific SAR can be expressed in Jurkat-NFAT-EGFP cells and the ability of a test antibody to block EGFP induction by the SAR-expressing Jurkat-NFAT-GFP cells upon coculture with a target cell line can be used to determine whether the epitope recognized by the test antibody overlaps with the epitope recognized by the said SAR.

TABLE 1

| SEQ ID NO | Name of vector or component | SEQ ID NO | |
|---|---|---|---|
| 1 | pLenti-EF1a | 17 | LucPPe-146-1H2 |
| 2 | pLenti-EF1a-DWPRE | 18 | LucPPe-133-1B2 |
| 3 | MSCV-Bg12-AvrII-EcoR1B1-Mlu-Sal-ClaI | 19 | LucPPe-78-0B10 |
| 4 | pCCLc-MNDU3-WPRE | 20 | LucPPe49-7C6A |
| 5 | pCCLc-MNDU3-Eco-Nhe-Sal-WPRE | 21 | LucPpL-81-6G1 |
| 6 | pCCLc-MNDU3 -delta-WPRE | 22 | CD8SP-StreptagII-R1-S-Protein-RBD-Mlu-mCD8-hinge-TM |
| 7 | (EF1a)_Promoter_Variant | 23 | TRAC-5-SA-F2A-CD8SP-CD19-vHH-048-G4Sx3-R1-hu-mROO5-1-vL-[hTCRb-S57C]-F-P2A-IgSP-Apa-CD20-vHH-2HCD25-G4Sx3v2-hu-mROO5-l-vH-[hTCRa-T48C]-STOP-pA-Del-Exonl-TRAC-3 |
| 8 | pSBbi-Pur | 24 | MNDU3-promoter |
| 9 | MSCVhygro-GLuc-HA | 25 | DNA barcode 9 |
| 10 | MSCVpac-GLUC-R03 | 26 | DNA barcode 10 |
| 11 | pLENTI-NLuc-AcV5-Blast | 27 | DNA barcode 11 |
| 12 | pLENTI-Gluc-Flag-blast | 28 | DNA barcode 12 |
| 13 | PolyA | 29 | DNA barcode 13 |
| 14 | PolyA | 30 | DNA barcode 13 |
| 15 | PolyA | | |
| 16 | polyA | | |

TABLE 2

| NAME | SEQ 1D NO (PRT) | SEQ ID NO (PRT) | NAME | SEQ ID NO (DNA) | SEQ ID NO (PRT) |
|---|---|---|---|---|---|
| CD8 Signal Peptide | 31 | 10721 | (Gly4Ser)x3 Linker | 37 | 10727 |
| CD8-SIGNAL-PEPTIDE | 32 | 10722 | (Gly4Ser)x3_Linker | 38 | 10728 |
| IgH Signal Peptide | 33 | 10723 | (GGGGS)x3-Linker | 39 | 10729 |
| IgH Signal Peptide | 34 | 10724 | (GGGGS)x3-Linker | 40 | 10730 |
| TCRa-SP | 35 | 10725 | (GGSG)7 Linker | 41 | 10731 |
| TCRb-SP | 36 | 10726 | (GGSG)7 Linker 2 | 42 | 10732 |
| (GGGGS)x3 LINKER | 37 | 10727 | DDAKK linker | 43 | 10733 |

TABLE 3

| TARGET ANTIGEN | vL NAME | SEQ ID (DNA) | SEQ ID NO (PRT) | vH NAME | SEQ ID (DNA) | SEQ ID (PRT) | scFv-DNA SEQ ID | scFv-PRT SEQ ID |
|---|---|---|---|---|---|---|---|---|
| ALK | Alk-48 | 46 | 10736 | Alk-48 | 288 | 10978 | 530 | 11220 |
| ALK | Alk-58 | 47 | 10737 | Alk-58 | 289 | 10979 | 531 | 11221 |
| BCMA | BCMA-J6M0 | 49 | 10739 | BCMA-J6M0 | 291 | 10981 | 533 | 11223 |
| CD123 | CD123-CSL362 | 50 | 10740 | CD123-CSL362 | 292 | 10982 | 534 | 11224 |
| CD19 | CD138 | 51 | 10741 | CD138 | 293 | 10983 | 535 | 11225 |
| CD19 | CD 179b | 52 | 10742 | CD179b | 294 | 10984 | 536 | 11226 |
| CD19 | CD19Bu12 | 53 | 10743 | CD19Bu12 | 295 | 10985 | 537 | 11227 |
| CD19 | FMC63 | 54 | 10744 | FMC63 | 296 | 10986 | 538 | 11228 |
| CD19 | huFMC63-11 | 55 | 10745 | huFMC63-11 | 297 | 10987 | 539 | 11229 |
| CD20 | CD20-2F2 | 56 | 10746 | CD20-2F2 | 298 | 10988 | 540 | 11230 |
| CD20 | CD20-GA101 | 57 | 10747 | CD20-GA101 | 299 | 10989 | 541 | 11231 |
| CD22 | CD22-h10F4 | 58 | 10748 | CD22-h10F4 | 300 | 10990 | 542 | 11232 |
| CD276 | CD276-17 | 59 | 10749 | CD276-17 | 301 | 10991 | 543 | 11233 |
| CD30 | CD30-5F11 | 60 | 10750 | CD30-5F11 | 302 | 10992 | 544 | 11234 |
| CD30 | CD30-Ac10 | 61 | 10751 | CD30-Ac10 | 303 | 10993 | 545 | 11235 |
| CD32 | CD32-Med9 | 62 | 10752 | CD32-Med9 | 304 | 10994 | 546 | 11236 |
| CD324 | CD324-hSC10-17 | 63 | 10753 | CD324-hSC10-17 | 305 | 10995 | 547 | 11237 |
| CD324 | CD324-SC10-6 | 64 | 10754 | CD324-SC10-6 | 306 | 10996 | 548 | 11238 |
| CD33b | CD33-huMyc9 | 65 | 10755 | CD33-huMyc9 | 307 | 10997 | 549 | 11239 |
| CD33 | CD33-AF5 | 66 | 10756 | CD33-AF5 | 308 | 10998 | 550 | 11240 |
| CD34 | CD34-hu4C7 | 67 | 10757 | CD34-hu4C7 | 309 | 10999 | 551 | 11241 |
| CD5 | CD5-18 | 68 | 10758 | CD5-18 | 310 | 11000 | 552 | 11242 |
| CD5 | CDS-9 | 69 | 10759 | CD5-9 | 311 | 11001 | 553 | 11243 |
| CD70 | CD70-h1F6 | 70 | 10760 | CD70-h1F6 | 312 | 11002 | 554 | 11244 |
| CD79b | CD79b-2F2 | 71 | 10761 | CD79b-2F2 | 313 | 11003 | 555 | 11245 |
| CD79b | huMA79bv 28 | 72 | 10762 | huMA79bv 28 | 314 | 11004 | 556 | 11246 |
| CDH17 | CDH17-PTA001A4 | 73 | 10763 | CDH17-PTA001A4 | 315 | 11005 | 557 | 11247 |
| CDH19 | CDH19-16A4 | 74 | 10764 | CDH19-16A4 | 316 | 11006 | 558 | 11248 |
| CDH6 | CDH6-NOV710 | 75 | 10765 | CDH6-NOV710 | 317 | 11007 | 559 | 11249 |
| CDH6 | CDH6-NOV712 | 76 | 10766 | CDH6-NOV712 | 318 | 11008 | 560 | 11250 |
| CLEC5A | CLEC5A-3E12A2 | 77 | 10767 | CLEC5A-3E12A2 | 319 | 11009 | 561 | 11251 |
| CLEC5A | CLEC5A-8H8F5 | 78 | 10768 | CLEC5A-8H8F5 | 320 | 11010 | 562 | 11252 |
| CLL1 | CLL1-M26 | 79 | 10769 | CLL1-M26 | 321 | 11011 | 563 | 11253 |
| CLL1 | CLL1-M32 | 80 | 10770 | CLL1-M32 | 322 | 11012 | 564 | 11254 |
| CS1/SLA MF7 | HuLuc64-[2] | 81 | 10771 | HuLuc64 | 323 | 11013 | 565 | 11255 |
| CS1/SLA MF7 | huLuc90 | 82 | 10772 | huLuc90 | 324 | 11014 | 566 | 11256 |
| CSF2RA | CSF2RA-Ab1 | 83 | 10773 | CSF2RA-Ab1 | 325 | 11015 | 567 | 11257 |
| CSF2RA | CSF2RA-Ab6 | 84 | 10774 | CSF2RA-Ab6 | 326 | 11016 | 568 | 11258 |
| DLL3 | DLL3-hSC16-13 | 85 | 10775 | DLL3-hSC16-13 | 327 | 11017 | 569 | 11259 |
| DLL3 | DLL3-hSC16-56 | 86 | 10776 | DLL3-hSC16-56 | 328 | 11018 | 570 | 11260 |
| EGFR | Cetuximab | 87 | 10777 | Cetuximab | 329 | 11019 | 571 | 11261 |
| EGFRviii | EGFRviii-2173 | 88 | 10778 | EGFRviii-2173 | 330 | 11020 | 572 | 11262 |
| EpCAM | EpCam1-D5K5 | 89 | 10779 | EpCam1-D5K5 | 331 | 11021 | 573 | 11263 |
| EpCAM | Epcam1-MM1 | 90 | 10780 | Epcam1-MM1 | 332 | 11022 | 574 | 11264 |
| FLT3 | FLT3-NC7 | 91 | 10781 | FLT3-NC7 | 333 | 11023 | 575 | 11265 |
| HIV1-gp | HIV1-N6 | 92 | 10782 | HIV1-N6 | 334 | 11024 | 576 | 11266 |
| Folate Receptor-1 | FR1-huMov19 | 93 | 10783 | FR1-huMov19 | 335 | 11025 | 577 | 11267 |
| GD2 | GD2-hu14-18 | 94 | 10784 | GD2-hu14-18 | 336 | 11026 | 578 | 11268 |
| GD2 | GD2-hu3F8 | 95 | 10785 | GD2-hu3F8 | 337 | 11027 | 579 | 11269 |
| GD3 | GD3-KM-641 | 96 | 10786 | GD3-KM-641 | 338 | 11028 | 580 | 11270 |
| GFR4 | GFRAlpha 4-P4-6 | 97 | 10787 | GFRAlpha4 -P4-6 | 339 | 11029 | 581 | 11271 |
| GM1 | GM1-5B2 | 98 | 10788 | GM1-5B2 | 340 | 11030 | 582 | 11272 |
| GPRC5D | GPRC5D-ET150-18 | 99 | 10789 | GPRC5D-ET150-18 | 341 | 11031 | 583 | 11273 |
| GPRC5D | GPRC5D-ET150-5 | 100 | 10790 | GPRC5D-ET150-5 | 342 | 11032 | 584 | 11274 |
| Her2 | Her2-Hu4D5 | 101 | 10791 | Her2-Hu4D5 | 343 | 11033 | 585 | 11275 |
| HIV1-gp100 | HIV1-PGT-128 | 102 | 10792 | HIV1-PGT-128 | 344 | 11034 | 586 | 11276 |
| HIV1-gp100 | HIV1-X5 | 103 | 10793 | HIV1-X5 | 345 | 11035 | 587 | 11277 |
| IL11Ra | IL11Ra-8E2 | 104 | 10794 | IL11Ra-8E2 | 346 | 11036 | 588 | 11278 |
| IL13Ra2 | IL13Ra2-hu107 | 105 | 10795 | IL13Ra2-hu107 | 347 | 11037 | 589 | 11279 |
| IL13Ra2 | IL13Ra2-Hu108 | 106 | 10796 | IL13Ra2-Hu108 | 348 | 11038 | 590 | 11280 |
| L1CAM | L1CAM-9-3-HU3 | 107 | 10797 | L1CAM-9-3-HU3 | 349 | 11039 | 591 | 11281 |
| LAMP1 | LAMP1-humab1-2 | 108 | 10798 | LAMP1-humab1-2 | 350 | 11040 | 592 | 11282 |
| LAMP1 | LAMP1-Mb4 | 109 | 10799 | LAMP1-Mb4 | 351 | 11041 | 593 | 11283 |
| Lym1 | Lym1 | 110 | 10800 | Lym1 | 352 | 11042 | 594 | 11284 |
| Lym2 | Lym2 | 111 | 10801 | Lym2 | 353 | 11043 | 595 | 11285 |
| MPL/TPO -R | MPL-111 | 112 | 10802 | MPL-111 | 354 | 11044 | 596 | 11286 |
| MPL/TPO -R | MPL-161-HL | 113 | 10803 | MPL-161-HL | 355 | 11045 | 597 | 11287 |
| MPL/TPO -R | MPL-161 | 114 | 10804 | MPL-161 | 356 | 11046 | 598 | 11288 |
| MPL/TPO -R | MPL-175 | 115 | 10805 | MPL-175 | 357 | 11047 | 599 | 11289 |
| TCRB1 | TCRB1-E09 | 116 | 10806 | TCRB1-E09 | 358 | 11048 | 600 | 11290 |
| TCRB1 | TCRB1-Jovi1 | 117 | 10807 | TCRB1-Jovi1 | 359 | 11049 | 601 | 11291 |
| TCRB2 | TCRB2-CP01-05 | 118 | 10808 | TCRB2-CP01-D05 | 360 | 11050 | 602 | 11292 |
| TCRB2 | TCRB2-CP01-E05 | 119 | 10809 | TCRB2-CP01-E05 | 361 | 11051 | 603 | 11293 |
| TCRgd | TCRgd-G5-4 | 120 | 10810 | TCRgd-G5-4 | 362 | 11052 | 604 | 11294 |
| TnAg | TnAg | 121 | 10811 | TnAg | 363 | 11053 | 605 | 11295 |
| Tn-Muc1 | Tn-Muc1-hu5E5 | 122 | 10812 | Tn-Muc1-hu5E5 | 364 | 11054 | 606 | 11296 |
| TROP2 | TROP2-ARA47-HV3KV3 | 123 | 10813 | TROP2-ARA47-HV3KV3 | 365 | 11055 | 607 | 11297 |
| WT1/HLA -A2 | WT1-Ab13 | 124 | 10814 | WT1-Ab13 | 366 | 11056 | 608 | 11298 |
| WT1/HLA -A2 | WT1-Ab15 | 125 | 10815 | WT1-Ab15 | 367 | 11057 | 609 | 11299 |
| WT1/HLA -A2 | WT1-Ab5 | 126 | 10816 | WT1-Ab5-[2] | 368 | 11058 | 610 | 11300 |
| CD123 | CD123-1172 | 127 | 10817 | CD123-1172 | 369 | 11059 | 611 | 11301 |
| CDH19 | CDH19-4B10 | 128 | 10818 | CDH19-4B10 | 370 | 11060 | 612 | 11302 |
| Folate Receptor-beta | FRbeta-m923 | 129 | 10819 | FRbeta-m923 | 371 | 11061 | 613 | 11303 |
| B7J4 | B7H4-hu22C10 | 130 | 10820 | B7H4-hu22C10 | 372 | 11062 | 614 | 11304 |
| B7H4 | B7H4-hu1D11 | 131 | 10821 | B7H4-hu1D11 | 373 | 11063 | 615 | 11305 |
| CD23 | CD23-p5E8 | 132 | 10822 | CD23-p5E8 | 374 | 11064 | 616 | 11306 |
| GCC | GCC-Ab229 | 133 | 10823 | GCC-Ab229 | 375 | 11065 | 617 | 11307 |
| CD200R | CD200R-huDx182 | 134 | 10824 | CD200R-huDx182 | 376 | 11066 | 618 | 11308 |
| AFP/HLA -A2 | AFP-76 | 135 | 10825 | AFP-76 | 377 | 11067 | 619 | 11309 |
| AFP/HLA -A2 | AFP-79 | 136 | 10826 | AFP-79 | 378 | 11068 | 620 | 11310 |
| BCMA | BCMA-ET-03 | 137 | 10827 | BCMA-ET-03 | 379 | 11069 | 621 | 11311 |
| BCMA | BCMA-huC11.D5. 3L1H3 | 138 | 10828 | BCMA-huC11.D5.3 L1H3 | 380 | 11070 | 622 | 11312 |
| BCMA | BCMA-huC13-F12 | 139 | 10829 | BCMA-huC13-F12 | 381 | 11071 | 623 | 11313 |
| CD123 | CD123-DART-1 | 140 | 10830 | CD123-DART-1 | 382 | 11072 | 624 | 11314 |
| CD123 | CD123-DART-2 | 141 | 10831 | CD123-DART-2 | 383 | 11073 | 625 | 11315 |
| CD123 | CD123-1176 | 142 | 10832 | CD123-1176 | 384 | 11074 | 626 | 11316 |
| CD123 | CD123-2B8 | 143 | 10833 | CD123-2B8 | 385 | 11075 | 627 | 11317 |
| CD123 | CD123-9D7 | 144 | 10834 | CD123-9D7 | 386 | 11076 | 628 | 11318 |
| CD123 | CD123-3B10 | 145 | 10835 | CD123-3B10 | 387 | 11077 | 629 | 11319 |
| CD19 | CD19-MEDI-3649 | 146 | 10836 | CD19-MEDI-3649 | 388 | 11078 | 630 | 11320 |
| CD19 | CD19-Medrex-24D1 | 147 | 10837 | CD19-Medrex-24D1 | 389 | 11079 | 631 | 11321 |
| CD19 | CD19-MOR0028 | 148 | 10838 | CD19-MOR0028 | 390 | 11080 | 632 | 11322 |
| CD19 | CD19-hu-mROO5-1 | 149 | 10839 | CD19-hu-mROO5-1 mROO5-1 | 391 | 11081 | 633 | 11323 |
| CD20 | CD20-Ubli-v4 | 150 | 10840 | CD20-Ubli-v4 | 392 | 11082 | 634 | 11324 |
| CD20 | CD20-7D8 | 151 | 10841 | CD20-7D8 | 393 | 11083 | 635 | 11325 |
| CD33 | CD33-SGNh2H12 | 152 | 10842 | CD33-SGNh2H12 | 394 | 11084 | 636 | 11326 |
| CD99 | CD99-hu12E7 | 153 | 10843 | CD99-hu12E7 | 395 | 11085 | 637 | 11327 |
| CLL1 | CLL1-21C9-L2H3 | 154 | 10844 | CLL1-21C9-L2H3 | 396 | 11086 | 638 | 11328 |
| CLL1 | CLL1-6E7L4H1e | 155 | 10845 | CLL1-6E7L4H1e | 397 | 11087 | 639 | 11329 |
| CLL1 | CLL1-hu1075-v1 | 156 | 10846 | CLL1-hu1075-v1 | 398 | 11088 | 640 | 11330 |
| CLL1 | CLL1-hu1075-v2 | 157 | 10847 | CLL1-hu1075-v2 | 399 | 11089 | 641 | 11331 |
| FITC | FITC-4M-53 | 158 | 10848 | FITC-4M-53 | 400 | 11090 | 642 | 11332 |
| FITC | FITC-E2 | 159 | 10849 | FITC-E2 | 401 | 11091 | 643 | 11333 |
| GPRC5D | GPRC5D-ET150-1 | 160 | 10850 | GPRC5D-ET150-1 | 402 | 11092 | 644 | 11334 |
| GPRC5D | GPRC5D-ET150-2 | 161 | 10851 | GPRC5D-ET150-2 | 403 | 11093 | 645 | 11335 |
| HLA-A2 | HLA-A2-3PB2 | 162 | 10852 | HLA-A2-3PB2 | 404 | 11094 | 646 | 11336 |
| Kappa-Light-chain | Kappa-LC1 | 163 | 10853 | Kappa-LC1 | 405 | 11095 | 647 | 11337 |
| CD19 | hCD19-EUK5-13 | 164 | 10854 | hCD19-EUK5-13 | 406 | 11096 | 648 | 11338 |
| Streptag | Streptag | 165 | 10855 | Streptag | 407 | 11097 | 649 | 11339 |
| BCMA | BCMA-huC13-F12-L1H22 | 166 | 10856 | BCMA-huC13-F12-L1H22 | 408 | 11098 | 650 | 11340 |
| BCMA | BCMA-huC12A3-L3H32 | 167 | 10857 | BCMA-huC12A3-L3H32 | 409 | 11099 | 651 | 11341 |
| MPL/TPO -R | Hu-161-2 | 168 | 10858 | Hu-161-2 | 410 | 11100 | 652 | 11342 |
| CD22 | CD22-5 | 169 | 10859 | CD22-5 | 411 | 11101 | 653 | 11343 |
| CD22 | CD22-10 | 170 | 10860 | CD22-10 | 412 | 11102 | 654 | 11344 |
| CD22 | CD22-31 | 171 | 10861 | CD22-31 | 413 | 11103 | 655 | 11345 |
| CD22 | CD22-53 | 172 | 10862 | CD22-53 | 414 | 11104 | 656 | 11346 |
| CD22 | CD22-65 | 173 | 10863 | CD22-65 | 415 | 11105 | 657 | 11347 |
| MPL/TPO -R | MPL-hu-175-2 | 174 | 10864 | MPL-hu-175-2 | 416 | 11106 | 658 | 11348 |
| MPL/TPO -R | MPL-hu-111-2 | 175 | 10865 | MPL-hu-111-2 | 417 | 11107 | 659 | 11349 |
| CD179a | CD 179a-2460-B04 | 176 | 10866 | CD179a-2460-B04 | 418 | 11108 | 660 | 11350 |
| CD179a | CD 179a-2462-E07 | 177 | 10867 | CD179a-2462-E07 | 419 | 11109 | 661 | 11351 |
| CD22 | CD22-HA22 | 178 | 10868 | CD22-HA22 | 420 | 11110 | 662 | 11352 |
| STEAP1 | STEAP1-hu120 | 179 | 10869 | STEAP1-hu120 | 421 | 11111 | 663 | 11353 |
| Liv1 | hLiv1-mAb2 | 180 | 10870 | hLiv1-mAb2 | 422 | 11112 | 664 | 11354 |
| Nectin4 | hu-Nectin4-mAb1 | 181 | 10871 | hu-Nectin4-mAb1 | 423 | 11113 | 665 | 11355 |
| CRIPTO | hu-Cripto-L1H2 | 182 | 10872 | hu-Cripto-L1H2 | 424 | 11114 | 666 | 11356 |
| gpA33 | hu-gpA33 | 183 | 10873 | hu-gpA33 | 425 | 11115 | 667 | 11357 |
| ROR1 | ROR1-DART4 | 184 | 10874 | ROR1-DART4 | 426 | 11116 | 668 | 11358 |
| BCMA | BCMA-BB-CAR02 | 185 | 10875 | BCMA-BB-CAR02 | 427 | 11117 | 669 | 11359 |
| CLL1 | CLL1-24C8 | 186 | 10876 | CLL1-24C8 | 428 | 11118 | 670 | 11360 |
| CLL1 | CLL1-24C1 | 187 | 10877 | CLL1-24C1 | 429 | 11119 | 671 | 11361 |
| FLT3 | FLT3-10E3 | 188 | 10878 | FLT3-10E3 | 430 | 11120 | 672 | 11362 |
| FLT3 | FLT3-8B5 | 189 | 10879 | FLT3-8B5 | 431 | 11121 | 673 | 11363 |
| IL 1 RAP | IL1RAP-IAPB57 | 190 | 10880 | IL1RAP-IAPB57 | 432 | 11122 | 674 | 11364 |
| IL 1 RAP | IL1RAP-IAPB63 | 191 | 10881 | IL1RAP-IAPB63 | 433 | 11123 | 675 | 11365 |
| IL 1 RAP | hu-IL1RAP-CANO4 | 192 | 10882 | hu-IL1RAP-CANO4 | 434 | 11124 | 676 | 11366 |
| MSLN | MSLN-7D9-v3 | 193 | 10883 | MSLN-7D9-v3 | 435 | 11125 | 677 | 11367 |
| MSLN | MSLN-hu22A10 | 194 | 10884 | MSLN-hu22A10 | 436 | 11126 | 678 | 11368 |
| BST1 | hu1-A1 | 195 | 10885 | hu1-A1 | 437 | 11127 | 679 | 11369 |
| BST1 | hu1-A2 | 196 | 10886 | hu1-A2 | 438 | 11128 | 680 | 11370 |
| BST1 | hu1-A3 | 197 | 10887 | hu1-A3 | 439 | 11129 | 681 | 11371 |
| CD19 | CAT17-HL | 198 | 10888 | CAT17-HL | 440 | 11130 | 682 | 11372 |
| CD22 | hu-HA22-1 | 199 | 10889 | hu-HA22-1 | 441 | 11131 | 683 | 11373 |
| CD70 | CD70-HL-AM13 | 200 | 10890 | CD70-HL-AM13 | 442 | 11132 | 684 | 11374 |
| BCMA | BCMA-BB-CAR02 | 201 | 10891 | BCMA-BB-CAR02 | 443 | 11133 | 685 | 11375 |
| Her2 | Her2-169 | 202 | 10892 | Her2-169 | 444 | 11134 | 686 | 11376 |
| Her2 | Her2-XMT-1520 | 203 | 10893 | Her2-XMT-1520 | 445 | 11135 | 687 | 11377 |
| Her2 | Her2-XMT-1518 | 204 | 10894 | Her2-XMT-1518 | 446 | 11136 | 688 | 11378 |
| Her2 | Her2-huMab4D5 -D98W | 205 | 10895 | Her2-huMab4D5-D98W | 447 | 11137 | 689 | 11379 |
| MSLN | MSLN-3-HL-AM | 206 | 10896 | MSLN-3-HL-AM | 448 | 11138 | 690 | 11380 |
| MSLN | MSLN-5-HL | 207 | 10897 | MSLN-5-HL | 449 | 11139 | 691 | 11381 |
| EGFRviii | EGFRviii-2-AM-HL | 208 | 10898 | EGFRviii-2-AM-HL | 450 | 11140 | 692 | 11382 |
| EGFRviii | EGFRviii-H2M1863N 2-HL | 209 | 10899 | EGFRviii-H2M1863N 2-HL | 451 | 11141 | 693 | 11383 |
| DLL3 | DLL3-AM6-HL | 210 | 10900 | DLL3-AM6-HL | 452 | 11142 | 694 | 11384 |
| DLL3 | DLL3-AM14-HL | 211 | 10901 | DLL3-AM14-HL | 453 | 11143 | 695 | 11385 |
| Nectin4 | Nectin4-66-HL | 212 | 10902 | Nectin4-66-HL | 454 | 11144 | 696 | 11386 |
| MSLN | MSLN-237-HL | 213 | 10903 | MSLN-237-HL | 455 | 11145 | 697 | 11387 |
| MSLN | MSLN-HuAM15 | 214 | 10904 | MSLN-HuAM15 | 456 | 11146 | 698 | 11388 |
| MSLN | MSLN7692 3-HL | 215 | 10905 | MSLN7692 3-HL | 457 | 11147 | 699 | 11389 |
| PRLR | PRLR-CN | 216 | 10906 | PRLR-CN | 458 | 11148 | 700 | 11390 |
| EMR2 | EMR2-USC2-V4 | 217 | 10907 | EMR2-USC2-V4 | 459 | 11149 | 701 | 11391 |
| CEA | CEA-USC1-HL4 | 218 | 10908 | CEA-USC1-HL4 | 460 | 11150 | 702 | 11392 |
| Her3 | Her3-USC1-HL4 | 219 | 10909 | Her3-USC1-HL4 | 461 | 11151 | 703 | 11393 |
| FOLR1 | FOLR1-USC1-HL4 | 220 | 10910 | FOLR1-USC1-HL4 | 462 | 11152 | 704 | 11394 |
| FOLR1 | FOLR1-USC2-HL4 | 221 | 10911 | FOLR1-USC2-HL4 | 463 | 11153 | 705 | 11395 |
| CLDN6 | CLDN6-USC1-LH4 | 222 | 10912 | CLDN6-USC1-LH4 | 464 | 11154 | 706 | 11396 |
| CLDN6 | CLDN6-USC2-LH4 | 223 | 10913 | CLDN6-USC2-LH4 | 465 | 11155 | 707 | 11397 |
| SLC34A2 | huMX35-LH4 | 224 | 10914 | huMX35-LH4 | 466 | 11156 | 708 | 11398 |
| CD22 | CD22-INO | 225 | 10915 | CD22-INO | 467 | 11157 | 709 | 11399 |
| CD22 | CD22-hu-RFB4 | 226 | 10916 | hu-RFB4 | 468 | 11158 | 710 | 11400 |
| BCMA | BCMA-mJ22-9 | 227 | 10917 | BCMA-mJ22-9 | 469 | 11159 | 711 | 11401 |
| CD22 | CD22-hu-HA22-2 | 228 | 10918 | CD22-hu-HA22-2 | 470 | 11160 | 712 | 11402 |
| CD19 | huCD19-USC3 | 229 | 10919 | huCD19-USC3 | 471 | 11161 | 713 | 11403 |
| BCMA | BCMA-hu72 | 230 | 10920 | BCMA-hu72 | 472 | 11162 | 714 | 11404 |
| MPL/TPO -R | hu-161-3 | 231 | 10921 | hu-161-3 | 473 | 11163 | 715 | 11405 |
| BAFFR | hu-BAFFR-USC90 | 232 | 10922 | hu-BAFFR-USC90 | 474 | 11164 | 716 | 11406 |
| BAFFR | hu-BAFFR-USC55 | 233 | 10923 | hu-BAFFR-USC55 | 475 | 11165 | 717 | 11407 |
| BAFFR | hu-BAFFR-MOR6654 | 234 | 10924 | hu-BAFFR-MOR6654 | 476 | 11166 | 718 | 11408 |
| BCMA | BCMA-hu-USC73 | 235 | 10925 | BCMA-hu-USC73-G32S | 477 | 11167 | 719 | 11409 |
| BCMA | BCMA-hu-USC74 | 236 | 10926 | BCMA-huUSC74-F35Y | 478 | 11168 | 720 | 11410 |
| BCMA | BCMA-hu-USC75 | 237 | 10927 | BCMA-huUSC75-V104T | 479 | 11169 | 721 | 11411 |
| BCMA | BCMA-hu-USC76 | 238 | 10928 | BCMA-huUSC76-I58S | 480 | 11170 | 722 | 11412 |
| BCMA | BCMA-hu-USC77 | 239 | 10929 | BCMA-huUSC77-T59S | 481 | 11171 | 723 | 11413 |
| BCMA | BCMA-hu-USC78 | 240 | 10930 | BCMA-huUSC78-S64G | 482 | 11172 | 724 | 11414 |
| BCMA | BCMA-hu-USC79 | 241 | 10931 | BCMA-huUSC79-S64T | 483 | 11173 | 725 | 11415 |
| BCMA | BCMA-hu-USC80-N25K | 242 | 10932 | BCMA-huUSC80 | 484 | 11174 | 726 | 11416 |
| BCMA | BCMA-hu-USC81-I27L | 243 | 10933 | BCMA-huUSC81 | 485 | 11175 | 727 | 11417 |
| BCMA | BCMA-hu-USC82-S29G | 244 | 10934 | BCMA-huUSC82 | 486 | 11176 | 728 | 11418 |
| BCMA | BCMA-hu-USC83-S31T | 245 | 10935 | BCMA-huUSC83 | 487 | 11177 | 729 | 11419 |
| BCMA | BCMA-hu-USC80-N25K | 246 | 10936 | BCMA-hu-USC73-G32S | 488 | 11178 | 730 | 11420 |
| BCMA | BCMA-hu-USC81-I27L | 247 | 10937 | BCMA-hu-USC73-G32S | 489 | 11179 | 731 | 11421 |
| BCMA | BCMA-hu-USC82-S29G | 248 | 10938 | BCMA-hu-USC73-G32S | 490 | 11180 | 732 | 11422 |
| ROR1 | ROR1-JJ-67 | 249 | 10939 | ROR1-JJ-67 | 491 | 11181 | 733 | 11423 |
| ROR1 | ROR1-JJ-78 | 250 | 10940 | ROR1-JJ-78 | 492 | 11182 | 734 | 11424 |
| ROR1 | ROR1-JJ-76 | 251 | 10941 | ROR1-JJ-76 | 493 | 11183 | 735 | 11425 |
| CD20 | CD20-Rituximab | 252 | 10942 | CD20-Rituximab | 494 | 11184 | 736 | 11426 |
| Her2 | Her2-FRP5-HL | 253 | 10943 | Her2-FRP5 | 495 | 11185 | 737 | 11427 |
| CD19 | CEA-huMN14 | 254 | 10944 | CEA-huMN14 | 496 | 11186 | 738 | 11428 |
| CEA | CEA-BW431-26 | 255 | 10945 | CEA-BW431-26 | 497 | 11187 | 739 | 11429 |
| Her2 | Her2-huMab4D5 -H91A | 256 | 10946 | Her2-huMab4D5-D98A-F100AY102V | 498 | 11188 | 740 | 11430 |
| Her2 | Her2-USC-1516 | 257 | 10947 | Her2-USC-1516 | 499 | 11189 | 741 | 11431 |
| TOSO | TOSO-6B10 | 258 | 10948 | TOSO-6B10 | 500 | 11190 | 742 | 11432 |
| CD30 | CD30-HRS3 | 259 | 10949 | CD30-HRS3 | 501 | 11191 | 743 | 11433 |
| CD229 | CD229-USC1-2D4 | 260 | 10950 | CD229-USC1-2D4 | 502 | 11192 | 744 | 11434 |
| CD229 | CD229-2A2 | 261 | 10951 | CD229-2A2 | 503 | 11193 | 745 | 11435 |
| CD229 | CD229-USC3-2D5 | 262 | 10952 | CD229-USC3-2D5 | 504 | 11194 | 746 | 11436 |
| CD229 | CD229-USC2-2D4 | 263 | 10953 | CD229-USC2-2D4 | 505 | 11195 | 747 | 11437 |
| EBV-gp350 | EBV-gp350-7A1 | 264 | 10954 | EBV-gp350-7A1 | 506 | 11196 | 748 | 11438 |
| EBV-gp350 | EBV-gp350-6G4 | 265 | 10955 | EBV-gp350-6G4 | 507 | 11197 | 749 | 11439 |
| INFLUEN ZA-A-Neuramida se | INFL-NA-1E01 | 266 | 10956 | INFL-NA-1E01 | 508 | 11198 | 750 | 11440 |
| EBV-LMP1 | EBV-LMP1-HLEA | 267 | 10957 | EBV-LMP1-HLEA | 509 | 11199 | 751 | 11441 |
| PSMA | PSMA-J591-ds75 | 268 | 10958 | PSMA-J591-ds75 | 510 | 11200 | 752 | 11442 |
| PSMA | hu-PSMA-J591 | 269 | 10959 | hu-PSMA-J591 | 511 | 11201 | 753 | 11443 |
| PSMA | hu-PSMA-2-J591 | 270 | 10960 | hu-PSMA-2-J591 | 512 | 11202 | 754 | 11444 |
| PSMA | hu-PSMA-J591 | 271 | 10961 | PSMA-J591-ds75 | 513 | 11203 | 755 | 11445 |
| PSMA | PSMA-J591-ds75 | 272 | 10962 | hu-PSMA-J591 | 514 | 11204 | 756 | 11446 |
| MUC1 | hu-MUC1-star2-MN-E6 | 273 | 10963 | hu-MUC1-star2-MN-E6 | 515 | 11205 | 757 | 11447 |
| MUC1 | MUC1-star-MN-E6 | 274 | 10964 | MUC 1-star-MN-E6 | 516 | 11206 | 758 | 11448 |
| MUC1 | hu-MUC1-star-MN-C2 | 275 | 10965 | hu-MUC1-star-MN-C2 | 517 | 11207 | 759 | 11449 |
| gpA33 | hu-gpA33-C825 | 276 | 10966 | hu-gpA33-C825 | 518 | 11208 | 760 | 11450 |
| MSLN | MSLN-7D10 | 277 | 10967 | MSLN-7D10 | 519 | 11209 | 761 | 11451 |
| MSLN | MSLN-7D9-HL | 278 | 10968 | MSLN-7D9-HL-Y27F | 520 | 11210 | 762 | 11452 |
| MSLN | MSLN-7D9-HL-V29L | 279 | 10969 | MSLN-7D9-HL | 521 | 11211 | 763 | 11453 |
| MSLN | MSLN-hu22A10 | 280 | 10970 | MSLN-hu22A10-F27Y | 522 | 11212 | 764 | 11454 |
| MSLN | MSLN-hu22A10-N31S | 281 | 10971 | MSLN-hu22A10 | 523 | 11213 | 765 | 11455 |
| MSLN | MSLN-hu22A10-Y96W | 282 | 10972 | MSLN-hu22A10 | 524 | 11214 | 766 | 11456 |

TABLE 4

| TARGET ANTIGEN | Va/Vd NAME | SEQ ID NO (DNA) | SEQ ID NO (PRT) | Vb-Vg NAME | SEQ ID NO (DNA) | SEQ ID NO (PRT) |
|---|---|---|---|---|---|---|
| MR1 | MC7G5-TCRa-Va | 963 | 11653 | MC7G5-TCRa-Vb | 964 | 11654 |
| NY-ESO-1/HLA-A201 | NY-ESO-1-IG4-Va | 965 | 11655 | NY-ESO-1-IG4-Vb | 966 | 11656 |
| CMV-pp65/HLA-A2 | CMV-pp65-TCR1-Va | 967 | 11657 | CMV-pp65-TCR1-Vb | 968 | 11658 |
| (E)-4-hydroxy-3-methyl-but-2-enyl pyrophosphate (HMB-PP) | TCR-Vd2 | 969 | 11659 | TCR-Vg9 | 970 | 11660 |
| NY-ESO-1/HLA-A02:01 | NY-ESO1-svd-TCR | 21563 | 22399 | | | |
| MAGE-A3-1/HLA-A02:01 | MAGE-A3-sVb-7 | 21564 | 22400 | | | |

TABLE 5

| Target Antigen | Name of Fragment | SEQ ID NO (DNA) | SEQ ID NO (PRT) |
|---|---|---|---|
| CEA and CEA | CD8SP-CEA-300-aVH-G3Sx2-CEA-3001-aVH | 816 | 11506 |
| CEA | CD8SP-CEA-300-aVH | 817 | 11507 |
| CD20 and CD22 | CD8SP-CD20-C07-vHH-G4S-CD22-FHVH-158 | 818 | 11508 |
| CD20 and CD22 | CD8SP-CD20-C07-vHH | 819 | 11509 |
| PSMA and PSMA | CD8SP-PSMA71-chVH-G4Sx3-PSMA28-chVH | 820 | 11510 |
| PSMA | CD8SP-PSMA71-chVH | 821 | 11511 |
| PSMA and PSMA | IgHSP-PSMA28v2-chVH-G4Sx2-PSMA71v2-chVH | 822 | 11512 |
| PSMA | IgHSP-PSMA28v2-chVH | 823 | 11513 |
| CD38 | CD8SP-CD38-309407-FHVH | 824 | 11514 |
| CD38 and CD38 | IgHSP-CD38-663-FHVH-SG4x2-CD38-986-FHVH | 825 | 11515 |
| CD38 | IgHSP-CD38-663-FHVH | 826 | 11516 |
| BCMA | CD8SP-BCMA-FHVH-33 | 827 | 11517 |
| BCMA | CD8SP-BCMA-FHVH-74 | 828 | 11518 |
| CD22 and BCMA | CD8SP-CD22-24-FHVH-G4S-BCMA-93-FHVH | 829 | 11519 |
| PSMA | PSMA71-chVH | 830 | 11520 |
| PSMA | PSMA28-chVH | 831 | 11521 |
| PSMA | PSMA28v2-chVH | 832 | 11522 |
| PSMA | PSMA71v2-chVH | 833 | 11523 |
| CD19 | CD19-vHH-048 | 834 | 11524 |
| CD20 | CD20-vHH-2HCD25 | 835 | 11525 |
| CD19 | CD19-FHVH-354 | 836 | 11526 |
| CD19 | CD19-FHVH-635 | 837 | 11527 |
| CD19 | CD19-USC1-FHVH-355 | 838 | 11528 |
| CD19 | CD 19-USC2-FHVH-63 6 | 839 | 11529 |
| CD20 | CD20-vHH-C07 | 840 | 11530 |
| CD20 | CD20-VHH-USC1 | 841 | 11531 |
| CD22 | CD22-FHVH-158 | 842 | 11532 |
| CD22 | CD22-FHVH-24 | 843 | 11533 |
| CD22 | CD22-USC1-FHVH-160 | 844 | 11534 |
| CD38 | CD38-FHVH-309407 | 845 | 11535 |
| CD38 | CD38-FHVH-309201 | 846 | 11536 |
| CD38 | CD38-FHVH-663 | 847 | 11537 |
| CD38 | CD38-FHVH-986 | 848 | 11538 |
| CD38 | CD38-USC1-FHVH-32184 | 849 | 11539 |
| CEA | CEA-aVH-300 | 850 | 11540 |
| CEA | CEA-aVH-3001 | 851 | 11541 |
| BCMA | BCMA-USC1-FHVH-94 | 852 | 11542 |
| BCMA | BCMA-USC2-FHVH-95 | 853 | 11543 |
| BCMA | BCMA-USC3-FHVH-96 | 854 | 11544 |
| BCMA | BCMA-USC4-FHVH-34 | 855 | 11545 |
| BCMA | BCMA-FHVH-33 | 856 | 11546 |
| BCMA | BCMA-FHVH-74 | 857 | 11547 |
| BCMA | BCMA-FHVH-93 | 858 | 11548 |
| Muc16 | MUC16-VHH-R3MU29 | 859 | 11549 |
| Muc16 | MUC16-vHH-R3MU5 -USC1 | 860 | 11550 |
| Muc16 | MUC 16-USC2-huR3MU30 | 861 | 11551 |
| IL13Ra2 | IL 13Ra2-vHH-USC2-C13 | 862 | 11552 |
| IL13Ra2 | IL13Ra2-huvHH-USC1-C1 | 863 | 11553 |
| Her2 | Her2-2D3-vHH | 864 | 11554 |
| Her2 | Her2-5F7-vHH | 865 | 11555 |
| Her2 | Her2-47D5-vHH | 866 | 11556 |
| Her3 | Her3-17B05So-vHH | 867 | 11557 |
| Her3 | Her3-21F06-vHH | 868 | 11558 |
| CEA | CEA1-vHH | 869 | 11559 |
| CEA | CEA5-vHH | 870 | 11560 |
| EGFR | EGFR-vHH | 871 | 11561 |
| EGFR | EGFR33-vHH | 872 | 11562 |
| cMet | cMET-171-vHH | 873 | 11563 |
| CXCR4 | CXCR4-2-vHH | 874 | 11564 |
| CXCR4 | CXCR4-1-vHH | 875 | 11565 |
| MSLN | SD1-vHH | 876 | 11566 |
| MSLN | SD2-vHH | 877 | 11567 |
| Albumin | Alb8-vHH | 878 | 11568 |
| CD123 | CD123-1-vHH | 879 | 11569 |
| CD123 | CD123-2-vHH | 880 | 11570 |
| IL6R | IL6R-304-vHH | 881 | 11571 |
| EGFR and CEA | EGFR-vHH-GS-CEA1-vHH | 882 | 11572 |
| EGFR and CEA | EGFR33-vHH-GS-CEA5-vHH | 883 | 11573 |
| Her2 and Her2 | Her2-5F7-vHH-GS-Linker-Her2-47D5-vHH | 884 | 11574 |
| Her2 and Her2 | Her2-Hu4D5-vL-GS-Linker-Her2-Hu4D5-vH | 885 | 11575 |
| Her3 and Her2 | Her3-17B05So-vHH-GS-Her2-2D3-vHH | 886 | 11576 |
| cMET and Her3 | cMET-171-vHH-GS -Her3-21 F06-vHH | 887 | 11577 |
| MSLN | SD1-vHH-GS-SD2-vHH | 888 | 11578 |
| BCMA | BCMA-vHH-353 | 889 | 11579 |
| BCMA | BCMA-vHH-917 | 890 | 11580 |
| BCMA and BCMA | BCMA353--vHH-Gly-Ser-Linker-BCMA917-vHH | 891 | 11581 |
| CD38 | CD38-vHH-717 | 892 | 11582 |
| BCMA | BCMA-346-vHH-(BCMA-vHH-346) | 893 | 11583 |
| CD38 and BCMA | CD38-717-vHH-Ecoil-BCMA-346-vHH | 894 | 11584 |
| BCMA | BCMA-vHH-348 | 895 | 11585 |
| CD38 | CD38-vHH-331 | 896 | 11586 |
| BCMA and CD38 | BCMA-348-vHH-Ecoil-CD38-331-vHH | 897 | 11587 |
| CD19 | CD19-vHH | 898 | 11588 |
| CD20 | CD20-vHH | 899 | 11589 |
| CD 19 and CD20 | CD19-vHH-Gly-Ser-Linker-CD20-vHH | 900 | 11590 |
| BCMA | BCMA-vHH-948 | 901 | 11591 |
| BCMA | BCMA-vHH-972 | 902 | 11592 |

TABLE 6

| Target Antigen | Name of fragment | SEQ ID NO (DNA) | SEQ ID NO (PRT) |
|---|---|---|---|
| CEA | CEA-300-aVH | 954 | 11644 |
| CEA | CEA-301-aVH | 955 | 11645 |

TABLE 7

| Target Antige n | Name of fragment | SEQ ID NO (DN A) | SEQ ID NO (PRT) | Target Antigen | Name of fragment | SEQ ID NO (DN A) | SEQ ID NO (PRT) |
|---|---|---|---|---|---|---|---|
| Her2 | Her2-DARPIN-1 | 972 | 11662 | PSMA | PSMA-Centyrin-2 | 978 | 11668 |
| Her2 | Her2-DARPIN-2 | 973 | 11663 | PSMA | PSMA-Centyrin-3 | 979 | 11669 |
| Her3 | Her3-affi | 974 | 11664 | EGFR | EGFR-Centyrin | 980 | 11670 |
| Her2 | Her2-affi | 975 | 11665 | cMET | cMET-Centyrin | 981 | 11671 |
| EGFR | EGFR-affi | 976 | 11666 | EGFR and cMET | EGFR-cMET-Cent | 982 | 11672 |
| PSMA | PSMA-Centyrin-1 | 977 | 11667 | BCMA | BCMA-Centyrin | 983 | 11673 |

TABLE 8

| Name of fragment | SEQ ID NO (DNA) | SEQ ID NO (PRT) |
|---|---|---|
| ACE2-ECD | 984 | 11674 |
| hCD 19-Extracellular-Domain-minus-signal-peptide | 985 | 11675 |
| hMPL-Extracellular-Domain-with-signal-peptide | 986 | 11676 |
| CD8-SP-PD1-opt-ECD | 987 | 11677 |
| PD1 -opt-ECD-minus-signal-peptide | 988 | 11678 |
| PD 1-ECD-with-native-Signal-Peptide | 989 | 11679 |
| CTLA4-opt-ECD-with-signal-peptide | 990 | 11680 |
| NKG2D-ECD-minus-signal-peptide | 991 | 11681 |
| CD4-ECD-with-signal-peptide | 992 | 11682 |
| DC-SIGN-minus-signal-peptide | 993 | 11683 |
| CD 16A-V 15 8-ECD-v 1-minus-signal-peptide | 994 | 11684 |
| CD 16A-V 15 8-ECD-v2-minus-signal-peptide | 995 | 11685 |
| dc-Avidin-minus-signal-peptide | 996 | 11686 |
| Desmoglein-3-(Dsg3)-ECD | 997 | 11687 |
| CD8SP-NKG2D | 998 | 11688 |
| CD8SP-NKG2D-GS-NKG2D-(Dimer) | 999 | 11689 |
| NKG2D | 1000 | 11690 |
| COVID-19-Spike-gp-RBD | 1001 | 11691 |

TABLE 9

| Name of fragment | SEQ ID NO (DNA) | SEQ ID NO (PRT) |
|---|---|---|
| LH-beta-with-Signal-Peptide | 1002 | 11692 |
| mTPO(1-187) | 1003 | 11693 |
| CGH-alpha-minus-Signal-Peptide | 1004 | 11694 |
| CGH-beta-with-Signal-Peptide | 1005 | 11695 |
| FSH-beta-minus-Signal-Peptide | 1006 | 11696 |
| LH-beta-with-Signal-Peptide | 1007 | 11697 |
| TSH-beta-with-Signal-Peptide | 1008 | 11698 |
| SP-CGHb-Gly-Ser-Linker-CGHa | 1009 | 11699 |
| CD8SP-FSHb-Gly-Ser-Linker-CGHa | 1010 | 11700 |
| SP-LHb-Gly-Ser-Linker-CGHa | 1011 | 11701 |
| SP-TSHb-Gly-Ser-Linker-CGHa | 1012 | 11702 |

TABLE 10

| Name of fragment | SEQ ID NO (DNA) | SEQ ID NO (PRT) |
|---|---|---|
| CD8SP-BCMA-FHVH93-GS-ULBP2R | 1013 | 11703 |
| RZIP | 1014 | 11704 |
| EZIP | 1015 | 11705 |
| E4 | 1016 | 11706 |
| K4 | 1017 | 11707 |
| NKG2D-AF | 1018 | 11708 |
| NKG2D-YA | 1019 | 11709 |
| NKG2D-AF-G4Sx3-NKG2D-AF | 1020 | 11710 |
| NKG2D-YA-G4Sx3-NKG2D-YA | 1021 | 11711 |
| ULBP2R | 1022 | 11712 |
| ULBP2-S3 | 1023 | 11713 |
| CD8SP-BCMA-FHVH93-GS-ULBP2-S3 | 1041 | 11731 |

TABLE 11

Exemplary Linkers

| Name of fragment | SEQ ID NO (DNA) | SEQ ID NO (PRT) |
|---|---|---|
| G4Sx3 | 1024 | 11714 |
| G4S | 1025 | 11715 |
| G3Sx2 | 1026 | 11716 |
| G4Sx2 | 1027 | 11717 |
| G4Sx3 | 1028 | 11718 |
| Myc-(P)-TAG | 1029 | 11719 |
| MYC2-TAG | 1030 | 11720 |
| MYC4-TAG | 1031 | 11721 |
| V5-TAG | 1032 | 11722 |
| HA-TAG | 1033 | 11723 |
| HIS-TAG | 1034 | 11724 |
| AVI-TAG-delta-GSG | 1035 | 11725 |
| G4Sx2-TAG | 1036 | 11726 |
| G4Sx2-TAG | 1037 | 11727 |
| StrepTagII | 1038 | 11728 |
| StrepTagII | 1039 | 11729 |
| FLAG-TAG | 1040 | 11730 |
| G4Sx3 | 1041 | 11731 |

TABLE 12

| Name of fragment | SEQ ID NO (DNA) | SEQ ID NO (PRT) |
|---|---|---|
| hTCR-alpha-constant | 1042 | 11732 |
| hTCRa-WT | 1043 | 11733 |
| hTCRa-CSDVP | 1044 | 11734 |
| hTCRa-opt2 | 1045 | 11735 |
| hTCRa-opt3 | 1046 | 11736 |
| hTCRa-T48C-opt (or hTCRa-T48C or hTCRα-T48C) | 1047 | 11737 |
| hTCRa-T48C-opt1 | 1048 | 11738 |
| hTCRa-SDVP | 1049 | 11739 |
| hTCRa-S61R | 1050 | 11740 |
| hTCRa-SDVPR | 1051 | 11741 |
| hTCRa-SD | 1052 | 11742 |
| hTCRaECD-CD3zECDTMCP-opt2 | 1053 | 11743 |
| mTCRa-opt | 1054 | 11744 |
| caninetc. Ra-opt (cTCRa-opt) | 1055 | 11745 |
| hTCR-b 1 -constant-region | 1056 | 11746 |
| hTCR-b2-constant-region | 1057 | 11747 |
| hTCRb-WT | 1058 | 11748 |
| hTCRb-S57C-opt1 | 1059 | 11749 |
| hTCRb-KACIAH | 1060 | 11750 |
| hTCRb-opt2 | 1061 | 11751 |
| hTCRb-opt2-deltaE | 1062 | 11752 |
| hTCRb-opt3 | 1063 | 11753 |
| hTCRb-opt4 | 1064 | 11754 |
| hTCRb-KAIAH | 1065 | 11755 |
| hTCRb-K1 8A22 | 1066 | 11756 |
| hTCRb-K18I133 | 1067 | 11757 |
| hTCRb-K18A136 | 1068 | 11758 |
| hTCRb-K18H139 | 1069 | 11759 |
| hTCRb-R1 8A22 | 1070 | 11760 |
| hTCRb-R18 | 1071 | 11761 |
| hTCRb-KAIAHG | 1072 | 11762 |
| hTCRb-KAG | 1073 | 11763 |
| hTCRb-R79G | 1074 | 11764 |
| mTCRb-opt | 1075 | 11765 |
| caninetc.Rb-opt (cTCRb-opt) | 1076 | 11766 |
| hTCRbECD-CD3zECDTMCP-opt | 1077 | 11767 |
| pretc.Ra_gb_U38996.1 | 1078 | 11768 |
| pretc.Ra | 1079 | 11769 |
| pretc.Ra-del48 | 1080 | 11770 |
| hTCR-gamma | 1081 | 11771 |
| hTCR-Gamma-Opt | 1082 | 11772 |
| hTCR-Delta | 1083 | 11773 |
| hTCR-Delta-Opt | 1084 | 11774 |
| hTCRa-opt2-Del | 1085 | 11775 |
| hTCRb-RC | 1086 | 11776 |
| hTCRb-RAC | 1087 | 11777 |
| CD3zECDTM-opt | 1088 | 11778 |
| CD3zECDTMCP-opt | 1089 | 11779 |
| CD3zECDTM-28z-opt | 1099 | 11789 |
| CD3zECDTM-BBz-opt | 1100 | 11790 |
| CD3zECDTM-28z-opt2 | 1101 | 11791 |
| CD3zECDTM-BBz-opt2 | 1102 | 11792 |
| hTCRa-T48C-opt-d4 | 1103 | 11793 |
| hTCRa-T48C-opt-d6 | 1104 | 11794 |
| hTCRa-T48C-opt-d10 | 1105 | 11795 |
| hTCRa-T48C-opt-d13 | 1106 | 11796 |
| hTCRa-T48C-opt-d17 | 1107 | 11797 |
| hTCRa-T48C-opt-d26 | 1108 | 11798 |
| hTCRa-T48C-opt-d32 | 1109 | 11799 |
| hTCRa-T48C-opt-d46 | 1110 | 11800 |
| hTCRa-wt2-opt-d52 | 1111 | 11801 |
| TCRa-wt2-opt-6MD | 1112 | 11802 |
| TCRa-wt2-opt-7MD | 1113 | 11803 |
| hTCRb-S57C-opt1 (or hTCRb-S57C or hTCRβ-S57C) | 1114 | 11804 |
| hTCRb-S57C-opt1-d2 (hTCRb-d2) | 1115 | 11805 |
| hTCRb-S57C-opt1-d4 (hTCRb-d4) | 1116 | 11806 |
| hTCRb-S57C-opt1-d6 (hTCRb-d6) | 1117 | 11807 |
| hTCRb-S57C-opt1-d9 (hTCRb-d9) | 1118 | 11808 |
| hTCRb-S57C-opt1-d14 (hTCRb-d14) | 1119 | 11809 |
| hTCRb-S57C-opt1-d17 (hTCRb-d17) | 1120 | 11810 |
| hTCRb-S57C-opt1-d29 (hTCRb-d29) | 1121 | 11811 |
| hTCRb-S57C-opt1-d41(hTCRb-d41) | 1122 | 11812 |
| hTCRb-S57C-opt1-d50 (hTCRb-d50) | 1123 | 11813 |
| hTCRb-S57C-opt1-d55 (hTCRb-d55) | 1124 | 11814 |
| hTCRb-S57C-opt1-d63 (hTCRb-d63) | 1125 | 11815 |
| TCRb-wt2-opt-6MD | 1126 | 11816 |
| TCRb-wt2-opt-7MD | 1127 | 11817 |
| hTCRg-Opt | 1128 | 11818 |
| hTCRg-Opt-d5 | 1129 | 11819 |
| hTCRg-Opt-d7 | 1130 | 11820 |
| hTCRg-Opt-d12 | 1131 | 11821 |
| TCRg-6MD | 1132 | 11822 |
| TCRg-7MD | 1133 | 11823 |
| hTCRd-Opt | 1134 | 11824 |
| hTCRd-opt-d2 | 1135 | 11825 |
| hTCRd-opt-d6 | 1136 | 11826 |
| hTCRd-opt-d8 | 1137 | 11827 |
| hTCRd-opt-d13 | 1138 | 11828 |
| TCRd-6MD | 1139 | 11829 |
| TCRd-7MD | 1140 | 11830 |

TABLE 13

Ig Linker Domain derived from antibodies and TCR

| Name of fragment | SEQ ID NO (DNA) | SEQ ID NO (PRT) |
|---|---|---|
| IgCL | 1142 | 11832 |
| IgG1-CH1 | 1143 | 11833 |
| IgG1-CH1-DeltaC | 1144 | 11834 |
| IgG1-CH1-Hinge | 1145 | 11835 |
| IgG1-CH1-v2 | 1146 | 11836 |
| IgG1-CH1-DeltaC-v2 | 1147 | 11837 |
| IgG1-CH1-Hinge-v2 | 1148 | 11838 |
| IgG2-0C-CH1 | 1149 | 11839 |
| IgG2-IC-CHI1 | 1150 | 11840 |
| IgG3-CHI1 | 1151 | 11841 |
| IgG4-CHI1 | 1152 | 11842 |
| IgAI-CHI1 | 1153 | 11843 |
| IgA2-CHI1 | 1154 | 11844 |
| IgD-CHI1 | 1155 | 11845 |
| IgE-CHI1 | 1156 | 11846 |
| IgM-CHI1 | 1157 | 11847 |
| TCRa-wt-opt-6ECD | 1158 | 11848 |
| TCRa-wt-opt-7ECD | 1159 | 11849 |
| TCRb-wt-opt-6ECD | 1160 | 11850 |
| TCRb-wt-opt-ECD-7ECD | 1161 | 11851 |
| TCRg-opt-6ECD | 1162 | 11852 |
| TCRg-opt-7ECD | 1163 | 11853 |
| TCRd-opt-6ECD | 1164 | 11854 |
| TCRd-opt-ECD-7ECD | 1165 | 11855 |
| TCRb-wt-opt-8ECD | 1166 | 11856 |
| TCRa-wt-opt-8ECD | 1167 | 11857 |
| TCRa-Ig-Like-C1-Domain-6MD | 1168 | 11858 |
| TCRa-Ig-Like-C1-Domain | 1169 | 11859 |
| TCRb-Ig-Like-C1-Domain-6MD | 1170 | 11860 |
| TCRb-Ig-Like-C1-Domain | 1171 | 11861 |
| TCR-Ig-Like-C1-Domain-6MD | 1172 | 11862 |
| TCRg-Ig-Like-C1-Domain | 1173 | 11863 |
| TCRd-Ig-Like-C1 -Domain | 1174 | 11864 |
| TCRd-Ig-Like-C1-Domain-6MD | 1175 | 11865 |

TABLE 14

Exemplary Connecting Peptides

| Name of fragment | SEQ ID NO (DNA) | SEQ ID NO (PRT) |
|---|---|---|
| TCRa-Connecting-Peptide-MD | 1177 | 11867 |
| TCRa-Connecting-Peptide | 1178 | 11868 |
| TCRa-Connecting-Peptide-MD | 1179 | 11869 |
| TCRa-Connecting-Peptide | 1180 | 11870 |
| TCRa-Connecting-Peptide-MD | 1181 | 11871 |
| TCRa-Connecting-Peptide | 1182 | 11872 |
| TCRa-Connecting-Peptide-MD | 1183 | 11873 |
| TCRa-Connecting-Peptide | 1184 | 11874 |
| CD3z-connecting-peptide | 1185 | 11875 |

TABLE 15

Exemplary TCR Transmembrane Domains

| Name of fragment | SEQ ID NO (DNA) | SEQ ID NO (PRT) |
|---|---|---|
| TCRa-Transmembrane-Domain | 1187 | 11877 |
| TCRb-Transmembrane-Domain | 1188 | 11878 |
| TCRg-Transmembrane-Domain | 1189 | 11879 |
| TCRd-Transmembrane-domain | 1190 | 11880 |
| CD3z-transmembrane-domain | 1191 | 11881 |

TABLE 16

TCR Cytosolic Domains

| Name of fragment | SEQ ID NO (DNA) | SEQ ID NO (PRT) |
|---|---|---|
| TCRa-Cytosolic-Domain | 1193 | 11883 |
| TCRb-Cytosolic-Domain | 1194 | 11884 |
| TCRg-Cytosolic-Domain | 1195 | 11885 |
| CD3z-Cytosolic-Domain | 1196 | 11886 |

TABLE 17

| Name of fragment | SEQ ID NO (DNA) | SEQ ID NO (PRT) |
|---|---|---|
| IgG1-Hinge | 1198 | 11888 |
| IgG2-Hinge | 1199 | 11889 |
| IgG1-CD28-spacer | 1200 | 11890 |
| IgG1-4-1BB-spacer | 1201 | 11891 |
| IgG4-(Hi-CH2-CH3)-spacer | 1202 | 11892 |
| lgG4-(Hi-CH3)-spacer | 1203 | 11893 |
| IgG4(Hi)-spacer | 1204 | 11894 |

TABLE 18

Miscellaneous Domains

| Name of fragment | SEQ ID NO (DNA) | SEQ ID NO (PRT) ) | Name of fragment | SEQ ID NO (DNA) | SEQ ID NO (PRT) |
|---|---|---|---|---|---|
| CD3z-cytosolic-domain | 1206 | 11896 | CD3zECDTM-opt2 | 1094 | 11784 |
| CD3z-cytosolic-domain | 1207 | 11897 | CD3zCP-opt2 | 1095 | 11785 |
| 4-1BB-cytosolic-domain | 1208 | 11898 | CD3zECDTMCP-opt2 | 1096 | 11786 |
| hCD8-Hinge-TM | 1209 | 11899 | CD28-CP-opt2 | 1097 | 11787 |
| hCD8-Hinge-TM-BBz | 1210 | 11900 | 41BB-CP-opt2 | 1098 | 11788 |
| hCD8TM-Hinge-BB | 1211 | 11901 | CD3e-ECD-opt2 | 23320 | 23329 |
| CD28-HingeTMCP | 1212 | 11902 | CD3d-ECD-opt2 | 23321 | 23330 |
| CD3d-ECDTMCP-opt2 | 1213 | 11903 | CD3g-ECD-opt2 | 23322 | 23331 |
| CD3eECDTMCP-opt2 | 1214 | 11904 | CD3e-TM-opt2 | 23323 | 23332 |
| CD3g-ECDTMCP-opt2 | 1215 | 11905 | CD3d-TM-opt2 | 23324 | 23333 |
| CD3zECDTMCP-opt2 | 1216 | 11906 | CD3g-TM-opt2 | 23325 | 23334 |
| CD3zECDTMCP-opt | 1090 | 11780 | CD3e-CP-opt2 | 23326 | 23335 |
| CD28-CP-opt | 1091 | 11781 | CD3d-CP-opt2 | 23327 | 23336 |
| 41BB-CP-opt | 1092 | 11782 | CD3g-CP-opt2 | 23328 | 23337 |
| CD3e-CP-opt | 1093 | 11783 | | | |

TABLE 19

Protease Cleavable Linkers

| Name of fragment | SEQ ID NO (DNA) | SEQ ID NO (PRT) |
|---|---|---|
| MMP14 | 1218 | 11908 |
| MMP14 | 1219 | 11909 |
| MMP14 | 1220 | 11910 |
| MMP2-or-MMP9 | 1221 | 11911 |
| MMP2-or-MMP9 | 1222 | 11912 |
| MMP1-or-MMP8 | 1223 | 11913 |
| MMP1-or-MMP8 | 1224 | 11914 |
| MMP1-or-MMP8 | 1225 | 11915 |
| MMP1-or-MMP8 | 1226 | 11916 |
| MMP3 | 1227 | 11917 |
| MMP3 | 1228 | 11918 |
| MMP7 | 1229 | 11919 |
| MMP7 | 1230 | 11920 |
| MMP9 | 1231 | 11921 |

TABLE 20

Self Cleavable Linkers

| Name of fragment | SEQ ID NO (DNA) | SEQ ID NO (PRT) |
|---|---|---|
| F2A | 1233 | 11923 |
| T2A | 1234 | 11924 |
| T2A | 1235 | 11925 |
| P2A | 1236 | 11926 |
| PSa-variant | 1237 | 11927 |
| E2A | 1238 | 11928 |
| SGSG | 1239 | 11929 |
| SGSG | 1240 | 11930 |
| FURINE-CLEAVAGE-SITE | 1241 | 11931 |
| FURINE-CLEAVAGE-SITE | 1242 | 11932 |
| FURINE-Cleavage-Site | 1243 | 11933 |

TABLE 21

scFv-Nluc (Malibu Glo Reagents)

| Name of fragment | SEQ ID NO (DNA) | SEQ ID NO (PRT) |
|---|---|---|
| CD8SP-FMC63-(vL-vH)-GGSG-NLuc-4xFLAG-x2STREP-8xHis-T2A-PAC | 1245 | 11935 |
| CD8SP-huFMC63-11-(vL-vH)-GGSG-NLuc-4xFLAG-x2STREP-8xHis-T2A-PAC | 1246 | 11936 |
| CD8SP-BCMA-J6M0-(vL-vH)-GGSG-NLuc-4xFLAG-x2STREP-8xHis-T2A-PAC | 1247 | 11937 |
| CD8SP-BCMA-huC12A3-L3H3-(vL-vH)-GGSG-NLuc-4xFLAG-x2STREP-8xHis-T2A-PAC | 1248 | 11938 |
| CD8SP-CD20-2F2-(vL-vH)-GGSG-NLuc-4xFLAG-x2STREP-8xHis-T2A-PAC | 1249 | 11939 |

TABLE 22

SVH-N-Luc

| Target | Name of fragment | SEQ ID NO (DNA) | SEQ ID NO (PRT) |
|---|---|---|---|
| CEA | CD8SP-CEA-300-aVH-G3Sx2-CEA-3001-aVH-NLuc-4xFlag-2xStreptag-8xHis-T2A-Pac | 1265 | 11955 |
| CEA | CD8SP-CEA-300-aVH-GGSG-NLuc-4xFlag-2xStreptag-8xHis-T2A-Pac | 1266 | 11956 |
| CD20 | CD8SP-CD20-C07-vHH-G4S-CD22-FHVH-158-NLuc-4xFlag-2xStreptag-8xHis-T2A-Pac | 1267 | 11957 |
| CD20 | CD8SP-CD20-C07-VH-GGSG-NLuc-4xFlag-2xStreptag-8xHis-T2A-Pac | 1268 | 11958 |
| PSMA | CD8SP-PSMA71-chVH-G4Sx3-PSMA28-chVH-NLuc-4xFlag-2xStreptag-8xHis-T2A-Pac | 1269 | 11959 |
| PSMA | CD8SP-PSMA71-chVH-GGSG-NLuc-4xFlag-2xStreptag-8xHis-T2A-Pac | 1270 | 11960 |
| PSMA | IgHSP-PSMA28v2-chVH-G4Sx2-PSMA71v2-chVH-NLuc-4xFlag-2xStreptag-8xHis-T2A-Pac | 1271 | 11961 |
| PSMA | IgHSP-PSMA28v2-chVH-GGSG-NLuc-4xFlag-2xStreptag-8xHis-T2A-Pac | 1272 | 11962 |
| CD38 | CD8SP-CD38-309407-FHVH-GGSG-NLuc-4xFlag-2xStreptag-8xHis-T2A-Pac | 1273 | 11963 |
| CD38 | IgHSP-CD38-663-FHVH-SG4x2-CD38-986-FHVH-NLuc-4xFlag-2xStreptag-8xHis-T2A-Pac | 1274 | 11964 |
| CD38 | IgHSP-CD38-663-FHVH-GGSG-NLuc-4xFlag-2xStreptag-8xHis-T2A-Pac | 1275 | 11965 |
| BCMA | CD8SP-BCMA-33-FHVH-GGSG-NLuc-4xFlag-2xStreptag-8xHis-T2A-Pac | 1276 | 11966 |
| BCMA | CD8SP-BCMA-74-FHVH-GGSG-NLuc-4xFlag-2xStreptag-8xHis-T2A-Pac | 1277 | 11967 |
| CD22 | CD8SP-CD22-24-FHVH-G4S 1-BCMA-93-FHVH-NLuc-4xFlag-2xStreptag-8xHis-T2A-Pac | 1278 | 11968 |

TABLE 23

Extracellular-Domain-Nluc (ECD-Nluc)

| Antigen | Name of fragment | SEQ ID NO (DNA) | SEQ ID NO (PRT) |
|---|---|---|---|
| MPL | MPL-ECD-GGSG-Nluc-AcV5 | 1280 | 11970 |
| CD19 | FLAG-CD19-ECD-GGS G-NLuc-AcV5 | 1281 | 11971 |
| CD19 | CD19-ECD-GGSG-NLuc-4xFlag-2xStreptag-8xHis-T2A-Pac | 1282 | 11972 |
| CD33 | CD33-ECD-GGSG-NLuc-4xFlag-2xStreptag-8xHis-T2A-Pac | 1283 | 11973 |
| CD33 | CD33-ECD-GGSG-Tluc16-4xFlag-2xStreptag-8xHis-T2A-Pac | 1284 | 11974 |
| CD33 | CD33-ECD-PaLucl-HA-Streptag-3xHA-8xHis-T2A-pac | 1285 | 11975 |
| CD33 | CD33-ECD-Htanneri-Luc-x3Flag | 1286 | 11976 |
| CD138 | CD 1 38-ECD-GGSG-NLuc-4xFlag-2xStreptag-8xHis-T2A-Pac | 1287 | 11977 |
| CD123 | CD123-ECD-GGSG-NLuc-4xFlag-2xStreptag-8xHis-T2A-Pac | 1288 | 11978 |
| CDH1 | CDH1 -ECD-GGSG-NLuc-4xFlag-2xStreptag-8xHis-T2A-Pac | 1289 | 11979 |
| CD200R | CD200R-ECD-GGSG-NLuc-4xFlag-2xStreptag-8xHis-T2A-Pac | 1290 | 11980 |
| GPNMB | GPNMB-ECD-GGSG-NLuc-4xFlag-2xStreptag-8xHis-T2A-Pac | 1291 | 11981 |
| PTK7 | PTK7-ECD-GGSG-NLuc-4xFlag-2xStreptag-8xHis-T2A-Pac | 1292 | 11982 |
| CD34 | CD34-ECD-GGSG-NLuc-4xFlag-2xStreptag-8xHis-T2A-Pac | 1293 | 11983 |
| EpCAM | EpCAM-ECD-GGSG-NLuc-4xFlag-2xStreptag-8xHis-T2A-Pac | 1294 | 11984 |
| CLEC12A | CLEC12A-ECD-GGSG-NLuc-4xFlag-2xStreptag-8xHis-T2A-Pac | 1295 | 11985 |
| CD20 | CD20-ECx2-ECD-GGSG-TLuc16-4xFlag-2xStreptag-8xHis-T2A-Pac | 1296 | 11986 |
| CD20 | CD20-ECx1-ECD-GGSG-TurboLuc16-4xFlag-2xStreptag-8xHis-T2A-Pac | 1297 | 11987 |
| CD22 | CD22v5-ECD-GGSG-NLuc-4xFlag-2xStreptag-8xHis-T2A-Pac | 1298 | 11988 |
| TSHR | TSHR-ECD-GGSG-NLuc-4xFlag-2xStreptag-8xHis-T2A-Pac | 1299 | 11989 |
| EGFRviii | EGFRviii-ECD-GGSG-NLuc-4xFlag-2xStreptag-8xHis-T2A-Pac | 1300 | 11990 |
| SLAMF7 | SLAMF7-CS 1 -ECD-GGSG-NLuc-4xFlag-2xStreptag-8xHis-T2A-Pac | 1301 | 11991 |
| PD1 | PD1-ECD-GGSG-NLuc-4xFlag-2xStreptag-8xHis-T2A-Pac | 1302 | 11992 |
| CTLA4 | CTLA4-opt-ECD-NLuc-4xFLAG-x2STREP-8xHis-T2A-PAC | 1303 | 11993 |
| NKG2D | CD8SP-NKG2D-ECD-4xFLAG-x2STREP-8xHis-T2A-PAC | 1304 | 11994 |
| PSMA | CD8SP-PSMA-ECD-4xFLAG-x2STREP-8xHis-T2A-PAC | 1305 | 11995 |
| BCMA | CD8SP-BCMA-ECD-GGSG-NLuc-4xFlag-2xStreptag-8xHis-T2A-Pac | 1306 | 11996 |

TABLE 24

Therapeutic Controls

| Name of fragment | SEQ ID NO (DNA) | SEQ ID NO (PRT) |
|---|---|---|
| PuroR_ Variant-(PAC) | 1308 | 11998 |
| BlastR | 1309 | 11999 |
| CNB30 | 1310 | 12000 |
| GMCSF-SP-tEGFR | 1311 | 12001 |
| tEGFRviii | 1312 | 12002 |
| tCD19 | 1313 | 12003 |
| tBCMA | 1314 | 12004 |
| K13 | 1315 | 12005 |
| MC159 | 1316 | 12006 |
| K13-opt | 1317 | 12007 |
| icaspase-9 | 1318 | 12008 |
| IGHSP2-IL6R-304-VHH-ALB8-VHH | 1319 | 12009 |
| CD8SP2-PD1-4H1-scFv | 1320 | 12010 |
| CD8SP2-PD1-5C4-scFv | 1321 | 12011 |
| CD8SP2-CTLA4-Ipilimumab-scFv | 1322 | 12012 |
| CD8SP2-PD1-4H1-Alb8-vHH | 1323 | 12013 |
| CD8SP2-PD1-SC4-Alb8-vHH | 1324 | 12014 |
| CD8SP2-CTLA4-Ipilimumab-Alb8-vHH | 1325 | 12015 |
| IgSP-IL6-19A-scFV | 1326 | 12016 |
| IgSP-Fx06 | 1327 | 12017 |
| FKBP-K13 | 1328 | 12018 |
| FKBPX2-K13 | 1329 | 12019 |

TABLE 25

Bispecific SIR Constructs Targeting CD19 and a second antigen targeted by SIR

| SIR TARGET | Name of fragment | SEQ ID NO (DNA) | SEQ ID NO (PRT) |
|---|---|---|---|
| CD19 | CD8SP-CD 19-FHVH-354-G4S3-FMC63-vL-[hTCRb-S57C-opt]-F-P2A-SP-FMC63-vH-[hTCRa-T48C-opt] | 1849 | 12539 |
| CD19 | CD8SP-CD19-FHVH-354-G4S3-huFMC63-11-vL-[hTCRb-S57C-opt]-F-P2A-SP-huFMC63-11-vH-[hTCRa-T48C-opt] | 1850 | 12540 |
| CD19 | CD8SP-CD19-FHVH-354-G4S3-CD19Bu12-vL-[hTCRb-S57C-opt]-F-P2A-SP-CD19Bu12-H-[hTCRa-T48C-opt] | 1851 | 12541 |
| HIV1-gp100 | CD8SP-CD19-FHVH-354-G4S3-HIV1-N6-vL-[hTCRb-S57C-opt]-F-P2A-SP-HIV1-N6-vH-[hTCRa-T48C-opt] | 1852 | 12542 |
| ALK | CD8SP-CD19-FHVH-354-G4S3-Alk-48-vL-[hTCRb-S57C-opt]-F-P2A-SP-Alk-48-vH-[hTCRa-T48C-opt] | 1853 | 12543 |
| ALK | CD8SP-CD19-FHVH-354-G4S3-Alk-58-vL-[hTCRb-S57C-opt]-F-P2A-SP-Alk-58-vH-[hTCRa-T48C-opt] | 1854 | 12544 |
| CD45 | CD8SP-CD 19-FHVH-354-G4S3-BC8-CD45-vL-[hTCRb-S57C-opt]-F-P2A-SP-BC8-CD45-vH-[hTCRa-T48C-opt] | 1855 | 12545 |
| BCMA | CD8SP-CD19-FHVH-354-G4S3-BCMA-J6M0-vL-[hTCRb-S57C-opt]-F-P2A-SP-BCMA-J6M0-vH-[hTCRa-T48C-opt] | 1856 | 12546 |
| BCMA | CD8SP-CD19-FHVH-354-G4S3 -BCMA-huC12A3-L3H3-vL-[hTCRb-S57C-opt]-F-P2A-SP-BCMA-huC12A3-L3H3-vH-[hTCRa-T48C-opt] | 1857 | 12547 |
| BCMA | CD8SP-CD 19-FHVH-354-G4S3-BCMA-ET-40-vL-[hTCRb-S57C-opt]-F-P2A-SP-BCMA-ET-40-vH-[hTCRa-T48C-opt] | 1858 | 12548 |
| BCMA | CD8SP-CD 19-FHVH-354-G4S3-BCMA-ET-54-vL-[hTCRb-S57C-opt]-F-P2A-SP-BCMA-ET-54-vH-[hTCRa-T48C-opt] | 1859 | 12549 |
| CCR4 | CD8SP-CD19-FHVH-354-G4S3-CCR4-humAb1567-vL-[hTCRb-S57C-opt]-F-P2A-SP-CCR4-humAb1567-vH-[hTCRa-T48C-opt] | 1860 | 12550 |
| CD5 | CD8SP-CD19-FHVH-354-G4S3-CD5-9-vL-[hTCRb-S57C-opt]-F-P2A-SP-CD5-9-vH-[hTCRa-T48C-opt] | 1861 | 12551 |
| CD5 | CD8SP-CD19-FHVH-354-G4S3-CD5-18-vL-[hTCRb-S57C-opt]-F-P2A-SP-CD5-18-vH-[hTCRa-T48C-opt] | 1862 | 12552 |
| CD20 | CD8SP-CD19-FHVH-354-G4S3-CD20-2F2-vL-[hTCRb-S57C-opt]-F-P2A-SP-CD20-2F2-vH-[hTCRa-T48C-opt] | 1863 | 12553 |
| CD20 | CD8SP-CD19-FHVH-354-G4S3-CD20-GA101-vL-[hTCRb-S57C-opt]-F-P2A-SP-CD20-GA101-vH-[hTCRa-T48C-opt] | 1864 | 12554 |
| CD22 | CD8SP-CD19-FHVH-354-G4S3-CD22-h10F4v2-vL-[hTCRb-S57C-opt] -F-P2A-SP-CD22-h1 0F4v2-vH-[hTCRa-T48C-opt] | 1865 | 12555 |
| CD276 | CD8SP-CD19-FHVH-354-G4S3-CD22-m971-vL-[hTCRb-S57C-opt]-F-P2A-SP-CD22-m971-vH-[hTCRa-T48C-opt] | 1866 | 12556 |
| CD30 | CD8SP-CD19-FHVH-354-G4S3-CD30-SF11-vL-[hTCRb-S57C-opt]-F-P2A-SP-CD30-5F11-vH-[hTCRa-T48C-opt] | 1867 | 12557 |
| CD30 | CD8SP-CD19-FHVH-354-G4S3-CD30-Ac10-vL-[hTCRb-S57C-opt]-F-P2A-SP-CD30-Ac10-vH-[hTCRa-T48C-opt] | 1868 | 12558 |
| CD32 | CD8SP-CD19-FHVH-354-G4S3-CD32-Med9-vL-[hTCRb-S57C-opt]-F-P2A-SP-CD32-Med9-vH-[hTCRa-T48C-opt] | 1869 | 12559 |
| CD33 | CD8SP-CD19-FHVH-354-G4S3-CD33-AF5-vL-[hTCRb-S57C-opt]-F-P2A-SP-CD33-AF5-vH-[hTCRa-T48C-opt] | 1870 | 12560 |
| CD33 | CD8SP-CD19-FHVH-354-G4S3-CD33-huMyc9-vL-[hTCRb-S57C-opt]-F-P2A-SP-CD33-huMyc9-vH-[hTCRa-T48C-opt] | 1871 | 12561 |
| CD34 | CD8SP-CD19-FHVH-354-G4S3-CD34-hu4C7-vL-[hTCRb-S57C-opt]-F-P2A-SP-CD34-hu4C7-vH-[hTCRa-T48C-opt] | 1872 | 12562 |
| CD44v6 | CD8SP-CD19-FHVH-354-G4S3-CD44v6-Biwa8-vL-[hTCRb-S57C-opt]-F-P2A-SP-CD44v6-Biwa8-vH-[hTCRa-T48C-opt] | 1873 | 12563 |
| CD70 | CD8SP-CD19-FHVH-354-G4S3-CD70-h1F6-vL-[hTCRb-S57C-opt]-F-P2A-SP-CD70-h1F6-vH-[hTCRa-T48C-opt] | 1874 | 12564 |
| CD79b | CD8SP-CD 19-FHVH-354-G4S3-CD79b-2F2-vL-[hTCRb-S57C-opt]-F-P2A-SP-CD79b-2F2-vH[hTCRa-T48C-opt] | 1875 | 12565 |
| CD 123 | CD8SP-CD19-FHVH-354-G4S3-CD123-CSL362-vL-[hTCRb-S57C-opt]-F-P2A-SP-CD123-CSL362-vH-[hTCRa-T48C-opt] | 1876 | 12566 |
| CD138 | CD8SP-CD19-FHVH-354-G4S3-CD138-vL-[hTCRb-S57C-opt]-F-P2A-SP-CD138-vH-[hTCRa-T48C-opt] | 1877 | 12567 |
| CD 179b | CD8SP-CD19-FHVH-354-G4S3-CD179b-vL-[hTCRb-S57C-opt]-F-P2A-SP-CD179b-vH-[hTCRa-T48C-opt] | 1878 | 12568 |
| CD276 | CD8SP-CD19-FHVH-354-G4S3-CD276-17-vL-[hTCRb-S57C-opt]-F-P2A-SP-CD276-17-vH-[hTCRa-T48C-opt] | 1879 | 12569 |
| CD324 | CD8SP-CD19-FHVH-354-G4S3-CD324-SC10-6-vL-[hTCRb-S57C-opt]-F-P2A-SP-CD324-SC10-6-vH-[hTCRa-T48C-opt] | 1880 | 12570 |
| CD324 | CD8SP-CD19-FHVH-354-G4S3-CD324-hSC10-17-vL-[hTCRb-S57C-opt]-F-P2A-SP-CD324-hSC10-17-vH-[hTCRa-T48C-opt] | 1881 | 12571 |
| CDH6 | CD8SP-CD19-FHVH-354-G4S3-CDH6-NOV710-vL-[hTCRb-S57C-opt]-F-P2A-SP-CDH6-NOV710-vH-[hTCRa-T48C-opt] | 1882 | 12572 |
| CDH6 | CD8SP-CD19-FHVH-354-G4S3-CDH6-NOV712-vL-[hTCRb-S57C-opt]-F-P2A-SP-CDH6-NOV712-vH-[hTCRa-T48C-opt] | 1883 | 12573 |
| CDH17 | CD8SP-CD19-FHVH-354-G4S3-CDH17-PTA001A4-vL-[hTCRb-S57C-opt]-F-P2A-SP-CDH17-PTA001A4-vH-[hTCRa-T48C-opt] | 1884 | 12574 |
| CDH19 | CD8SP-CD19-FHVH-354-G4S3-CDH19-16A4-vL-[hTCRb-S57C-opt]-F-P2A-SP-CDH19-16A4-vH-[hTCRa-T48C-opt] | 1885 | 12575 |
| EGFR | CD8SP-CD19-FHVH-354-G4S3-Cetuximab-vL-[hTCRb-S57C-opt]-F-P2A-SP-Cetuximab-vH-[hTCRa-T48C-opt] | 1886 | 12576 |
| CLEC5A | CD8SP-CD19-FHVH-354-G4S3-CLEC5A-8H8F5-vL-[hTCRb-S57C-opt]-F-P2A-SP-CLEC5A-8H8F5-vH-[hTCRa-T48C-opt] | 1887 | 12577 |
| CLEC5A | CD8SP-CD19-FHVH-354-G4S3-CLEC5A-3E12A2-vL-[hTCRb-S57C-opt]-F-P2A-SP-CLEC5A-3E12A2-vH-[hTCRa-T48C-opt] | 1888 | 12578 |
| CLL1 | CD8SP-CD19-FHVH-354-G4S3-CLL1-M26-vL-[hTCRb-S57C-opt]-F-P2A-SP-CLL1-M26-vH-[hTCRa-T48C-opt] | 1889 | 12579 |
| CSF2RA | CD8SP-CD19-FHVH-354-G4S3-CLL1-M32-vL-[hTCRb-S57C-opt]-F-P2A-SP-CLL1-M32-vH-[hTCRa-T48C-opt] | 1890 | 12580 |
| CS1 | CD8SP-CD19-FHVH-354-G4S3-HuLuc64-vL-[hTCRb-S57C-opt]-F-P2A-SP-HuLuc64-vH-[hTCRa-T48C-opt] | 1891 | 12581 |
| CS1 | CD8SP-CD19-FHVH-354-G4S3-CS1-huLuc90-vL-[hTCRb-S57C-opt]-F-P2A-SP-huLuc90-vH-[hTCRa-T48C-opt] | 1892 | 12582 |
| CSF2RA | CD8SP-CD19-FHVH-354-G4S3-CSF2RA-Ab6-vL-[hTCRb-S57C-opt]-F-P2A-SP-CSF2RA-Ab6-vH-[hTCRa-T48C-opt] | 1893 | 12583 |
| CSF2RA | CD8SP-CD19-FHVH-354-G4S3-CSF2RA-Ab1-vL-[hTCRb-S57C-opt]-F-P2A-SP-CSF2RA-Ab1-vH-[hTCRa-T48C-opt] | 1894 | 12584 |
| EGFRviii | CD8SP-CD19-FHVH-354-G4S3-EGFRvIII-139-vL-[hTCRb-S57C-opt]-F-P2A-SP-EGFRvIII-139-vH-[hTCRa-T48C-opt] | 1895 | 12585 |
| EGFRviii | CD8SP-CD19-FHVH-354-G4S3-EGFRvIII-2173-vH-[hTCRb-S57C-opt]-F-P2A-SP-EGFRvIII-2173-vH-[hTCRa-T48C-opt] | 1896 | 12586 |
| EpCAM | CD8SP-CD19-FHVH-354-G4S3-Epcam1-MM1-vL-[hTCRb-S57C-opt]-F-P2A-SP-Epcam1-MM1-vH-[hTCRa-T48C-opt] | 1897 | 12587 |
| EpCAM | CD8SP-CD19-FHVH-354-G4S3-Epcam1-D5K5-vL-[hTCRb-S57C-opt]-F-P2A-SP-Epcam1-D5K5-vH-[hTCRa-T48C-opt] | 1898 | 12588 |
| FLT3 | CD8SP-CD19-FHVH-354-G4S3-FLT3-NC7-vL-[hTCRb-S57C-opt]-F-P2A-SP-FLT3-NC7-vH-[hTCRa-T48C-opt] | 1899 | 12589 |
| Folate Receptor-1 | CD8 SP-CD 19-FHVH-354-G4S3-FR1-huMov19-vL-[hTCRb-S57C-opt]-F-P2A-SP-FR1-huMov19-vH-[hTCRa-T48C-opt] | 1900 | 12590 |
| GD2 | CD8SP-CD19-FHVH-354-G4S3-GD2-hu14-18-vL-[hTCRb-S57C-opt]-F-P2A-SP-GD2-hu14-18-vH-[hTCRa-T48C-opt] | 1901 | 12591 |
| GD2 | CD8SP-CD19-FHVH-354-G4S3-GD2-hu3F8-vL-[hTCRb-S57C-opt]-F-P2A-SP-GD2-hu3F8-vH-[hTCRa-T48C-opt] | 1902 | 12592 |
| GD3 | CD8SP-CD19-FHVH-354-G4S3-GD3-KM-641-vL-[hTCRb-S57C-opt]-F-P2A-SP-GD3-KM-641-vH-[hTCRa-T48C-opt] | 1903 | 12593 |
| GFR4 | CD8SP-CD19-FHVH-354-G4S3-GFRAlpha4-P4-6-vL-[hTCRb-S57C-opt]-F-P2A-SP-GFRAlpha4-P4-6-vH-[hTCRa-T48C-opt] | 1904 | 12594 |
| GFR4 | CD8SP-CD19-FHVH-354-G4S3-GFRa4-P4-10-vL-[hTCRb-S57C-opt]-F-P2A-SP-GFRa4-P4-10-vH-[hTCRa-T48C-opt] | 1905 | 12595 |
| GM1 | CD8SP-CD19-FHVH-354-G4S3-GM1-5B2-vL-[hTCRb-S57C-opt]-F-P2A-SP-GM1-5B2-vH-[hTCRa-T48C-opt] | 1906 | 12596 |
| GM1 | CD8SP-CD19-FHVH-354-G4S3-GM1-7E5-vL-[hTCRb-S57C-opt]-F-P2A-SP-GM1-7E5-vH-[hTCRa-T48C-opt] | 1907 | 12597 |
| GRPC5D | CD8SP-CD19-FHVH-354-G4S3-GPRC5D-ET150-5-vL-[hTCRb-S57C-opt]-F-P2A-SP-GPRC5D-ET150-5-vH-[hTCRa-T48C-opt] | 1908 | 12598 |
| GRPC5D | CD8SP-CD19-FHVH-354-G4S3-GPRC5D-ET150-18-vL-[hTCRb-S57C-opt]-F-P2A-SP-GPRC5D-ET150-18-vH-[hTCRa-T48C-opt] | 1909 | 12599 |
| GPC3 | CD8SP-CD19-FHVH-354-G4S3-GPC3-4E5-vL-[hTCRb-S57C-opt]-F-P2A-SP-GPC3-4E5-vH-[hTCRa-T48C-opt] | 1910 | 12600 |
| gpNMB | CD8SP-CD19-FHVH-354-G4S3-gpNMB-115-vL-[hTCRb-S57C-opt]-F-P2A-SP-gpNMB-115-vH-[hTCRa-T48C-opt] | 1911 | 12601 |
| GRP78 | CD8SP-CD19-FHVH-354-G4S3-GRP78-GC18-vL-[hTCRb-S57C-opt]-F-P2A-SP-GRP78-GC18-vH-[hTCRa-T48C-opt] | 1912 | 12602 |
| Her2 | CD8SP-CD19-FHVH-354-G4S3-Her2-Hu4D5-vL-[hTCRb-S57C-opt]-F-P2A-SP-Her2-Hu4D5-vH-[hTCRa-T48C-opt] | 1913 | 12603 |
| HIV1-gp100 | CD8SP-CD19-FHVH-354-G4S3-HIV1-E5-vL-[hTCRb-S57C-opt]-F-P2A-SP-HIV1-E5-vH-[hTCRa-T48C-opt] | 1914 | 12604 |
| HIV1-gp100 | CD8SP-CD19-FHVH-354-G4S3-HIV1-3BNC117-vL-[hTCRb-S57C-opt]-F-P2A-SP-HIV1-3BNC117-vH-[hTCRa-T48C-opt] | 1915 | 12605 |
| HIV1-gp100 | CD8SP-CD19-FHVH-354-G4S3-HIV1-PGT-128-vL-[hTCRb-S57C-opt]-F-P2A-SP-vH-[hTCRa-T48C-opt] | 1916 | 12606 |
| HIV1-gp100 | CD8SP-CD19-FHVH-354-G4S3-HIV1-VR-C01-vL-[hTCRb-S57C-opt]-F-P2A-SP-HIVl-VR-C01-vH-[hTCRa-T48C-opt] | 1917 | 12607 |
| HIV1-gp100 | CD8SP-CD19-FHVH-354-G4S3-HIV1-X5-vL-[hTCRb-S57C-opt]-F-P2A-SP-HIV1-X5-vH-[hTCRa-T48C-opt] | 1918 | 12608 |
| IL11Ra | CD8SP-CD19-FHVH-354-G4S3-IL11Ra-8E2-Ts107-vL-[hTCRb-S57C-opt]-F-P2A-SP-IL11Ra-8E2-Ts107-vH-[hTCRa-T48C-opt] | 1919 | 12609 |
| IL13Ra2 | CD8SP-CD19-FHVH-354-G4S3-IL13Ra2-hu107-vL-[hTCRb-S57C-opt]-F-P2A-SP-IL13Ra2-hu107vH-[hTCRa-T48C-opt] | 1920 | 12610 |
| IL13Ra2 | CD8SP-CD19-FHVH-354-G4S3-IL13Ra2-Hu108-vL-[hTCRb-S57C-opt]-F-P2A-SP-IL13Ra2-Hu108-vH-[hTCRa-T48C-opt] | 1921 | 12611 |
| LAMP1 | CD8SP-CD 19-FHVH-354-G4S3-LAMP 1-humab 1-2-vL-[hTCRb-S57C-opt]-F-P2A-SP-LAMP1-humab1-2vH-[hTCRa-T48C-opt] | 1922 | 12612 |
| LAMP1 | CD8SP-CD19-FHVH-354-G4S3-LAMP1-Mb4-vL-[hTCRb-S57C-opt]-F-P2A-SP-LAMP1-Mb4-vH-[hTCRa-T48C-opt] | 1923 | 12613 |
| L1CAM | CD8SP-CD19-FHVH-354-G4S3-L1CAM-9-3-HU3-vL-[hTCRb-S57C-opt]-F-P2A-SP-L1CAM-9-3-HU3-vH-[hTCRa-T48C-opt] | 1924 | 12614 |
| Lym1 | CD8SP-CD19-FHVH-354-G4S3-Lym1-vL-[hTCRb-S57C-opt]-F-P2A-SP-Lym1 -vH-[hTCRa-T48C-opt] | 1925 | 12615 |
| Lym2 | CD8SP-CD19-FHVH-354-G4S3-Lym2-vL-[hTCRb-S57C-opt]-F-P2A-SP-Lym2-vH-[hTCRa-T48C-opt] | 1926 | 12616 |
| MPL/TPO -R | CD8SP-CD19-FHVH-354-G4S3-MPL-175-vL-[hTCRb-S57C-opt]-F-P2A-SP-175-vH-[hTCRa-T48C-opt] | 1927 | 12617 |
| MPL/TPO -R | CD8SP-CD19-FHVH-354-G4S3-MPL-161-vL-[hTCRb-S57C-opt]-F-P2A-SP-161-vH-[hTCRa-T48C-opt] | 1928 | 12618 |
| TCRB1 | CD8SP-CD19-FHVH-354-G4S3-TCRB1-CP01-E09-vL-[hTCRb-S57C-opt]-F-P2A-SP-TCRB1-CP01-E09-vH-[hTCRa-T48C-opt] | 1929 | 12619 |
| TCRB1 | CD8 SP-CD 19-FHVH-354-G4S3-TCRB 1-Jovi 1-vL-[hTCRb-S57C-opt]-F-P2A-SP-TCRB1-Jovi1-vH-[hTCRa-T48C-opt] | 1930 | 12620 |
| TCRB2 | CD8SP-CD19-FHVH-354-G4S3-TCRB2-CP01-D05-vL-[hTCRb-S57C-opt]-F-P2A-SP-TCRB2-CP01-D05-vH-[hTCRa-T48C-opt] | 1931 | 12621 |
| TCRB2 | CD8SP-CD19-FHVH-354-G4S3-TCRB2-CP01-E05-vL-[hTCRb-S57C-opt]-F-P2A-SP-TCRB2-CP01-E05-vH-[hTCRa-T48C-opt] | 1932 | 12622 |
| TCRgd | CD8SP-CD19-FHVH-354-G4S3-TCRgd-G5-4-vL-[hTCRb-S57C-opt]-F-P2A-SP-TCRgd-G5-4-vH-[hTCRa-T48C-opt] | 1933 | 12623 |
| TGFBR2 | CD8SP-CD19-FHVH-354-G4S3-TGFBR2-Ab1-vL-[hTCRb-S57C-opt]-F-P2A-SP-TGFBR2-Ab1-vH-[hTCRa-T48C-opt] | 1934 | 12624 |
| TIM1 | CD8SP-CD19-FHVH-354-G4S3-TIM1-HVCR1-270-2-vL-[hTCRb-S57C-opt]-F-P2A-SP-TIM1-HVCR1-270-2-vH-[hTCRa-T48C-opt] | 1935 | 12625 |
| TIM1 | CD8SP-CD19-FHVH-354-G4S3-TIM1-HVCR1-ARD5-vL-[hTCRb-S57C-opt]-F-P2A-SP-TIM1-HVCR1-ARD5vH-[hTCRa-T48C-opt] | 1936 | 12626 |
| TnAg | CD8SP-CD19-FHVH-354-G4S3-TnAg-vL-[hTCRb-S57C-opt]-F-P2A-SP-TnAg-vH-[hTCRa-T48C-opt] | 1937 | 12627 |
| Tn-Muc1 | CD8SP-CD19-FHVH-354-G4S3-TnMuc1-hu5E5-RHA8-RKA-2-vL-[hTCRb-S57C-opt]-F-P2A-SP-TnMuc1-hu5E5-RHA8-RKA-2vH-[hTCRa-T48C-opt] | 1938 | 12628 |
| TROP2 | CD8SP-CD19-FHVH-354-G4S3-TROP2-ARA47-HV3KV3-vL-[hTCRb-S57C-opt]-F-P2A-SP-TROP2-ARA47-HV3KV3-vH-[hTCRa-T48C-opt] | 1939 | 12629 |
| TROP2 | CD8SP-CD19-FHVH-354-G4S3-TROP2-h7E6-SVG-vL-[hTCRb-S57C-opt]-F-P2A-SP-TROP2-h7E6-SVG-vH-[hTCRa-T48C-opt] | 1940 | 12630 |
| TSLPR | CD8SP-CD19-FHVH-354-G4S3-TSLPR-vL-[hTCRb-S57C-opt]-F-P2A-SP-TSLPR-vH-[hTCRa-T48C-opt] | 1941 | 12631 |
| Tyrosinase | CD8SP-CD19-FHVH-354-G4S3-Tyros-B2-vL-[hTCRb-S57C-opt]-F-P2A-SP-Tyros-B2-vH-[hTCRa-T48C-opt] | 1942 | 12632 |
| Tyrosinase | CD8SP-CD19-FHVH-354-G4S3-Tyros-MC1-vL-[hTCRb-S57C-opt]-F-P2A-SP-Tyros-MC1-vH-[hTCRa-T48C-opt] | 1943 | 12633 |
| VGFR3 | CD8SP-CD19-FHVH-354-G4S3-VEGFR3-Ab1-vL-[hTCRb-S57C-opt]-F-P2A-SP-VEGFR3-Ab1-vH-[hTCRa-T48C-opt] | 1944 | 12634 |
| WT1/HLA -A2 | CD8SP-CD19-FHVH-354-G4S3-WT1-Ab5-vL-[hTCRb-S57C-opt]-F-P2A-SP-WT1-Ab5-vH-[hTCRa-T48C-opt] | 1945 | 12635 |
| WT1/HLA -A2 | CD8SP-CD19-FHVH-354-G4S3-MYC3-WT1-Ab13-vL-[hTCRb-S57C-opt]-F-P2A-SP-WT1-Ab13-vH-[hTCRa-T48C-opt] | 1946 | 12636 |
| WT1/HLA -A2 | CD8SP-CD19-FHVH-354-G4S3-MYC3-WT1-Ab15-vL-[hTCRb-S57C-opt]-F-P2A-SP-WT1-Ab15-vH-[hTCRa-T48C-opt] | 1947 | 12637 |
| CD 123 | CD8SP-CD19-FHVH-354-G4S3-CD123-1172-vL-[hTCRb-S57C-opt]-F-P2A-SP-CD123-1172-vH-[hTCRa-T48C-opt] | 1948 | 12638 |
| CDH19 | CD8SP-CD19-FHVH-354-G4S3-CDH19-4B10-vL-[hTCRb-S57C-opt]-F-P2A-SP-CDH19-4B10-vH-[hTCRa-T48C-opt] | 1949 | 12639 |
| Folate Receptor-beta | CD8SP-CD19-FHVH-354-G4S3-FRbeta-m923-vL-[hTCRb-S57C-opt]-F-P2A-SP-FRbeta-m923-vH-[hTCRa-T48C-opt] | 1950 | 12640 |
| LHR | CD8SP-CD19-FHVH-354-G4S3-LHR-8B7-vL-[hTCRb-S57C-opt]-F-P2A-SP-LHR-8B7-vH-[hTCRa-T48C-opt] | 1951 | 12641 |
| LHR | CD8SP-CD19-FHVH-354-G4S3-LHR-5F4-21-vL-[hTCRb-S57C-opt]-F-P2A-SP-LHR-5F4-21-vH-[hTCRa-T48C-opt] | 1952 | 12642 |
| B7H4 | CD8SP-CD19-FHVH-354-G4S3-B7H4-hu22Cl0-vL-[hTCRb-S57C-opt]-F-P2A-SP-B7H4-hu22Cl0-vH-[hTCRa-T48C-opt] | 1953 | 12643 |
| B7H4 | CD8SP-CD19-FHVH-354-G4S3-B7H4-hu1D11-vL-[hTCRb-S57C-opt]-F-P2A-SP-B7H4-hu1D11-vH-[hTCRa-T48C-opt] | 1954 | 12644 |
| CD23 | CD8SP-CD19-FHVH-354-G4S3-CD23-p5E8-vL-[hTCRb-S57C-opt]-F-P2A-SP-CD23-p5E8-vH-[hTCRa-T48C-opt] | 1955 | 12645 |
| GCC | CD8SP-CD19-FHVH-354-G4S3-GCC-5F9-vL-[hTCRb-S57C-opt]-F-P2A-SP-GCC-5F9-vH-[hTCRa-T48C-opt] | 1956 | 12646 |
| GCC | CD8SP-CD19-FHVH-354-G4S3-GCC-Ab229-vL-[hTCRb-S57C-opt]-F-P2A-SP-GCC-Ab229-vH-[hTCRa-T48C-opt] | 1957 | 12647 |
| CD200R | CD8SP-CD19-FHVH-354-G4S3-CD200R-huDx182-vL-[hTCRb-S57C-opt]-F-P2A-SP-CD200R-huDx182-vH-[hTCRa-T48C-opt] | 1958 | 12648 |
| AFP | CD8SP-CD19-FHVH-354-G4S3-AFP-76-vL-[hTCRb-S57C-opt]-F-P2A-SP-AFP-76-vH-[hTCRa-T48C-opt] | 1959 | 12649 |
| AFP | CD8SP-CD19-FHVH-354-G4S3-AFP-79-vL-[hTCRb-S57C-opt]-F-P2A-SP-AFP-79-vH-[hTCRa-T48C-opt] | 1960 | 12650 |
| BCMA | CD8SP-CD19-FHVH-354-G4S3-BCMA-ET-03-vL-[hTCRb-S57C-opt]-F-P2A-SP-BCMA-ET-03-vH-[hTCRa-T48C-opt] | 1961 | 12651 |
| CD123 | CD8SP-CD19-FHVH-354-G4S3-CD 123-DART-1-vL-[hTCRb-S57C-opt]-F-P2A-SP-CD123-DART-1-vH-[hTCRa-T48C-opt] | 1962 | 12652 |
| CD123 | CD8SP-CD19-FHVH-354-G4S3-CD123-DART-2-vL-[hTCRb-S57C-opt]-F-P2A-SP-CD123-DART-2-vH-[hTCRa-T48C-opt] | 1963 | 12653 |
| CD123 | CD8SP-CD19-FHVH-354-G4S3-CD123-1176-vL-[hTCRb-S57C-opt]-F-P2A-SP-CD123-1176-vH-[hTCRa-T48C-opt] | 1964 | 12654 |
| CD 123 | CD8SP-CD19-FHVH-354-G4S3-CD123-2B8-vL-[hTCRb-S57C-opt]-F-P2A-SP-CD123-2B8-vH-[hTCRa-T48C-opt] | 1965 | 12655 |
| CD 123 | CD8SP-CD19-FHVH-354-G4S3-CD123-9D7-vL-[hTCRb-S57C-opt]-F-P2A-SP-CD123-9D7-vH-[hTCRa-T48C-opt] | 1966 | 12656 |
| CD123 | CD8SP-CD19-FHVH-354-G4S3-CD 123-3B10-vL-[hTCRb-S57C-opt]-F-P2A-SP-CD123-3B10-vH-[hTCRa-T48C-opt] | 1967 | 12657 |
| CD19 | CD8SP-CD19-FHVH-354-G4S3-CD19-MOR0028-vL-[hTCRb-S57C-opt]-F-P2A-SP-CD 19-MOR0028-vH-[hTCRa-T48C-opt] | 1968 | 12658 |
| CD19 | CD8SP-CD19-FHVH-354-G4S3-CD 19-hu-mROO5-1-vL-[hTCRb-S57C-opt]-F-P2A-SP-CD19-hu-mROO5-1-vH-[hTCRa-T48C-opt] | 1969 | 12659 |
| CD20 | CD8SP-CD19-FHVH-354-G4S3-CD20-Ubli-v4-vL-[hTCRb-S57C-opt]-F-P2A-SP-CD20-Ubli-v4-vH-[hTCRa-T48C-opt] | 1970 | 12660 |
| CD20 | CD8SP-CD19-FHVH-354-G4S3-CD20-7D8-vL-[hTCRb-S57C-opt]-F-P2A-SP-CD20-7D8-vH-[hTCRa-T48C-opt] | 1971 | 12661 |
| CD33 | CD8SP-CD19-FHVH-354-G4S3-CD33-SGNh2H12-vL-[hTCRb-S57C-opt]-F-P2A-SP-CD33-SGNh2H12-vH-[hTCRa-T48C-opt] | 1972 | 12662 |
| CD99 | CD8SP-CD19-FHVH-354-G4S3-CD99-hu12E7-vL-[hTCRb-S57C-opt]-F-P2A-SP-CD99-hu12E7-vH-[hTCRa-T48C-opt] | 1973 | 12663 |
| CLL1 | CD8SP-CD19-FHVH-354-G4S3-CLL1-21C9-L2H3-vL-[hTCRb-S57C-opt]-F-P2A-SP-CLL1-21C9-L2H3-vH-[hTCRa-T48C-opt] | 1974 | 12664 |
| CLL1 | CD8SP-CD19-FHVH-354-G4S3-CLL1-6E7L4H1e-vL-[hTCRb-S57C-opt]-F-P2A-SP-CLL1-6E7L4H1e-vH-[hTCRa-T48C-opt] | 1975 | 12665 |
| CLL1 | CD8SP-CD19-FHVH-354-G4S3-CLL1-hu1075-v1-vL-[hTCRb-S57C-opt]-F-P2A-SP-CLL1-hu1075-v1-vH-[hTCRa-T48C-opt] | 1976 | 12666 |
| CLL1 | CD8SP-CD19-FHVH-354-G4S3-CLL1-hu1075-v2-vL-[hTCRb-S57C-opt]-F-P2A-SP-CLL1-hu1075-v2-vH-[hTCRa-T48C-opt] | 1977 | 12667 |
| FITC | CD8SP-CD19-FHVH-354-G4S3-FITC-4M-53-vL-[hTCRb-S57C-opt]-F-P2A-SP-FITC-4M-53-vH-[hTCRa-T48C-opt] | 1978 | 12668 |
| FITC | CD8SP-CD19-FHVH-354-G4S3-FITC-E2-vH-[hTCRb-S57C-opt]-F-P2A-SP-FITC-E2-vL-[hTCRa-T48C-opt] | 1979 | 12669 |
| HLA-A2 | CD8SP-CD19-FHVH-354-G4S3-HLA-A2-3PB2-vL-[hTCRb-S57C-opt]-F-P2A-SP-HLA-A2-3PB2-vH-[hTCRa-T48C-opt] | 1980 | 12670 |
| HPV16 | CD8SP-CD19-FHVH-354-G4S3-HPV16-7-8-vL-[hTCRb-S57C-opt]-F-P2A-SP-HPV16-7-8-vH-[hTCRa-T48C-opt] | 1981 | 12671 |
| HPV16 | CD8SP-CD19-FHVH-354-G4S3-HPV16-2-vL-[hTCRb-S57C-opt]-F-P2A-SP-HPV16-2-vH-[hTCRa-T48C-opt] | 1982 | 12672 |
| CD22 | CD8SP-CD19-FHVH-354-G4S3-CD22-5-vH-[hTCRb-S57C-opt]-F-P2A-SP-CD22-5-vL-[hTCRa-T48C-opt] | 1983 | 12673 |
| CD22 | CD8SP-CD19-FHVH-354-G4S3-CD22-10-vH-[hTCRb-S57C-opt]-F-P2A-SP-CD22-10-vL-[hTCRa-T48C-opt] | 1984 | 12674 |
| CD22 | CD8SP-CD19-FHVH-354-G4S3-CD22-31-vH-[hTCRb-S57C-opt]-F-P2A-SP-CD22-31-vL-[hTCRa-T48C-opt] | 1985 | 12675 |
| CD22 | CD8SP-CD19-FHVH-354-G4S3-CD22-53-vH-[hTCRb-S57C-opt]-F-P2A-SP-CD22-53-vL-[hTCRa-T48C-opt] | 1986 | 12676 |
| CD22 | CD8SP-CD19-FHVH-354-G4S3-CD22-65-vH-[hTCRb-S57C-opt]-F-P2A-SP-CD22-65-vL-[hTCRa-T48C-opt] | 1987 | 12677 |
| Kappa-Light Chain | CD8SP-CD19-FHVH-354-G4S3-Kappa-LC1-vL-[hTCRb-S57C-opt]-F-P2A-SP-Kappa-LC 1-vH-[hTCRa-T48C-opt] | 1988 | 12678 |
| PTK7 | CD8SP-CD19-FHVH-354-G4S3-PTK7-7C8-vL-[hTCRb-S57C-opt]-F-P2A-SP-PTK7-7C8-vH-[hTCRa-T48C-opt] | 1989 | 12679 |
| PTK7 | CD8SP-CD19-FHVH-354-G4S3-PTK7-12C6a-vL-[hTCRb-S57C-opt]-F-P2A-SP-PTK7-12C6a-vH-[hTCRa-T48C-opt] | 1990 | 12680 |
| CD19 | CD8SP-CD19-FHVH-354-G4S3-hCD19-EUK5-13-vL-[hTCRb-S57C-opt]-F-P2A-SP-hCD19-EUK5-13-vH-[hTCRa-T48C-opt] | 1991 | 12681 |
| Streptag | CD8SP-CD19-FHVH-354-G4S3-Streptag-vL-[hTCRb-S57C-opt]-F-P2A-SP-Streptag-vH-[hTCRa-T48C-opt] | 1992 | 12682 |
| MPL | CD8SP-CD19-FHVH-354-G4S3-MPL-hu-161-2-vL-[hTCRb-S57C-opt]-F-P2A-SP-MPL-hu-161-2-vH-[hTCRa-T48C-opt] | 1993 | 12683 |
| BCMA | CD8SP-CD19-FHVH-354-G4S3-BCMA-huC12A3-L3H3-vL2-[hTCRb-S57C-opt]-F-P2A-SP-BCMA-huC12A3-L3H3-vH2-[hTCRa-T48C-opt] | 1994 | 12684 |
| BCMA | CD8SP-CD19-FHVH-354-G4S3-BCMA-huC13-F12-L1H2-vL2-[hTCRb-57C-opt]-F-P2A-SP-BCMA-huC13-F12-L1H2-vH2-[hTCRa-T48C-opt] | 1995 | 12685 |
| CD179a | CD8SP-CD19-FHVH-354-G4S3-CD 179a-2460-B04-vL-[hTCRb-S57C-opt]-F-P2A-SP-CD179a-2460-B04-vH-[hTCRa-T48C-opt] | 1996 | 12686 |
| CD179a | CD8SP-CD19-FHVH-354-G4S3-CD 179a-2462-E07-vL-[hTCRb-S57C-opt]-F-P2A-SP-CD179a-2462-E07-vH-[hTCRa-T48C-opt] | 1997 | 12687 |
| MPL | CD8SP-CD19-FHVH-354-G4S3-MPL-hu-175-2-vL-[hTCRb-S57C-opt]-F-P2A-SP-MPL-hu-175-2-vH-[hTCRa-T48C-opt] | 1998 | 12688 |
| MPL | CD8SP-CD19-FHVH-354-G4S3-MPL-hu-111-2-vL-[hTCRb-S57C-opt]-F-P2A-SP-MPL-hu-111-2-vH-[hTCRa-T48C-opt] | 1999 | 12689 |
| CD22 | CD8SP-CD19-FHVH-354-G4S3-CD22-HA22-vL-[hTCRb-S57C-opt]-F-P2A-SP-CD22-HA22-vH-[hTCRa-T48C-opt] | 2000 | 12690 |
| STEAP1 | CD8SP-CD19-FHVH-354-G4S3-STEAP1-hu120-vL-[hTCRb-S57C-opt]-F-P2A-SP-STEAP1-hu120-vH-[hTCRa-T48C-opt] | 2001 | 12691 |
| hLiv1 | CD8SP-CD19-FHVH-354-G4S3-hLiv1-mAb2-vL-[hTCRb-S57C-opt]-F-P2A-SP-hLiv1-mAb2-vH-[hTCRa-T48C-opt] | 2002 | 12692 |
| Nectin4 | CD8SP-CD19-FHVH-354-G4S3-hu-Nectin4-mAb1-vL-[hTCRb-S57C-opt]-F-P2A-SP-hu-Nectin4-mAb1-vH-[hTCRa-T48C-opt] | 2003 | 12693 |
| Cripto | CD8SP-CD19-FHVH-354-G4S3-hu-Cripto-L1H2-vL-[hTCRb-S57C-opt]-F-P2A-SP-hu-Cripto-L1H2-vH-[hTCRa-T48C-opt] | 2004 | 12694 |
| gpA33 | CD8SP-CD19-FHVH-354-G4S3-hu-gpA33-vL-[hTCRb-S57C-opt]-F-P2A-SP-hu-gpA33-vH-[hTCRa-T48C-opt] | 2005 | 12695 |
| ROR1 | CD8SP-CD19-FHVH-354-G4S3-ROR1-DART4-vL-[hTCRb-S57C-opt]-F-P2A-SP-ROR1-DART4-vH-[hTCRa-T48C-opt] | 2006 | 12696 |
| FLT3 | CD8SP-CD19-FHVH-354-G4S3-FLT3-8B5-vL-[hTCRb-S57C-opt]-F-P2A-SP-FLT3-8B5-vH-[hTCRa-T48C-opt] | 2007 | 12697 |
| FLT3 | CD8SP-CD19-FHVH-354-G4S3-FLT3-10E3-vL-[hTCRb-S57C-opt]-F-P2A-SP-FLT3-10E3-vH-[hTCRa-T48C-opt] | 2008 | 12698 |
| BCMA | CD8SP-CD19-FHVH-354-G4S3-BCMA-BB-CAR02-vL-[hTCRb-S57C-opt]-F-P2A-SP-BCMA-BB-CAR02-vH-[hTCRa-T48C-opt] | 2009 | 12699 |
| CLL1 | CD8SP-CD19-FHVH-354-G4S3-CLL1-24C1-vL-[hTCRb-S57C-opt]-F-P2A-SP-CLL1-24C1-vH-[hTCRa-T48C-opt] | 2010 | 12700 |
| CLL1 | CD8SP-CD19-FHVH-354-G4S3-CLL1-24C8-vL-[hTCRb-S57C-opt]-F-P2A-SP-CLL1-24C8-vH-[hTCRa-T48C-opt] | 2011 | 12701 |
| MSLN | CD8SP-CD19-FHVH-354-G4S3-MSLN-7D9-v3-vL-[hTCRb-S57C-opt]-F-P2A-SP-MSLN-7D9-v3-vH-[hTCRa-T48C-opt] | 2012 | 12702 |
| MSLN | CD8SP-CD19-FHVH-354-G4S3-MSLN-hu22A10-vL-[hTCRb-S57C-opt]-F-P2A-SP-MSLN-hu22A10-vH-[hTCRa-T48C-opt] | 2013 | 12703 |

[0246] TABLE 26. Bispecifics and Trispecific Constructs on different backbones targeting different antigens. These constructs were generated by changing the [hTCRb-S57C-opt] and [hTCRa-T48C-opt] modules of the construct in Table 25 with the modules shown in the first construct of each series in the Table below. The order of the vL/vH fragments of the constructs of each series in Table 26 is the same as the order of vL/vH chains of the constructs of series 1 whose details are provided in Table 25.

TABLE 26

Bispecifics and Trispecific Constructs Targeting Different Antigens

| 1st Target | 2nd target | 3rd targe t | Cons truct Type | Name of first construct in the series | SEQ ID NO of Series (DNA) | SEQ ID NO of Series (PRT) |
|---|---|---|---|---|---|---|
| Variable | CD19 | None | Bi-specif ic | CD8SP-CD19-FHVH-354-G4S3-FMC63-vL-[hTCRb-S57C-opt]-F-P2A-SP-FMC63-vH-[hTCRa-T48C-opt] | 1849-2013 | 12539-12703 |
| Variable | CD19 | None | Bi-specif ic | CD8SP-CD19-FHVH-354-G4S3-FMC63-vL-[hTCRa-T48C]-F-F2A-SP-FMC63-vH-[hTCRb-S57C] | 2014-2177 | 12704-12868 |
| Variable | CD19 | None | Bi-specif ic | CD8SP-CD19-FHVH-354-G4S3-FMC63-vL-[hTCRbECD-CD3zECDTMCP-opt]-F-P2A-SP-FMC63-vH-[hTCRaECD-CD3zECDTMCP-opt2] | 2178-2343 | 12869-13033 |
| Variable | CD19 | CD22 | Tri-specif ic | CD8SP-CD19-FHVH-354-G4S3-FMC63-vL-[hTCRb-S57C-opt]-F-P2A-SP-CD22-FHVH-24-FMC63-vH-[hTCRa-T48C-opt] | 2344-2508 | 13034-13198 |
| Variable | CD19 | CD22 | Tri-specif ic | CD8SP-CD19-FHVH-354-G4S3-FMC63-vL-[hTCRa-T48C]-F-F2A-SP-CD22-FHVH-24-FMC63-vH-[hTCRb-S57C] | 2509-2673 | 13199-13363 |
| Variable | CD19 | CD22 | Tri-specif ic | CD8SP-CD19-FHVH-354-G4S3-FMC63-vL-[hTCRbECD-CD3zECDTMCP-opt]-F-P2A-SP-CD22-FHVH-24-FMC63-vH-[hTCRaECD-CD3zECDTMCP-opt2] | 2674-2838 | 13364-13528 |
| Variable | CD19 | None | Bi-specif ic | CD8SP-CD19-FHVH-354-G4S3-FMC63-vL-[IgCL-TCRg-6MD]-F-P2A-SP-FMC63-vH-[IgG1-CH1-TCRd-6MD] | 2839-3003 | 13529-13693 |
| Variable | CD19 | CD22 | Tri-specif ic | CD8SP-CD19-FHVH-354-G4S3-FMC63-vL-[IgCL-TCRg-6MD]-F-P2A-SP-CD22-FHVH-24-FMC63-vH-[IgG1-CH1-TCRd-6MD] | 3004-3168 | 13694-13858 |
| Variable | CD19 | None | Bi-specif ic | CD8SP-CD19-FHVH-354-G4S3-FMC63-vL-[IgCL-TCRb-wt-opt2-6MD]-F-F2A-SP-FMC63-vH-[IgG1-CH1-TCRa-wt-op2-6MD] | 3169-3333 | 13859-14023 |
| Variable | CD19 | CD22 | Tri-specif ic | CD8SP-CD19-FHVH-354-G4S3-FMC63-vL-[IgCL-TCRb-wt-opt2-6MD]-F-F2A-SP-CD22-FHVH-24-FMC63-vH-[IgG1-CH1-TCRa-wt-op2-6MD] | 3334-3498 | 14024-14188 |

TABLE 27

Bispecific and Trispecific SARs Constructs targeting MIR1 and optionally targeting CD20 and/or CD19

| 1st (TCR) Target | 2nd target | 3rd target BACKBONE | | SEQ ID NO (DNA) | SEQ ID NO (PRT) |
|---|---|---|---|---|---|
| MIR1 | | CD20 | 2nd GEN CAR | 3499 | 14189 |
| MIR1 | | CD20 | alpha-beta-TCR | 3500 | 14190 |
| MIR1 | | CD20 | alpha-beta-TCR | 3501 | 14191 |
| MIR1 | | CD20 | alpha-beta-TCR | 3502 | 14192 |
| MIR1 | | CD20 | alpha-beta-TCR | 3503 | 14193 |
| MIR1 | | CD20 | alpha-beta-TCR | 3504 | 14194 |
| MIR1 | | CD20 | alpha-beta-TCR | 3505 | 14195 |
| MIR1 | | CD20 | alpha-beta-TCR | 3506 | 14196 |
| MIR1 | | CD20 | alpha-beta-TCR | 3507 | 14197 |
| MIR1 | | CD20 | alpha-beta-TCR | 3508 | 14198 |
| MIR1 | | CD20 | gamma-delta-TCR | 3509 | 14199 |
| MIR1 | | CD20 | gamma-delta-TCR | 3510 | 14200 |
| MIR1 | | CD20 | zSIR | 3511 | 14201 |
| MIR1 | | CD20 | SIR | 3512 | 14202 |
| MIR1 | | CD20 | SIR | 3513 | 14203 |
| MIR1 | | CD20 | SIR with one CD28 CSD | 3514 | 14204 |
| MIR1 | | CD20 | SIR with two CD28 CSD | 3515 | 14205 |
| MIR1 | | CD20 | SIR with one 4-1BB CSD | 3516 | 14206 |
| MIR1 | | CD20 | zSIR with two 4-1BB CSD | 3517 | 14207 |
| MIR1 | | CD20 | zSIR | 3518 | 14208 |
| MIR1 | | CD20 | Gamma-delta Ab-TCR | 3519 | 14209 |
| MIR1 | | CD20 | alpha-beta Ab-TCR | 3520 | 14210 |
| MIR1 | | CD20 | alpha-beta Ab-TCR | 3521 | 14211 |
| MIR1 | | CD20 | TFPe | 3522 | 14212 |
| MIR1 | | CD20 | TFPd | 3523 | 14213 |
| MIR1 | | CD20 | TFPg | 3524 | 14214 |
| MIR1 | | CD20 | TFPz | 3525 | 14215 |
| MIR1 | | CD20 | Single chain of TCR | 3526 | 14216 |
| MIR1 | | CD20 | Single chain of TCR | 3527 | 14217 |
| MIR1 | | CD20 | Single chain of TCR | 3528 | 14218 |
| MIR1 | | CD20 | Single chain of TCR | 3529 | 14219 |
| MIR1 | CD19 | | 2nd GEN CAR | 3530 | 14220 |
| MIR1 | CD19 | | 2nd GEN CAR | 3531 | 14221 |
| MIR1 | CD19 | | vFLIP-CAR | 3532 | 14222 |
| MIR1 | CD19 | | TCR | 3533 | 14223 |
| MIR1 | CD19 | | TCR | 3534 | 14224 |
| MIR1 | CD19 | | TCR | 3535 | 14225 |
| MIR1 | CD19 | | TCR | 3536 | 14226 |
| MIR1 | CD19 | | TCR | 3537 | 14227 |
| MIR1 | CD19 | | TCR | 3538 | 14228 |
| MIR1 | CD19 | | TCR | 3539 | 14229 |
| MIR1 | CD19 | | TCR | 3540 | 14230 |
| MIR1 | CD19 | | TCR | 3541 | 14231 |
| MIR1 | CD19 | | TCR | 3542 | 14232 |
| MIR1 | CD19 | | TCR | 3543 | 14233 |
| MIR1 | CD19 | | TCR | 3544 | 14234 |
| MIR1 | CD19 | | TCR | 3545 | 14235 |
| MIR1 | CD19 | | TCR | 3546 | 14236 |
| MIR1 | CD19 | | zSIR | 3547 | 14237 |
| MIR1 | CD19 | | SIR | 3548 | 14238 |
| MIR1 | CD19 | | SIR | 3549 | 14239 |
| MIR1 | CD19 | | SIR | 3550 | 14240 |
| MIR1 | CD19 | | SIR | 3551 | 14241 |
| MIR1 | CD19 | | SIR | 3552 | 14242 |
| MIR1 | CD19 | | SIR | 3553 | 14243 |
| MIR1 | CD19 | | zSIR | 3554 | 14244 |
| MIR1 | CD19 | | gamma-delta Ab-TCR | 3555 | 14245 |
| MIR1 | CD19 | | Alpha-beta Ab-TCR | 3556 | 14246 |
| MIR1 | CD19 | | Alpha-beta Ab-TCR | 3557 | 14247 |
| MIR1 | CD19 | | TFPe | 3558 | 14248 |
| MIR1 | CD19 | | TFPd | 3559 | 14249 |
| MIR1 | CD19 | | TFPg | 3560 | 14250 |
| MIR1 | CD19 | | TFPz | 3561 | 14251 |
| MIR1 | CD19 | | Single chain of TCR | 3562 | 14252 |
| MIR1 | CD19 | | Single chain of TCR | 3563 | 14253 |
| MIR1 | CD19 | | Single chain of TCR | 3564 | 14254 |
| MIR1 | CD19 | | Single chain of TCR | 3565 | 14255 |
| MIR1 | CD19 | | Single chain SIR | 3566 | 14256 |
| MIR1 | | | Single chain of TCR | 3567 | 14257 |
| MIR1 | | | Single chain of TCR | 3568 | 14258 |
| MIR1 | CD19 | | Single chain of TCR | 3569 | 14259 |
| MIR1 | CD19 | | Single chain of TCR | 3570 | 14260 |
| MIR1 | | | Single chain of TCR | 3571 | 14261 |
| MIR1 | | | Single chain of TCR | 3572 | 14262 |
| MIR1 | CD19 | | Single chain of TCR | 3573 | 14263 |
| MIR1 | CD19 | | Single chain of TCR | 3574 | 14264 |
| MIR1 | CD19 | CD20 | TCR | 3575 | 14265 |
| MIR1 | CD19 | CD20 | TCR | 3576 | 14266 |
| MIR1 | CD19 | CD20 | TCR | 3577 | 14267 |
| MIR1 | CD19 | CD20 | TCR | 3578 | 14268 |
| MIR1 | CD19 | CD20 | TCR | 3579 | 14269 |
| MIR1 | CD19 | CD20 | TCR | 3580 | 14270 |
| MIR1 | CD19 | CD20 | TCR | 3581 | 14271 |
| MIR1 | CD19 | CD20 | TCR | 3582 | 14272 |
| MIR1 | CD19 | CD20 | TCR | 3583 | 14273 |
| MIR1 | CD19 | CD20 | TCR | 3584 | 14274 |
| MIR1 | CD19 | CD20 | TCR | 3585 | 14275 |
| MIR1 | CD19 | CD20 | zSIR | 3586 | 14276 |
| MIR1 | CD19 | CD20 | SIR | 3587 | 14277 |
| MIR1 | CD19 | CD20 | SIR | 3588 | 14278 |
| MIR1 | CD19 | CD20 | SIR | 3589 | 14279 |
| MIR1 | CD19 | CD20 | SIR | 3590 | 14280 |
| MIR1 | CD19 | CD20 | SIR | 3591 | 14281 |
| MIR1 | CD19 | CD20 | SIR | 3592 | 14282 |
| MIR1 | CD19 | CD20 | zSIR | 3593 | 14283 |
| MIR1 | CD19 | CD20 | Gamma-delta Ab-TCR | 3594 | 14284 |
| MIR1 | CD19 | CD20 | alpha-beta Ab-TCR | 3595 | 14285 |
| MIR1 | CD19 | CD20 | alpha-beta Ab-TCR | 3596 | 14286 |

[0247] TABLE 28: Bispecifics and Trispecific Constructs on the different backbones targeting different antigens. These constructs were generated by changing the CD20-vHH-2HCD25 module of the construct in Table 27 with the modules shown in the first construct of each series in the Table below. The order of the vL/vH fragments of the constructs of each series in Table 28 is the same as the order of vL/vH chains of the constructs of series 1 whose details are provided in Table 27.

| 1st (TCR) Target | 2nd target (option al) | 3rd target (option al) | Name of first construct in the series | SEQ ID NO of Series (DNA) | SEQ ID NO of Series (PRT) |
|---|---|---|---|---|---|
| MR1 | CD19 | CD20 | IgSP-Apa-CD20-vHH-2HCD25-G4Sx3v2-MC7G5-Va-Gly-Ser-Linker-Vb-Myc-CD8TM-BBz | 3499-3596 | 14189-14286 |
| MR1 | CD19 | CD20 | IgSP-NKG2D-G4Sx3-NKG2D-G4Sx3v2-MC7G5-Va-Gly-Ser-Linker-Vb-Myc-CD8TM-BBz | 3597-3694 | 14287-14384 |
| MR1 | CD19 | CD20 | IgSP-Apa-RZIP-G4Sx3v2-MC7G5-Va-Gly-Ser-Linker-Vb-Myc-CD8TM-BBz | 3695-3792 | 14385-14482 |
| MR1 | CD19 | CD20 | IgSP-Apa-CD16-V158-v2-G4Sx3v2-MC7G5-Va-Gly-Ser-Linker-Vb-Myc-CD8TM-BBz | 3793-3890 | 14483-14580 |
| CMV-pp65/HLA -A2 | CD19 | CD20 | IgSP-Apa-CD20-vHH-2HCD25-G4Sx3v2-CMV-pp65-TCR1-Va-Gly-Ser-Linker-Vb-Myc-CD8TM-BBz | 3891-3988 | 14581-14678 |
| NYESO-1/HLA-A2 | CD19 | CD20 | IgSP-Apa-CD20-vHH-2HCD25-G4Sx3v2-NYESO-IG4-Va-Gly-Ser-Linker-Vb-Myc-CD8TM-BBz | 3989-4086 | 14679-14776 |

TABLE 29

Bispecific and Trispecific SARs Constructs targeting CD20 and a second antigen targeted by SIR based on hu-mROO5-1 vL/vH fragments (i.e. Fv)

| 1st (SIR) Target | 2nd target | 3rd target | Name of fragment | SEQ ID NO (DNA) | SEQ ID NO (PRT) |
|---|---|---|---|---|---|
| CD19 | CD20 | | IgSP-Apa-CD20-vHH-2HCD25-G4Sx3v2-hu-mROO5-1-vH-Gly-Ser-Linker-vL-Myc-CD8TM-BBz | 4087 | 14777 |
| CD19 | CD20 | | CD8SP-hu-mROO5-1-vL-[hTCRa-CSDVP]-F-F2A-IgSP-Apa-CD20-vHH-2HCD25-G4Sx3v2-hu-mROO5-1-vH-[hTCRb-KACIAH]-F-P2A-PAC | 4088 | 14778 |
| CD19 | CD20 | | CD8SP-hu-mROO5-1-vL-[hTCRb-KACIAH]-F-P2A-IgSP-Apa-CD20-vHH-2HCD25-G4Sx3v2-hu-mROO5-1-vH-[hTCRa-CSDVP]-F-F2A-PAC | 4089 | 14779 |
| CD19 | CD20 | | CD8SP-hu-mROO5-1-vL-[hTCRb-S57C]-F-P2A-IgSP-Apa-CD20-vHH-2HCD25-G4Sx3v2-hu-mROO5-1-vH-[hTCRa-T48C]-F-F2A-PAC | 4090 | 14780 |
| CD19 | CD20 | | CD8SP-hu-mROO5-1-vL-[hTCRb-S57C]-F-P2A-IgSP-Apa-CD20-vHH-2HCD25-G4Sx3v2-hu-mROO5-1-vH-[hTCRa-T48C] | 4091 | 14781 |
| CD19 | CD20 | | CD8SP-hu-mROO5-1-vL-[hTCRb-S57C]-F-P2A-IgSP-Apa-CD20-vHH-2HCD25-G4Sx3v2-hu-mROO5-1-vH-[hTCRa-T48C]-F-F2A-K13-opt | 4092 | 14782 |
| CD19 | CD20 | | CD8SP-hu-mROO5-1-vL-[hTCRa-T48C]-F-P2A-IgSP-Apa-CD20-vHH-2HCD25-G4Sx3v2-hu-mROO5-1-vH-[hTCRb-S57C] | 4093 | 14783 |
| CD19 | CD20 | | CD8SP-hu-mROO5-1-vL-[hTCRa-T48C]-F-P2A-IgSP-Apa-CD20-vHH-2HCD25-G4Sx3v2-hu-mROO5-1-vH-[hTCRb-S57C]-F-P2A-K13-opt | 4094 | 14784 |
| CD19 | CD20 | | CD8SP-hu-mR005-1-vL-[hTCRb-opt2]-F-P2A-IgSP-Apa-CD20-vHH-2HCD25-G4Sx3v2-hu-mROO5-1-vH-[hTCRa-opt2]-F-F2A-PAC | 4095 | 14785 |
| CD19 | CD20 | | CD8SP-hu-mROO5-1-vL-[hTCRb-opt2]-F-P2A-IgSP-Apa-CD20-vHH-2HCD25-G4Sx3v2-hu-mROO5-1-vH-Myc-[pretc.Ra-Del48]-F-F2A-PAC | 4096 | 14786 |
| CD19 | CD20 | | CD8SP-hu-mROO5-1-vL-V5-[hTCRg1-opt]-F-P2A-IgSP-Apa-CD20-vHH-2HCD25-G4Sx3v2-hu-mROO5-1-vH-Myc-[hTCRd-opt]-F-F2A-PAC | 4097 | 14787 |
| CD19 | CD20 | | CD8SP-hu-mROO5-1-vL-[hTCRd-opt]-F-P2A-IgSP-Apa-CD20-vHH-2HCD25-G4Sx3v2-hu-mROO5-1-vH-[hTCRg1-opt] | 4098 | 14788 |
| CD19 | CD20 | | CD8-hu-mROO5-1-vL-IgCL-CD3zECDTMCP-opt-F-P2A-Spe-IgSP-Apa-CD20-vHH-2HCD25-G4Sx3v2-hu-mROO5-1-vH-IgG1-CH1-CD3zECDTMCP-opt2-F-F2A-PAC | 4099 | 14789 |
| CD19 | CD20 | | CD8SP-hu-mROO5-1-vL-[hTCRbECD-CD3zECDTMCP-opt]-F-P2A-IgSP-Apa-CD20-vHH-2HCD25-G4Sx3v2-hu-mROO-1-vH-[hTCRaECD-CD3zECDTMCP-opt2] | 4100 | 14790 |
| CD19 | CD20 | | CD8SP-hu-mROO5-1-vL-[hTCRb-KAC-ECD-CD3zECDTMCP-opt]-F-P2A-IgSP-Apa-CD20-vHH-2HCD25-G4Sx3v2-hu-mROO5-1-vH-[hTCRa-CSDVP-ECD-CD3zECDTMCP-opt2] | 4101 | 14791 |
| CD19 | CD20 | | CD8SP-hu-mROO5-1-vL-V5-[hTCRbECD-CD3zECDTMCP-opt]-F-P2A-IgSP-Apa-CD20-vHH-2HCD25-G4Sx3v2-hu-mROO5-1-vH-Myc-[hTCRaECD-CD3zECDTM-28z-opt2] | 4102 | 14792 |
| CD19 | CD20 | | CD8SP-hu-mROO5-1-vL-V5-[hTCRbECD-CD3zECDTM-28z-opt]-F-P2A-IgSP-Apa-CD20-vHH-2HCD25-G4Sx3v2-hu-mROO5-1-vH-Myc-[hTCRaECD-CD3zECDTM-28z-opt2] | 4103 | 14793 |
| CD19 | CD20 | | CD8SP-hu-mROO5-1-vL-V5-[hTCRbECD-CD3zECDTMCP-opt]-F-P2A-IgSP-Apa-CD20-vHH-2HCD25-G4Sx3v2-hu-mROO5-1-vH-Myc4-[hTCRaECD-CD3zECDTM-BBz-opt2] | 4104 | 14794 |
| CD19 | CD20 | | CD8SP-hu-mROO5-1-vL-V5-[hTCRbECD-CD3zECDTM-BBz-opt]-F-P2A-IgSP-Apa-CD20-vHH-2HCD25-G4Sx3v2-hu-mROO5-1-vH-Myc4-[hTCRaECD-CD3zECDTM-BBz-opt2] | 4105 | 14795 |
| CD19 | CD20 | | CD8SP-hu-mROO5-1-vL-CD3zECDTMCP-opt-F-P2A-Spe-IgSP-Apa-CD20-vHH-2HCD25-G4Sx3v2-hu-mROO5-1-vH-Mlu-CD3zECDTMCP-opt2-F-F2A-PAC | 4106 | 14796 |
| CD19 | CD20 | | CD8SP-hu-mROO5-1-vL-[IgCL-TCRg-6MD]-F-P2A-IgSP-Apa-CD20-vHH-2HCD25-G4Sx3v2-hu-mROO5-1-vH-[IgG1-CH1-TCRd-6MD] | 4107 | 14797 |
| CD19 | CD20 | | CD8SP-hu-mROO5-1-vL-[IgCL-TCRb-IAH-6MD]-F-P2A-IgSP-Apa-CD20-vHH-2HCD25-G4Sx3v2-hu-mROO5-1-vH-[IgG1-CH1-TCRa-SDVP-6MD] | 4108 | 14798 |
| CD19 | CD20 | | CD8SP-hu-mROO5-1-vL-[IgCL-TCRb-wt-opt2-6MD]-F-P2A-IgSP-Apa-CD20-vHH-2HCD25-G4Sx3v2-hu-mROO5-1-vH-[IgG1-CH1-TCRa-wt-op2-6MD] | 4109 | 14799 |
| CD19 | CD20 | | IgSP-Apa-CD20-vHH-2HCD25-G4Sx3v2-hu-mROO5-1-(vH-vL)-G3S-CD3e-ECDTMCP-opt2 | 4110 | 14800 |
| CD19 | CD20 | | IgSP-Apa-CD20-vHH-2HCD25-G4Sx3v2-hu-mROO5-1 -(vH-vL)-G3S-CD3d-ECDTMCP-opt2 | 4111 | 14801 |
| CD19 | CD20 | | IgSP-Apa-CD20-vHH-2HCD25-G4Sx3v2-hu-mROO5-1-(vH-vL)-G3S-CD3g-ECDTMCP-opt2 | 4112 | 14802 |
| CD19 | CD20 | | IgSP-Apa-CD20-vHH-2HCD25-G4Sx3v2-hu-mROO5-1-(vH-vL)-G3S-CD3z-ECDTMCP-opt2 | 4113 | 14803 |
| CD19 | CD20 | | IgSP-Apa-CD20-vHH-2HCD25-G4Sx3v2-hu-mROO5-1-vH-[hTCRa-opt2]-F-F2A-BlastR | 4114 | 14804 |
| CD19 | CD20 | | IgSP-Apa-CD20-vHH-2HCD25-G4Sx3v2-hu-mROO5-1-vH-[hTCRa-opt2] | 4115 | 14805 |
| CD19 | CD20 | | IgSP-Apa-CD20-vHH-2HCD25-G4Sx3v2-hu-mROO5-1-vH-Myc-[hTCRa-T48C-opt]-F-F2A-BlastR | 4116 | 14806 |
| CD19 | CD20 | | IgSP-Apa-CD20-vHH-2HCD25-G4Sx3v2-hu-mROO5-1-vH-Myc-[hTCRa-T48C-opt] | 4117 | 14807 |
| CD19 | | CD22 | CD8SP-CD22-FHVH-24-G4Sx3-R1-hu-mROO5-1-vL-Gly-Ser-Linker-hu-mROO5-1-vH-Myc-28z | 4118 | 14808 |
| CD19 | | CD22 | CD8SP-CD22-FHVH-24-G4Sx3-R1-hu-mROO5-1-vL-Gly-Ser-Linker-hu-mROO5-1-vH-Myc-CD8TM-BBz | 4119 | 14809 |
| CD19 | | CD22 | CD8SP-CD22-FHVH-24-G4Sx3-R1-hu-mROO5-1-vL-Gly-Ser-Linker-hu-mROO5-1-vH-Myc-CD8TM-z-P2A-K13-FLAG-T2A-PAC | 4120 | 14810 |
| CD19 | | CD22 | CD8SP-CD22-FHVH-24-G4Sx3-R1-hu-mROO5-1-vL-[hTCRa-CSDVP]-F-F2A-SP-hu-mROO5-1-vH-[hTCRb-KACIAH]-F-P2A-PAC | 4121 | 14811 |
| CD19 | | CD22 | CD8SP-CD22-FHVH-24-G4Sx3-R1-hu-mROO5-1-vL-[hTCRb-KACIAH]-F-P2A-SP-hu-mROO5-1-vH-[hTCRa-CSDVP]-F-F2A-PAC | 4122 | 14812 |
| CD19 | | CD22 | CD8SP-CD22-FHVH-24-G4Sx3-R1-hu-mROO5-1-vL-[hTCRb-S57C]-F-P2A-SP-hu-mROO5-1-vH-[hTCRa-T48C] | 4123 | 14813 |
| CD19 | | CD22 | CD8SP-CD22-FHVH-24-G4Sx3-R1-hu-mROO5-1-vL-[hTCRb-S57C]-F-P2A-SP-hu-mROO5-1-vH-[hTCRa-T48C]-F-F2A-K13-opt | 4124 | 14814 |
| CD19 | | CD22 | CD8SP-CD22-FHVH-24-G4Sx3-R1-hu-mROO5-1-vL-[hTCRa-T48C]-F-P2A-SP-hu-mROO5-1-vH-[hTCRb-S57C] | 4125 | 14815 |
| CD19 | | CD22 | CD8SP-CD22-FHVH-24-G4Sx3-R1-hu-mROO5-1-vL-[hTCRa-T48C]-F-P2A-SP-hu-mROO5-1-vH-[hTCRb-S57C]-F-P2A-K13-opt | 4126 | 14816 |
| CD19 | | CD22 | CD8SP-V5-[hTCRb-KACIAH]-F-P2A-CD8SP-CD22-FHVH-24-G4Sx3-R1-hu-mROO5-1-vL-Gly-Ser-Linker-hu-mROO5-1-vH-Myc-[hTCRa-CSDVP]-F-F2A-PAC | 4127 | 14817 |
| CD19 | | CD22 | CD8SP-MYC-[hTCRa-T48C-opt1]-F-F2A-SP-CD22-FHVH-24-G4Sx3-R1-hu-mROO5-1-vL-Gly-Ser-Linker-hu-mROO5-1-vH-V5-[hTCRb-S57C-opt1]-F-P2A-PAC | 4128 | 14818 |
| CD19 | | CD22 | CD8SP-CD22-FHVH-24-G4Sx3-R1-hu-mROO5-1-vL-[hTCRb-opt2]-F-P2A-SP-hu-mROO5-1-vH-[hTCRa-opt2]-F-F2A-PAC | 4129 | 14819 |
| CD19 | | CD22 | CD8SP-CD22-FHVH-24-G4Sx3-R1-hu-mROO5-1-vL-[hTCRb-opt2]-F-P2A-SP-hu-mROO5-1-vH-Myc-[pretc.Ra-Del48]-F-F2A-PAC | 4130 | 14820 |
| CD19 | | CD22 | CD8SP-[hTCRb-opt2]-F-P2A-CD8SP-CD22-FHVH-24-G4Sx3-R1-hu-mROO5-1-vL-Gly-Ser-Linker-hu-mROO5-1 -vH-Myc4-[pretc. Ra-Del48]-F-F2A-PAC | 4131 | 14821 |
| CD19 | | CD22 | CD8SP-CD22-FHVH-24-G4Sx3-R1-hu-mROO5-1-vL-V5-[hTCRg1-opt]-F-P2A-SP-hu-mROO5-1-vH-Myc-[hTCRd-opt]-F-F2A-PAC | 4132 | 14822 |
| CD19 | | CD22 | CD8SP-CD22-FHVH-24-G4Sx3-R1-hu-mROO5-1-vL-[hTCRd-opt]-F-P2A-SP-hu-mROO5-1-vH-[hTCRg1-opt] | 4133 | 14823 |
| CD19 | | CD22 | CD8SP-V5-[hTCRg1-opt]-F-P2A-CD8SP-CD22-FHVH-24-G4Sx3-R1-hu-mROO5-1-vL-Gly-Ser-Linker-hu-mROO5-1-vH-Myc-[hTCRd-opt]-F-F2A-PAC | 4134 | 14824 |
| CD19 | | CD22 | CD8-CD22-FHVH-24-G4Sx3-R1-hu-mROO5-1-vL-IgCL-CD3zECDTMCP-opt-F-P2A-Spe-SP-hu-mROO5-1-vH-IgG1-CH1-CD3zECDTMCP-opt2-F-F2A-PAC | 4135 | 14825 |
| CD19 | | CD22 | CD8SP-CD22-FHVH-24-G4Sx3-R1-hu-mROO5-1-vL-[hTCRbECD-CD3zECDTMCP-opt]-F-P2A-SP-hu-mROO5-1-vH-[hTCRaECD-CD3zECDTMCP-opt2] | 4136 | 14826 |
| CD19 | | CD22 | CD8SP-CD22-FHVH-24-G4Sx3-R1-hu-mROO5-1-vL-[hTCRb-KAC-ECD-CD3zECDTMCP-opt]-F-P2A-SP-hu-mROO5-1-vH-[hTCRa-CSDVP-ECD-CD3zECDTMCP-opt2] | 4137 | 14827 |
| CD19 | | CD22 | CD8SP-CD22-FHVH-24-G4Sx3-R1-hu-mROO5-1-vL-V5-[hTCRbECD-CD3zECDTMCP-opt]-F-P2A-SP-hu-mROO5-1-vH-Myc-[hTCRaECD-CD3zECDTM-28z-opt2] | 4138 | 14828 |
| CD19 | | CD22 | CD8SP-CD22-FHVH-24-G4Sx3-R1-hu-mROO5-1-vL-V5-[hTCRbECD-CD3zECDTM-28z-opt]-F-P2A-SP-hu-mROO5-1-vH-Myc-[hTCRaECD-CD3zECDTM-28z-opt2] | 4139 | 14829 |
| CD19 | | CD22 | CD8SP-CD22-FHVH-24-G4Sx3-R1-hu-mROO5-1-vL-V5-[hTCRbECD-CD3zECDTMCP-opt]-F-P2A-SP-hu-mROO5-1-vH-Myc4-[hTCRaECD-CD3zECDTM-BBz-opt2] | 4140 | 14830 |
| CD19 | | CD22 | CD8SP-CD22-FHVH-24-G4Sx3-R1-hu-mROO5-1-vL-V5-[hTCRbECD-CD3zECDTM-BBz-opt]-F-P2A-SP-hu-mROO5-1-vH-Myc4-[hTCRaECD-CD3zECDTM-BBz-opt2] | 4141 | 14831 |
| CD19 | | CD22 | CD8-CD22-FHVH-24-G4Sx3-R1-hu-mROO5-1-vL-CD3zECDTMCP-opt-F-P2A-Spe-SP-hu-mROO5-1-vH-M1u-CD3zECDTMCP-opt2-F-F2A-PAC | 4142 | 14832 |
| CD19 | | CD22 | CD8SP-CD22-FHVH-24-G4Sx3-R1-hu-mROO5-1-vL-[IgCL-TCRg-6MD]-F-P2A-SP-hu-mROO5-1-vH-[IgG1-CH1-TCRd-6MD] | 4143 | 14833 |
| CD19 | | CD22 | CD8SP-CD22-FHVH-24-G4Sx3-R1-hu-mROO5-1-vL-[IgCL-TCRb-IAH-6MD]-F-P2ASP-hu-mROO5-1-vH-[IgG1-CH1-TCRa-SDVP-6MD] | 4144 | 14834 |
| CD19 | | CD22 | CD8SP-CD22-FHVH-24-G4Sx3-R1-hu-mROO5 -1-vL- [IgCL-TCRb-wt-opt2-6MD]-F-P2A-SP-hu-mROO5-1 -vH-[IgG1 -CH1 -TCRa-wt-op2-6MD] | 4145 | 14835 |
| CD19 | | CD22 | CD8SP-CD22-FHVH-24-G4Sx3-R1-hu-mROO5-1-(vL-vH)-CD3e-ECDTMCP-opt2 | 4146 | 14836 |
| CD19 | | CD22 | CD8SP-CD22-FHVH-24-G4Sx3-R1-hu-mROO5-1-(vL-vH)-CD3d-ECDTMCP-opt2 | 4147 | 14837 |
| CD19 | | CD22 | CD8 SP-CD22-FHVH-24-G4Sx3 -R1 -hu-mROO5-1-(vL-vH)-CD3g-ECDTMCP-opt2 | 4148 | 14838 |
| CD19 | | CD22 | CD8 SP-CD22-FHVH-24-G4Sx3 -R1 -hu-mROO5-1-(vL-vH)-CD3z-ECDTMCP-opt2 | 4149 | 14839 |
| CD19 | | CD22 | CD8SP-CD22-FHVH-24-G4Sx3-R1-hu-mROO5-1-vL-Gly-Ser-Linker-hu-mROO5-1-vH-[hTCRa-opt2]-F-F2A-PAC | 4150 | 14840 |
| CD19 | | CD22 | CD8SP-CD22-FHVH-24-G4Sx3-R1-hu-mROO5-1-vL-Gly-Ser-Linker-hu-mROO5-1-vH-[hTCRb-opt2]-F-F2A-PAC | 4151 | 14841 |
| CD19 | | CD22 | CD8SP-CD22-FHVH-24-G4Sx3-R1-hu-mROO5-1-vL-Gly-Ser-Linker-hu-mROO5-1-vH-Myc4-[pretc.Ra-Del48]-F-F2A-PAC | 4152 | 14842 |
| CD19 | | CD22 | CD8SP-CD22-FHVH-24-G4Sx3-R1-hu-mROO5-1-vL-[hTCRb-opt2]-F-P2A-PAC | 4153 | 14843 |
| CD19 | | CD22 | CD8SP-CD22-FHVH-24-G4Sx3-R1-hu-mROO5-1-vL-[hTCRb-opt2] | 4154 | 14844 |
| CD19 | | CD22 | IgHSP-hu-mROO5-1-vH-[hTCRa-opt2]-F-F2A-BlastR | 4155 | 14845 |
| CD19 | | CD22 | IgHSP-hu-mROO5-1-vH-[hTCRa-opt2] | 4156 | 14846 |
| CD19 | | CD22 | CD8SP-CD22-FHVH-24-G4Sx3-R1-hu-mROO5-1-vL-V5-[hTCRb-S57C-opt]-F-P2A-PAC | 4157 | 14847 |
| CD19 | | CD22 | CD8SP-CD22-FHVH-24-G4Sx3-R1-hu-mROO5-1-vL-V5-[hTCRb-S57C-opt] | 4158 | 14848 |
| CD19 | | | IgHSP-hu-mROO5-1-vH-Myc-[hTCRa-T48C-opt]-F-F2A-BlastR | 4159 | 14849 |
| CD19 | | | IgHSP-hu-mROO5-1-vH-Myc-[hTCRa-T48C-opt] | 4160 | 14850 |
| CD19 | | CD22 | CD8SP-CD22-FHVH-24-G4Sx3-R1-hu-mROO5-1-vL-Gly-Ser-Linker-hu-mROO5-1-vH-[hTCRa-SDVP]-F-F2A-PAC | 4161 | 14851 |
| CD19 | | CD22 | CD8SP-CD22-FHVH-24-G4Sx3-R1-hu-mROO5-1-vL-Gly-Ser-Linker-hu-mROO5-1-vH-[hTCRb-KAIAH]-F-P2A-PAC | 4162 | 14852 |
| CD19 | CD20 | CD22 | CD8SP-CD22-FHVH-24-G4Sx3-R1-hu-mROO5-1-vL-[hTCRa-CSDVP]-F-F2A-IgSP-Apa-CD20-vHH-2HCD25-G4Sx3v2-hu-mROO5-1-vH-[hTCRb-KACIAH]-F-P2A-PAC | 4163 | 14853 |
| CD19 | CD20 | CD22 | CD8SP-CD22-FHVH-24-G4Sx3-R1-hu-mROO5-1-vL-[hTCRb-KACIAH]-F-P2A-IgSP-Apa-CD20-vHH-2HCD25-G4Sx3v2-hu-mROO5-1-vH-[hTCRa-CSDVP]-F-F2A-PAC | 4164 | 14854 |
| CD19 | CD20 | CD22 | CD8SP-CD22-FHVH-24-G4Sx3-R1-hu-mROO5-1-vL-[hTCRb-S57C]-F-P2A-IgSP-Apa-CD20-vHH-2HCD25-G4Sx3v2-hu-mROO5-1-vH-[hTCRa-T48C]-F-F2A-PAC | 4165 | 14855 |
| CD19 | CD20 | CD22 | CD8SP-CD22-FHVH-24-G4Sx3-R1-hu-mROO5-1-vL-[hTCRb-S57C]-F-P2A-IgSP-Apa-CD20-vHH-2HCD25-G4Sx3v2-hu-mROO5-1-vH-[hTCRa-T48C] | 4166 | 14856 |
| CD19 | CD20 | CD22 | CD8SP-CD22-FHVH-24-G4Sx3-R1-hu-mROO5-1-vL-[hTCRb-S57C]-F-P2A-IgSP-Apa-CD20-vHH-2HCD25-G4Sx3v2-hu-mROO5-1-vH-[hTCRa-T48C]-F-F2A-K13-opt | 4167 | 14857 |
| CD19 | CD20 | CD22 | CD8SP-CD22-FHVH-24-G4Sx3-R1-hu-mROO5-1-vL-[hTCRa-T48C]-F-P2A-IgSP-Apa-CD20-vHH-2HCD25-G4Sx3v2-hu-mROO5-1-vH-[hTCRb-S57C] | 4168 | 14858 |
| CD19 | CD20 | CD22 | CD8SP-CD22-FHVH-24-G4Sx3-R1-hu-mROO5-1-vL-[hTCRa-T48C]-F-P2A-IgSP-Apa-CD20-vHH-2HCD25-G4Sx3v2-hu-mROO5-1-vH-[hTCRb-S57C]-F-P2A-K13-opt | 4169 | 14859 |
| CD19 | CD20 | CD22 | CD8SP-CD22-FHVH-24-G4Sx3-R1-hu-mROO5-1-vL-[hTCRb-opt2]-F-P2A-IgSP-Apa-CD20-vHH-2HCD25-G4Sx3v2-hu-mROO5-1-vH-[hTCRa-opt2]-F-F2A-PAC | 4170 | 14860 |
| CD19 | CD20 | CD22 | CD8SP-CD22-FHVH-24-G4Sx3-R1-hu-mROO5-1-vL-[hTCRb-opt2]-F-P2A-IgSP-Apa-CD20-vHH-2HCD25-G4Sx3v2-hu-mROO5-1-vH-Myc-[pretc.Ra-Del48]-F-F2A-PAC | 4171 | 14861 |
| CD19 | CD20 | CD22 | CD8SP-CD22-FHVH-24-G4Sx3-R1-hu-mROO5-1-vL-V5-[hTCRg 1 -opt] -F-P2A-IgSP-Apa-CD20-vHH-2HCD25-G4Sx3v2-hu-mROO5-1-vH-Myc-[hTCRd-opt]-F-F2A-PAC | 4172 | 14862 |
| CD19 | CD20 | CD22 | CD8SP-CD22-FHVH-24-G4Sx3-R1-hu-mROO5-1-vL-[hTCRd-opt]-F-P2A-IgSP-Apa-CD20-vHH-2HCD25-G4Sx3v2-hu-mROO5-1-vH-[hTCRg1-opt] | 4173 | 14863 |
| CD19 | CD20 | CD22 | CD8SP-CD22-FHVH-24-G4Sx3-R1-hu-mROO5-1-vL-IgCL-CD3zECDTMCP-opt-F-P2A-Spe-IgSP-Apa-CD20-vHH-2HCD25-G4Sx3v2-hu-mROO5-1-vH-IgG1-CH1-CD3zECDTMCP-opt2-F-F2A-PAC | 4174 | 14864 |
| CD19 | CD20 | CD22 | CD8SP-CD22-FHVH-24-G4Sx3-R1-hu-mROO5-1-vL-[hTCRbECD-CD3zECDTMCP-opt]-F-P2A-IgSP-Apa-CD20-vHH-2HCD25-G4Sx3v2-hu-mROO5-1-vH-[hTCRaECD-CD3zECDTMCP-opt2] | 4175 | 14865 |
| CD19 | CD20 | CD22 | CD8SP-CD22-FHVH-24-G4Sx3-R1-hu-mROO5-1-vL-[hTCRb-KAC-ECD-CD3zECDTMCP-opt]-F-P2A-IgSP-Apa-CD20-vHH-2HCD25-G4Sx3v2-hu-mROO5-1-vH-[hTCRa-CSDVP-ECD-CD3zECDTMCP-opt2] | 4176 | 14866 |
| CD19 | CD20 | CD22 | CD8SP-CD22-FHVH-24-G4Sx3-R1-hu-mROO5-1-vL-V5-[hTCRbECD-CD3zECDTMCP-opt]-F-P2A-IgSP-Apa-CD20-vHH-2HCD25-G4Sx3v2-hu-mROO5-1-vH-Myc-[hTCRaECD-CD3zECDTM-28z-opt2] | 4177 | 14867 |
| CD19 | CD20 | CD22 | CD8SP-CD22-FHVH-24-G4Sx3-R1-hu-mROO5-1-vL-V5-[hTCRbECD-CD3zECDTM-28z-opt]-F-P2A-IgSP-Apa-CD20-vHH-2HCD25-G4Sx3v2-hu-mROO5-1-vH-Myc-[hTCRaECD-CD3zECDTM-28z-opt2] | 4178 | 14868 |
| CD19 | CD20 | CD22 | CD8SP-CD22-FHVH-24-G4Sx3-R1-hu-mROO5-1-vL-V5-[hTCRbECD-CD3zECDTMCP-opt]-F-P2A-IgSP-Apa-CD20-vHH-2HCD25-G4Sx3v2-hu-mROO5-1-vH-Myc4-[hTCRaECD-CD3zECDTM-BBz-opt2] | 4179 | 14869 |
| CD19 | CD20 | CD22 | CD8SP-CD22-FHVH-24-G4Sx3-R1-hu-mROO5-1-vL-V5-[hTCRbECD-CD3zECDTM-BBz-opt]-F-P2A-IgSP-Apa-CD20-vHH-2HCD25-G4Sx3v2-hu-mROO5-1-vH-Myc4-[hTCRaECD-CD3zECDTM-BBz-opt2] | 4180 | 14870 |
| CD19 | CD20 | CD22 | CD8SP-CD22-FHVH-24-G4Sx3-R1-hu-mROO5-1-vL-CD3zECDTMCP-opt-F-P2A-Spe-IgSP-Apa-CD20-vHH-2HCD25-G4Sx3v2-hu-mROO5-1-vH-Mlu-CD3zECDTMCP-opt2-F-F2A-PAC | 4181 | 14871 |
| CD19 | CD20 | CD22 | CD8SP-CD22-FHVH-24-G4Sx3-R1-hu-mROO5-1-vL-[IgCL-TCRg-6MD]-F-P2A-IgSP-Apa-CD20-vHH-2HCD25-G4Sx3v2-hu-mROO5-1-vH-[IgG1-CH1-TCRd-6MD] | 4182 | 14872 |
| CD19 | CD20 | CD22 | CD8SP-CD22-FHVH-24-G4Sx3-R1-hu-mROO5-1-vL-[IgCL-TCRb-IAH-6MD]-F-P2A-IgSP-Apa-CD20-vHH-2HCD25-G4Sx3v2-hu-mROO5-1-vH- [IgG1 -CH1 -TCRa-SDVP-6MD] | 4183 | 14873 |
| CD19 | CD20 | CD22 | CD8SP-CD22-FHVH-24-G4Sx3-R1-hu-mROO5-1-vL-[IgCL-TCRb-wt-opt2-6MD]-F-P2A-IgSP-Apa-CD20-vHH-2HCD25-G4Sx3v2-hu-mROO5-1-vH-[IgG1 -CH1 -TCRa-wt-op2-6MD] | 4184 | 14874 |
| | CD20 | CD22 | CD8SP-CD22-FHVH-24-[IgCL-TCRb-wt-opt2-6MD]-F-P2A-IgSP-Apa-CD20-2HCD25-VHH-[IgG1 -CH1 -TCRa-wt-opt2-6MD]-F-F2A-PAC | 4185 | 14875 |
| | CD20 | CD22 | CD8SP-CD22-FHVH-24-[IgCL-TCRb-wt-opt2-6MD]-F-P2A-IgSP-Apa-CD20-2HCD25-VHH-[IgG1 -CH1 -TCRa-wt-opt2-6MD] | 4186 | 14876 |
| | CD20 | CD22 | CD8SP-CD22-FHVH-24-GS-[TCRb-wt-opt2-6MD]-F-P2A-IgSP-Apa-CD20-2HCD25-VHH-GS-[TCRa-wt-opt2-6MD]-F-F2A-PAC | 4187 | 14877 |
| | CD20 | CD22 | CD8SP-CD22-FHVH-24-GS-[TCRb-wt-opt2-6MD]-F-P2A-IgSP-Apa-CD20-2HCD25-VHH-GS-[TCRa-wt-opt2-6MD] | 4188 | 14878 |
| | CD20 | CD22 | CD8SP-CD22-FHVH-24-IgG1-Hinge-[TCRb-wt-opt2-6MD]-F-P2A-IgSP-Apa-CD20-2HCD25-VHH-GS-[TCRa-wt-opt2-6MD]-F-F2A-PAC | 4189 | 14879 |
| | CD20 | CD22 | CD8SP-CD22-FHVH-24-GS-[TCRb-wt-opt2-6MD]-F-P2A-IgSP-Apa-CD20-2HCD25-VHH-IgG1 -Hinge-v2-[TCRa-wt-opt2-6MD]-F-F2A-PAC | 4190 | 14880 |
| | CD20 | CD22 | CD8SP-CD22-FHVH-24-IgG1-Hinge-[TCRb-wt-opt2-6MD]-F-P2A-IgSP-Apa-CD20-2HCD25-VHH-IgG1-Hinge-v2-[TCRa-wt-opt2-6MD]-F-F2A-PAC | 4191 | 14881 |
| | CD20 | CD22 | CD8SP-CD22-FHVH-24-IgG1-Hinge-[TCRb-wt-opt2-6MD]-F-P2A-IgSP-Apa-CD20-2HCD25-VHH-IgG1 -Hinge-v2-[TCRa-wt-opt2-6MD] | 4192 | 14882 |
| | CD20 | CD22 | CD8SP-CD22-FHVH-24-GS-[TCRb-wt-opt2-6MD]-F-P2A-IgSP-Apa-CD20-2HCD25-VHH-IgG1 -Hinge-v2-[TCRa-wt-opt2-6MD] | 4193 | 14883 |
| | CD20 | CD22 | CD8SP-CD22-FHVH-24-[IgCL-TCRg-6MD]-F-P2A-IgSP-Apa-CD20-2HCD25-VHH-[IgG1-CH1-TCRd-6MD]-F-F2A-PAC | 4194 | 14884 |
| | CD20 | CD22 | CD8SP-CD22-FHVH-24-[IgCL-TCRg-6MD]-F-P2A-IgSP-Apa-CD20-2HCD25-VHH-[IgG1-CH1-TCRd-6MD] | 4195 | 14885 |
| | CD20 | CD22 | CD8SP-CD22-FHVH-24-GS-[TCRg-6MD]-F-P2A-IgSP-Apa-CD20-2HCD25-VHH-GS-[TCRd-6MD]-F-F2A-PAC | 4196 | 14886 |
| | CD20 | CD22 | CD8SP-CD22-FHVH-24-GS-[TCRg-6MD]-F-P2A-IgSP-Apa-CD20-2HCD25-VHH-GS-[TCRd-6MD] | 4197 | 14887 |
| | CD20 | CD22 | CD8SP-CD22-FHVH-24-IgG1-Hinge-[TCRg-6MD]-F-P2A-IgSP-Apa-CD20-2HCD25-VHH-GS- [TCRd-6MD] -F-F2A-P AC | 4198 | 14888 |
| | CD20 | CD22 | CD8SP-CD22-FHVH-24-GS-[TCRg-6MD]-F-P2A-IgSP-Apa-CD20-2HCD25-VHH-IgG1-Hinge-v2-[TCRd-6MD]-F-F2A-PAC | 4199 | 14889 |
| | CD20 | CD22 | CD8SP-CD22-FHVH-24-IgG1-Hinge-[TCRg-6MD]-F-P2A-IgSP-Apa-CD20-2HCD25-VHH-IgG1-Hinge-v2-[TCRd-6MD]-F-F2A-PAC | 4200 | 14890 |
| | CD20 | CD22 | CD8SP-CD22-FHVH-24-IgG1-Hinge-[TCRg-6MD]-F-P2A-IgSP-Apa-CD20-2HCD25-VHH-IgG1 -Hinge-v2- [TCRd-6MD] | 4201 | 14891 |
| | CD20 | CD22 | CD8SP-CD22-FHVH-24-GS-[TCRg-6MD]-F-P2A-IgSP-Apa-CD20-2HCD25-VHH-IgG1-Hinge-v2-[TCRd-6MD] | 4202 | 14892 |
| | CD20 | CD22 | CD8SP-CD22-FHVH-24-GS-[TCRg-7MD]-F-P2A-IgSP-Apa-CD20-2HCD25-VHH-GS-[TCRd-6MD]-F-F2A-PAC | 4203 | 14893 |
| | CD20 | CD22 | CD8SP-CD22-FHVH-24-GS-[TCRg-6MD]-F-P2A-IgSP-Apa-CD20-2HCD25-VHH-GS-[TCRd-7MD]-F-F2A-PAC | 4204 | 14894 |
| | CD20 | CD22 | CD8SP-CD22-FHVH-24-GS-[TCRg-7MD]-F-P2A-IgSP-Apa-CD20-2HCD25-VHH-GS-[TCRd-7MD]-F-F2A-PAC | 4205 | 14895 |
| | CD20 | CD22 | CD8SP-CD22-FHVH-24-GS-[TCRg-7MD]-F-P2A-IgSP-Apa-CD20-2HCD25-VHH-GS-[TCRd-7MD] | 4206 | 14896 |
| | CD20 | CD22 | CD8SP-CD22-FHVH-24-IgG1-Hinge-[TCRg-7MD]-F-P2A-IgSP-Apa-CD20-2HCD25-VHH-GS-[TCRd-7MD]-F-F2A-PAC | 4207 | 14897 |
| | CD20 | CD22 | CD8SP-CD22-FHVH-24-IgG1-Hinge-[TCRg-7MD]-F-P2A-IgSP-Apa-CD20-2HCD25-VHH-IgG1-Hinge-v2-[TCRd-7MD]-F-F2A-PAC | 4208 | 14898 |
| | CD20 | CD22 | CD8SP-CD22-FHVH-24-IgG1-Hinge-[TCRg-7MD]-F-P2A-IgSP-Apa-CD20-2HCD25-VHH-IgG1 -Hinge-v2-[TCRd-7MD] | 4209 | 14899 |
| | | CD22 | CD8SP-CD22-FHVH-24-[IgCL-TCRb-6MD] | 4210 | 14900 |
| | CD20 | CD22 | IgSP-Apa-CD20-2HCD25-VHH-[IgG1-CH1-TCRa-wt-opt2-6MD] | 4211 | 14901 |
| | | CD22 | CD8SP-CD22-FHVH-24-[IgCL-TCRg-6MD] | 4212 | 14902 |
| | CD20 | CD22 | IgSP-Apa-CD20-2HCD25-VHH-[IgG1-CH1-TCRd-6MD] | 4213 | 14903 |

TABLE 29

Bispecific and Trispecific SARs Constructs targeting CD20 and a second antigen targeted by a CAR or a SIR

| 1st (SIR) Target | 2nd target | 3rd target | Name of fragment | SEQ ID NO (DNA) | SEQ ID NO (PRT) |
|---|---|---|---|---|---|
| CD19 | CD20 | | IgSP-Apa-CD20-vHH-2HCD25-G4Sx3v2-hu-mROO5-1-vH-Gly-Ser-Linker-vL-Myc-CD8TM-BBz | 4087 | 14777 |
| CD19 | CD20 | | CD8SP-hu-mROO5-1-vL-[hTCRa-CSDVP]-F-F2A-IgSP-Apa-CD20-vHH-2HCD25-G4Sx3v2-hu-mROO5-1-vH-[hTCRb-KACIAH]-F-P2A-PAC | 4088 | 14778 |
| CD19 | CD20 | | CD8SP-hu-mROO5-1-vL-[hTCRb-KACIAH]-F-P2A-IgSP-Apa-CD20-vHH-2HCD25-G4Sx3v2-hu-mROO5-1-vH-[hTCRa-CSDVP]-F-F2A-PAC | 4089 | 14779 |
| CD19 | CD20 | | CD8SP-hu-mROO5-1-vL-[hTCRb-S57C]-F-P2A-IgSP-Apa-CD20-vHH-2HCD25-G4Sx3v2-hu-mROO5-1-vH-[hTCRa-T48C]-F-F2A-PAC | 4090 | 14780 |
| CD19 | CD20 | | CD8SP-hu-mROO5-1-vL-[hTCRb-S57C]-F-P2A-IgSP-Apa-CD20-vHH-2HCD25-G4Sx3v2-hu-mROO5-1-vH-[hTCRa-T48C] | 4091 | 14781 |
| CD19 | CD20 | | CD8SP-hu-mROO5-1-vL-[hTCRb-S57C]-F-P2A-IgSP-Apa-CD20-vHH-2HCD25-G4Sx3v2-hu-mROO5-1-vH-[hTCRa-T48C]-F-F2A-K13-opt | 4092 | 14782 |
| CD19 | CD20 | | CD8SP-hu-mROO5-1-vL-[hTCRa-T48C]-F-P2A-IgSP-Apa-CD20-vHH-2HCD25-G4Sx3v2-hu-mROO5-1-vH-[hTCRb-S57C] | 4093 | 14783 |
| CD19 | CD20 | | CD8SP-hu-mROO5-1-vL-[hTCRa-T48C]-F-P2A-IgSP-Apa-CD20-vHH-2HCD25-G4Sx3v2-hu-mROO5-1-vH-[hTCRb-S57C]-F-P2A-K13-opt | 4094 | 14784 |
| CD19 | CD20 | | CD8SP-hu-mROO5-1 -vL-[hTCRb-opt2]-F-P2A-IgSP-Apa-CD20-vHH-2HCD25-G4Sx3v2-hu-mROO5-1-vH-[hTCRa-opt2]-F-F2A-PAC | 4095 | 14785 |
| CD19 | CD20 | | CD8SP-hu-mROO5-1 -vL-[hTCRb-opt2]-F-P2A-IgSP-Apa-CD20-vHH-2HCD25-G4Sx3v2-hu-mROO5-1-vH-Myc-[pretc.Ra-Del48]-F-F2A-PAC | 4096 | 14786 |
| CD19 | CD20 | | CD8SP-hu-mROO5-1-vL-V5-[hTCRg1-opt]-F-P2A-IgSP-Apa-CD20-vHH-2HCD25-G4Sx3v2-hu-mROO5-1-vH-Myc-[hTCRd-opt]-F-F2A-PAC | 4097 | 14787 |
| CD19 | CD20 | | CD8SP-hu-mROO5-1-vL-[hTCRd-opt]-F-P2A-IgSP-Apa-CD20-vHH-2HCD25-G4Sx3v2-hu-mROO5-1-vH-[hTCRg1-opt] | 4098 | 14788 |
| CD19 | CD20 | | CD8-hu-mROO5-1-vL-IgCL-CD3zECDTMCP-opt-F-P2A-Spe-IgSP-Apa-CD20-vHH-2HCD25-G4Sx3v2-hu-mROO5-1-vH-IgG1-CH1-CD3zECDTMCP-opt2-F-F2A-PAC | 4099 | 14789 |
| CD19 | CD20 | | CD8SP-hu-mROO5-1-vL-[hTCRbECD-CD3zECDTMCP-opt]-F-P2A-IgSP-Apa-CD20-vHH-2HCD25-G4Sx3v2-hu-mROO5-1-vH-[hTCRaECD-CD3zECDTMCP-opt2] | 4100 | 14790 |
| CD19 | CD20 | | CD8SP-hu-mROO5-1-vL-[hTCRb-KAC-ECD-CD3zECDTMCP-opt]-F-P2A-IgSP-Apa-CD20-vHH-2HCD25-G4Sx3v2-hu-mROO5-1-vH-[hTCRa-CSDVP-ECD-CD3zECDTMCP-opt2] | 4101 | 14791 |
| CD19 | CD20 | | CD8SP-hu-mROO5-1-vL-V5-[hTCRbECD-CD3zECDTMCP-opt]-F-P2A-IgSP-Apa-CD20-vHH-2HCD25-G4Sx3v2-hu-mROO5-1-vH-Myc-[hTCRaECD-CD3zECDTM-28z-opt2] | 4102 | 14792 |
| CD19 | CD20 | | CD8SP-hu-mROO5-1-vL-V5-[hTCRbECD-CD3zECDTM-28z-opt]-F-P2A-IgSP-Apa-CD20-vHH-2HCD25-G4Sx3v2-hu-mROO5-1-vH-Myc-[hTCRaECD-CD3zECDTM-28z-opt2] | 4103 | 14793 |
| CD19 | CD20 | | CD8SP-hu-mROO5-1-vL-V5-[hTCRbECD-CD3zECDTMCP-opt]-F-P2A-IgSP-Apa-CD20-vHH-2HCD25-G4Sx3v2-hu-mROO5-1-vH-Myc4-[hTCRaECD-CD3zECDTM-BBz-opt2] | 4104 | 14794 |
| CD19 | CD20 | | CD8SP-hu-mROO5-1-vL-V5-[hTCRbECD-CD3zECDTM-BBz-opt]-F-P2A-IgSP-Apa-CD20-vHH-2HCD25-G4Sx3v2-hu-mROO5-1-vH-Myc4-[hTCRaECD-CD3zECDTM-BBz-opt2] | 4105 | 14795 |
| CD19 | CD20 | | CD8SP-hu-mROO5-1-vL-CD3zECDTMCP-opt-F-P2A-Spe-IgSP-Apa-CD20-vHH-2HCD25-G4Sx3v2-hu-mROO5-1-vH-Mlu-CD3zECDTMCP-opt2-F-F2A-PAC | 4106 | 14796 |
| CD19 | CD20 | | CD8SP-hu-mROO5-1-vL-[IgCL-TCRg-6MD]-F-P2A-IgSP-Apa-CD20-vHH-2HCD25-G4Sx3v2-hu-mROO5-1-vH-[IgG1-CH1-TCRd-6MD] | 4107 | 14797 |
| CD19 | CD20 | | CD8SP-hu-mROO5-1-vL-[IgCL-TCRb-IAH-6MD]-F-P2A-IgSP-Apa-CD20-vHH-2HCD25-G4Sx3v2-hu-mROO5-1-vH-[IgG1-CH1-TCRa- SDVP-6MD] | 4108 | 14798 |
| CD19 | CD20 | | CD8SP-hu-mROO5-1-vL-[IgCL-TCRb-wt-opt2-6MD]-F-P2A-IgSP-Apa-CD20-vHH-2HCD25-G4Sx3v2-hu-mROO5-1-vH-[IgG1-CH1-TCRa-wt-op2-6MD] | 4109 | 14799 |
| CD19 | CD20 | | IgSP-Apa-CD20-vHH-2HCD25-G4Sx3v2-hu-mROO5-1-(vH-vL)-G3S-CD3e-ECDTMCP-opt2 | 4110 | 14800 |
| CD19 | CD20 | | IgSP-Apa-CD20-vHH-2HCD25-G4Sx3v2-hu-mROO5-1-(vH-vL)-G3S-CD3d-ECDTMCP-opt2 | 4111 | 14801 |
| CD19 | CD20 | | IgSP-Apa-CD20-vHH-2HCD25-G4Sx3v2-hu-mROO5-1-(vH-vL)-G3S-CD3g-ECDTMCP-opt2 | 4112 | 14802 |
| CD19 | CD20 | | IgSP-Apa-CD20-vHH-2HCD25-G4Sx3v2-hu-mROO5-1-(vH-vL)-G3S-CD3z-ECDTMCP-opt2 | 4113 | 14803 |
| CD19 | CD20 | | IgSP-Apa-CD20-vHH-2HCD25-G4Sx3v2-hu-mROO5-1-vH-[hTCRa-opt2]-F-F2A-BlastR | 4114 | 14804 |
| CD19 | CD20 | | IgSP-Apa-CD20-vHH-2HCD25-G4Sx3v2-hu-mROO5-1-vH-[hTCRa-opt2] | 4115 | 14805 |
| CD19 | CD20 | | IgSP-Apa-CD20-vHH-2HCD25-G4Sx3v2-hu-mROO5-1-vH-Myc-[hTCRa-T48C-opt]-F-F2A-BlastR | 4116 | 14806 |
| CD19 | CD20 | | IgSP-Apa-CD20-vHH-2HCD25-G4Sx3v2-hu-mROO5-1-vH-Myc-[hTCRa-T48C-opt] | 4117 | 14807 |
| CD19 | | CD22 | CD8SP-CD22-FHVH-24-G4Sx3-R1-hu-mROO5-1-vL-Gly-Ser-Linker-hu-mROO5-1-vH-Myc-28z | 4118 | 14808 |
| CD19 | | CD22 | CD8SP-CD22-FHVH-24-G4Sx3-R1-hu-mROO5-1-vL-Gly-Ser-Linker-hu-mROO5-1-vH-Myc-CD8TM-BBz | 4119 | 14809 |
| CD19 | | CD22 | CD8SP-CD22-FHVH-24-G4Sx3-R1-hu-mROO5-1-vL-Gly-Ser-Linker-hu-mROO5-1-vH-Myc-CD8TM-z-P2A-K13-FLAG-T2A-PAC | 4120 | 14810 |
| CD19 | | CD22 | CD8SP-CD22-FHVH-24-G4Sx3-R1-hu-mROO5-1-vL-[hTCRa-CSDVP]-F-F2A-SP-hu-mROO5-1-vH-[hTCRb-KACIAH]-F-P2A-PAC | 4121 | 14811 |
| CD19 | | CD22 | CD8SP-CD22-FHVH-24-G4Sx3-R1-hu-mROO5-1-vL-[hTCRb-KACIAH]-F-P2A-SP-hu-mROO5-1-vH-[hTCRa-CSDVP]-F-F2A-PAC | 4122 | 14812 |
| CD19 | | CD22 | CD8SP-CD22-FHVH-24-G4Sx3-R1-hu-mROO5-1-vL-[hTCRb-S57C]-F-P2A-SP-hu-mROO5-1-vH-[hTCRa-T48C] | 4123 | 14813 |
| CD19 | | CD22 | CD8SP-CD22-FHVH-24-G4Sx3-R1-hu-mROO5-1-vL-[hTCRb-S57C]-F-P2A-SP-hu-mROO5-1-vH-[hTCRa-T48C]-F-F2A-K13-opt | 4124 | 14814 |
| CD19 | | CD22 | CD8SP-CD22-FHVH-24-G4Sx3-R1-hu-mROO5-1-vL-[hTCRa-T48C]-F-P2A-SP-hu-mROO5-1-vH-[hTCRb-S57C] | 4125 | 14815 |
| CD19 | | CD22 | CD8SP-CD22-FHVH-24-G4Sx3-R1-hu-mROO5-1-vL-[hTCRa-T48C]-F-P2A-SP-hu-mROO5-1-vH-[hTCRb-S57C]-F-P2A-K13-opt | 4126 | 14816 |
| CD19 | | CD22 | CD8SP-V5-[hTCRb-KACIAH]-F-P2A-CD8SP-CD22-FHVH-24-G4Sx3-R1-hu-mROO5-1-vL-Gly-Ser-Linker-hu-mROO5-1-vH-Myc-[hTCRa-CSDVP]-F-F2A-PAC | 4127 | 14817 |
| CD19 | | CD22 | CD8SP-MYC-[hTCRa-T48C-opt1]-F-F2A-SP-CD22-FHVH-24-G4Sx3-R1-hu-mROO5-1-vL-Gly-Ser-Linker-hu-mROO5-1-vH-V5-[hTCRb-S57C-opt1]-F-P2A-PAC | 4128 | 14818 |
| CD19 | | CD22 | CD8SP-CD22-FHVH-24-G4Sx3-R1-hu-mROO5-1-vL-[hTCRb-opt2]-F-P2A-SP-hu-mROO5-1-vH-[hTCRa-opt2]-F-F2A-PAC | 4129 | 14819 |
| CD19 | | CD22 | CD8SP-CD22-FHVH-24-G4Sx3-R1-hu-mROO5-1-vL-[hTCRb-opt2]-F-P2A-SP-hu-mROO5-1-vH-Myc-[pretc.Ra-Del48]-F-F2A-PAC | 4130 | 14820 |
| CD19 | | CD22 | CD8SP-[hTCRb-opt2]-F-P2A-CD8SP-CD22-FHVH-24-G4Sx3-R1-hu-mROO5-1-vL-Gly-Ser-Linker-hu-mROO5-1 -vH-Myc4-[pretc. Ra-Del48]-F-F2A-PAC | 4131 | 14821 |
| CD19 | | CD22 | CD8SP-CD22-FHVH-24-G4Sx3-R1-hu-mROO5-1-vL-V5-[hTCRg1-opt]-F-P2A-SP-hu-mROO5-1-vH-Myc-[hTCRd-opt]-F-F2A-PAC | 4132 | 14822 |
| CD19 | | CD22 | CD8SP-CD22-FHVH-24-G4Sx3-R1-hu-mROO5-1-vL-[hTCRd-opt]-F-P2A-SP-hu-mROO5-1-vH-[hTCRg1-opt] | 4133 | 14823 |
| CD19 | | CD22 | CD8SP-V5-[hTCRg1-opt]-F-P2A-CD8SP-CD22-FHVH-24-G4Sx3-R1-hu-mROO5-1-vL-Gly-Ser-Linker-hu-mROO5-1-vH-Myc-[hTCRd-opt]-F-F2A-PAC | 4134 | 14824 |
| CD19 | | CD22 | CD8-CD22-FHVH-24-G4Sx3-R1-hu-mROO5-1-vL-IgCL-CD3zECDTMCP-opt-F-P2A-Spe-SP-hu-mROO5-1-vH-IgG1-CH1-CD3zECDTMCP-opt2-F-F2A-PAC | 4135 | 14825 |
| CD19 | | CD22 | CD8SP-CD22-FHVH-24-G4Sx3-R1-hu-mROO5-1-vL-[hTCRbECD-CD3zECDTMCP-opt]-F-P2A-SP-hu-mROO5-1 -vH-[hTCRaECD-CD3zECDTMCP-opt2] | 4136 | 14826 |
| CD19 | | CD22 | CD8SP-CD22-FHVH-24-G4Sx3-R1-hu-mROO5-1-vL-[hTCRb-KAC-ECD-CD3zECDTMCP-opt]-F-P2A-SP-hu-mROO5-1-vH-[hTCRa-CSDVP-ECD-CD3zECDTMCP-opt2] | 4137 | 14827 |
| CD19 | | CD22 | CD8SP-CD22-FHVH-24-G4Sx3-R1-hu-mROO5-1-vL-V5-[hTCRbECD-CD3zECDTMCP-opt]-F-P2A-SP-hu-mROO5-1-vH-Myc-[hTCRaECD-CD3zECDTM-28z-opt2] | 4138 | 14828 |
| CD19 | | CD22 | CD8SP-CD22-FHVH-24-G4Sx3-R1-hu-mROO5-1-vL-V5-[hTCRbECD-CD3zECDTM-28z-opt]-F-P2A-SP-hu-mROO5-1-vH-Myc-[hTCRaECD-CD3zECDTM-28z-opt2] | 4139 | 14829 |
| CD19 | | CD22 | CD8SP-CD22-FHVH-24-G4Sx3-R1-hu-mROO5-1-vL-V5-[hTCRbECD-CD3zECDTMCP-opt]-F-P2A-SP-hu-mROO5-1-vH-Myc4-[hTCRaECD-CD3zECDTM-BBz-opt2] | 4140 | 14830 |
| CD19 | | CD22 | CD8SP-CD22-FHVH-24-G4Sx3-R1-hu-mROO5-1-vL-V5-[hTCRbECD-CD3zECDTM-BBz-opt]-F-P2A-SP-hu-mROO5-1-vH-Myc4-[hTCRaECD-CD3zECDTM-BBz-opt2] | 4141 | 14831 |
| CD19 | | CD22 | CD8-CD22-FHVH-24-G4Sx3-Rl -hu-mROO5-1 -vL-CD3zECDTMCP-opt-F-P2A-Spe-SP-hu-mROO5-1-vH-Mlu-CD3zECDTMCP-opt2-F-F2A-PAC | 4142 | 14832 |
| CD19 | | CD22 | CD8SP-CD22-FHVH-24-G4Sx3-R1-hu-mROO5-1-vL-[IgCL-TCRg-6MD]-F-P2A-SP-hu-mROO5 -1 -vH- [IgG1 -CH1 -TCRd-6MD] | 4143 | 14833 |
| CD19 | | CD22 | CD8SP-CD22-FHVH-24-G4Sx3-R1-hu-mROO5-1-vL-[IgCL-TCRb-IAH-6MD]-F-P2ASP-hu-mROO5-1-vH-[IgG1-CH1- TCRa-SDVP-6MD] | 4144 | 14834 |
| CD19 | | CD22 | CD8SP-CD22-FHVH-24-G4Sx3-R1-hu-mROO5 -1-vL- [IgCL-TCRb-wt-opt2-6MD]-F-P2A-SP-hu-mROO5-1 -vH-[IgG1 -CH1 -TCRa-wt-op2-6MD] | 4145 | 14835 |
| CD19 | | CD22 | CD8SP-CD22-FHVH-24-G4Sx3-R1-hu-mROO5-1-(vL-vH)-CD3e-ECDTMCP-opt2 | 4146 | 14836 |
| CD19 | | CD22 | CD8SP-CD22-FHVH-24-G4Sx3-R1-hu-mROO5-1-(vL-vH)-CD3d-ECDTMCP-opt2 | 4147 | 14837 |
| CD19 | | CD22 | CD8 SP-CD22-FHVH-24-G4Sx3 -R1 -hu-mROO5-1-(vL-vH)-CD3g-ECDTMCP-opt2 | 4148 | 14838 |
| CD19 | | CD22 | CD8 SP-CD22-FHVH-24-G4Sx3 -R1 -hu-mROO5-1-(vL-vH)-CD3z-ECDTMCP-opt2 | 4149 | 14839 |
| CD19 | | CD22 | CD8SP-CD22-FHVH-24-G4Sx3-R1-hu-mROO5-1-vL-Gly-Ser-Linker-hu-mROO5-1-vH-[hTCRa-opt2]-F-F2A-PAC | 4150 | 14840 |
| CD19 | | CD22 | CD8SP-CD22-FHVH-24-G4Sx3-R1-hu-mROO5-1-vL-Gly-Ser-Linker-hu-mROO5-1-vH-[hTCRb-opt2]-F-F2A-PAC | 4151 | 14841 |
| CD19 | | CD22 | CD8SP-CD22-FHVH-24-G4Sx3-R1-hu-mROO5-1-vL-Gly-Ser-Linker-hu-mROO5-1-vH-Myc4-[pretc.Ra-Del48]-F-F2A-PAC | 4152 | 14842 |
| CD19 | | CD22 | CD8SP-CD22-FHVH-24-G4Sx3-R1-hu-mROO5-1-vL-[hTCRb-opt2]-F-P2A-PAC | 4153 | 14843 |
| CD19 | | CD22 | CD8SP-CD22-FHVH-24-G4Sx3-R1-hu-mROO5-1-vL-[hTCRb-opt2] | 4154 | 14844 |
| CD19 | | CD22 | IgHSP-hu-mROO5-1-vH-[hTCRa-opt2]-F-F2A-BlastR | 4155 | 14845 |
| CD19 | | CD22 | IgHSP-hu-mROO5-1-vH-[hTCRa-opt2] | 4156 | 14846 |
| CD19 | | CD22 | CD8SP-CD22-FHVH-24-G4Sx3-R1-hu-mROO5-1-vL-V5-[hTCRb-S57C-opt]-F-P2A-PAC | 4157 | 14847 |
| CD19 | | CD22 | CD8SP-CD22-FHVH-24-G4Sx3-R1-hu-mROO5-1-vL-V5-[hTCRb-S57C-opt] | 4158 | 14848 |
| CD19 | | | IgHSP-hu-mROO5-1-vH-Myc-[hTCRa-T48C-opt]-F-F2A-BlastR | 4159 | 14849 |
| CD19 | | | IgHSP-hu-mROO5-1-vH-Myc-[hTCRa-T48C-opt] | 4160 | 14850 |
| CD19 | | CD22 | CD8SP-CD22-FHVH-24-G4Sx3-R1-hu-mROO5-1-vL-Gly-Ser-Linker-hu-mROO5-1-vH-[hTCRa-SDVP]-F-F2A-PAC | 4161 | 14851 |
| CD19 | | CD22 | CD8SP-CD22-FHVH-24-G4Sx3-R1-hu-mROO5-1-vL-Gly-Ser-Linker-hu-mROO5-1-vH-[hTCRb-KAIAH]-F-P2A-PAC | 4162 | 14852 |
| CD19 | | CD22 | CD8SP-CD22-FHVH-24-G4Sx3-R1-hu-mROO5-1-vL-[hTCRa-CSDVP]-F-F2A-IgSP-Apa-CD20-vHH-2HCD25-G4Sx3v2-hu-mROO5-1-vH-[hTCRb-KACIAH]-F-P2A-PAC | 4163 | 14853 |
| CD19 | | CD22 | CD8SP-CD22-FHVH-24-G4Sx3-R1-hu-mROO5-1-vL-[hTCRb-KACIAH]-F-P2A-IgSP-Apa-CD20-vHH-2HCD25-G4Sx3v2-hu-mROO5-1-vH-[hTCRa-CSDVP]-F-F2A-PAC | 4164 | 14854 |
| CD19 | CD20 | CD22 | CD8SP-CD22-FHVH-24-G4Sx3-R1-hu-mROO5-1-vL-[hTCRb-S57C]-F-P2A-IgSP-Apa-CD20-vHH-2HCD25-G4Sx3v2-hu-mROO5-1-vH-[hTCRa-T48C]-F-F2A-PAC | 4165 | 14855 |
| CD19 | CD20 | CD22 | CD8SP-CD22-FHVH-24-G4Sx3-R1-hu-mROO5-1-vL-[hTCRb-S57C]-F-P2A-IgSP-Apa-CD20-vHH-2HCD25-G4Sx3v2-hu-mROO5-1-vH-[hTCRa-T48C] | 4166 | 14856 |
| CD19 | CD20 | CD22 | CD8SP-CD22-FHVH-24-G4Sx3-R1-hu-mROO5-1-vL-[hTCRb-S57C]-F-P2A-IgSP-Apa-CD20-vHH-2HCD25-G4Sx3v2-hu-mROO5-1-vH-[hTCRa-T48C]-F-F2A-K13-opt | 4167 | 14857 |
| CD19 | CD20 | CD22 | CD8SP-CD22-FHVH-24-G4Sx3-R1-hu-mROO5-1-vL-[hTCRa-T48C]-F-P2A-IgSP-Apa-CD20-vHH-2HCD25-G4Sx3v2-hu-mROO5-1-vH-[hTCRb-S57C] | 4168 | 14858 |
| CD19 | CD20 | CD22 | CD8SP-CD22-FHVH-24-G4Sx3-R1-hu-mROO5-1-vL-[hTCRa-T48C]-F-P2A-IgSP-Apa-CD20-vHH-2HCD25-G4Sx3v2-hu-mROO5-1-vH-[hTCRb-S57C]-F-P2A-K13-opt | 4169 | 14859 |
| CD19 | CD20 | CD22 | CD8SP-CD22-FHVH-24-G4Sx3-R1-hu-mROO5-1-vL-[hTCRb-opt2]-F-P2A-IgSP-Apa-CD20-vHH-2HCD25-G4Sx3v2-hu-mROO5-1-vH-[hTCRa-opt2]-F-F2A-PAC | 4170 | 14860 |
| CD19 | CD20 | CD22 | CD8SP-CD22-FHVH-24-G4Sx3-R1-hu-mROO5-1-vL-[hTCRb-opt2]-F-P2A-IgSP-Apa-CD20-vHH-2HCD25-G4Sx3v2-hu-mROO5-1-vH-Myc-[pretc.Ra-Del48]-F-F2A-PAC | 4171 | 14861 |
| CD19 | CD20 | CD22 | CD8SP-CD22-FHVH-24-G4Sx3-R1-hu-mROO5-1-vL-V5-[hTCRg 1 -opt] -F-P2A-IgSP-Apa-CD20-vHH-2HCD25-G4Sx3v2-hu-mROO5-1-vH-Myc-[hTCRd-opt]-F-F2A-PAC | 4172 | 14862 |
| CD19 | CD20 | CD22 | CD8SP-CD22-FHVH-24-G4Sx3-R1-hu-mROO5-1-vL-[hTCRd-opt]-F-P2A-IgSP-Apa-CD20-vHH-2HCD25-G4Sx3v2-hu-mROO5-1-vH-[hTCRg1-opt] | 4173 | 14863 |
| CD19 | CD20 | CD22 | CD8SP-CD22-FHVH-24-G4Sx3-R1-hu-mROO5-1-vL-IgCL-CD3zECDTMCP-opt-F-P2A-Spe-IgSP-Apa-CD20-vHH-2HCD25-G4Sx3v2-hu-mROO5-1-vH-IgG1-CH1-CD3zECDTMCP-opt2-F-F2A-PAC | 4174 | 14864 |
| CD19 | CD20 | CD22 | CD8SP-CD22-FHVH-24-G4Sx3-R1-hu-mROO5-1-vL-[hTCRbECD-CD3zECDTMCP-opt]-F-P2A-IgSP-Apa-CD20-vHH-2HCD25-G4Sx3v2-hu-mROO5-1-vH-[hTCRaECD-CD3zECDTMCP-opt2] | 4175 | 14865 |
| CD19 | CD20 | CD22 | CD8SP-CD22-FHVH-24-G4Sx3-R1-hu-mROO5-1-vL-[hTCRb-KAC-ECD-CD3zECDTMCP-opt]-F-P2A-IgSP-Apa-CD20-vHH-2HCD25-G4Sx3v2-hu-mROO5-1-vH-[hTCRa-CSDVP-ECD-CD3zECDTMCP-opt2] | 4176 | 14866 |
| CD19 | CD20 | CD22 | CD8SP-CD22-FHVH-24-G4Sx3-R1-hu-mROO5-1-vL-V5-[hTCRbECD-CD3zECDTMCP-opt]-F-P2A-IgSP-Apa-CD20-vHH-2HCD25-G4Sx3v2-hu-mROO5-1-vH-Myc-[hTCRaECD-CD3zECDTM-28z-opt2] | 4177 | 14867 |
| CD19 | CD20 | CD22 | CD8SP-CD22-FHVH-24-G4Sx3-R1-hu-mROO5-1-vL-V5-[hTCRbECD-CD3zECDTM-28z-opt]-F-P2A-IgSP-Apa-CD20-vHH-2HCD25-G4Sx3v2-hu-mROO5-1-vH-Myc-[hTCRaECD-CD3zECDTM-28z-opt2] | 4178 | 14868 |
| CD19 | CD20 | CD22 | CD8SP-CD22-FHVH-24-G4Sx3-R1-hu-mROO5-1-vL-V5-[hTCRbECD-CD3zECDTMCP-opt]-F-P2A-IgSP-Apa-CD20-vHH-2HCD25-G4Sx3v2-hu-mROO5-1-vH-Myc4-[hTCRaECD-CD3zECDTM-BBz-opt2] | 4179 | 14869 |
| CD19 | CD20 | CD22 | CD8SP-CD22-FHVH-24-G4Sx3-R1-hu-mROO5-1-vL-V5-[hTCRbECD-CD3zECDTM-BBz-opt]-F-P2A-IgSP-Apa-CD20-vHH-2HCD25-G4Sx3v2-hu-mROO5-1-vH-Myc4-[hTCRaECD-CD3zECDTM-BBz-opt2] | 4180 | 14870 |
| CD19 | CD20 | CD22 | CD8SP-CD22-FHVH-24-G4Sx3-R1-hu-mR005-1-vL-CD3zECDTMCP-opt-F-P2A-Spe-IgSP-Apa-CD20-vHH-2HCD25-G4Sx3v2-hu-mROO5-1-vH-M1u-CD3zECDTMCP-opt2-F-F2A-PAC | 4181 | 14871 |
| CD19 | CD20 | CD22 | CD8SP-CD22-FHVH-24-G4Sx3-R1-hu-mROO5-1-vL-[IgCL-TCRg-6MD]-F-P2A-IgSP-Apa-CD20-vHH-2HCD25-G4Sx3v2-hu-mROO5-1-vH-[IgG1-CH1-TCRd-6MD] | 4182 | 14872 |
| CD19 | CD20 | CD22 | CD8SP-CD22-FHVH-24-G4Sx3-R1-hu-mR005-1-vL-[IgCL-TCRb-IAH-6MD]-F-P2A-IgSP-Apa-CD20-vHH-2HCD25-G4Sx3v2-hu-mROO5-1-vH-[IgG1-CH1-TCRa-SDVP-6MD] | 4183 | 14873 |
| CD19 | CD20 | CD22 | CD8SP-CD22-FHVH-24-G4Sx3-Rl-hu-mR005-1-vL-[IgCL-TCRb-wt-opt2-6MD]-F-P2A-IgSP-Apa-CD20-vHH-2HCD25-G4Sx3v2-hu-mR005-1-vH-[IgG1-CH1-TCRa-wt-op2-6MD] | 4184 | 14874 |
| | CD20 | CD22 | CD8SP-CD22-FHVH-24-[IgCL-TCRb-wt-opt2-6MD]-F-P2A-IgSP-Apa-CD20-2HCD25-VHH-[IgG1 -CH1 -TCRa-wt-opt2-6MD]-F-F2A-PAC | 4185 | 14875 |
| | CD20 | CD22 | CD8SP-CD22-FHVH-24-[IgCL-TCRb-wt-opt2-6MD]-F-P2A-IgSP-Apa-CD20-2HCD25-VHH-[IgG1 -CH1 -TCRa-wt-opt2-6MD] | 4186 | 14876 |
| | CD20 | CD22 | CD8SP-CD22-FHVH-24-GS-[TCRb-wt-opt2-6MD]-F-P2A-IgSP-Apa-CD20-2HCD25-VHH-GS-[TCRa-wt-opt2-6MD]-F-F2A-PAC | 4187 | 14877 |
| | CD20 | CD22 | CD8SP-CD22-FHVH-24-GS-[TCRb-wt-opt2-6MD]-F-P2A-IgSP-Apa-CD20-2HCD25-VHH-GS-[TCRa-wt-opt2-6MD] | 4188 | 14878 |
| | CD20 | CD22 | CD8SP-CD22-FHVH-24-IgG1-Hinge-[TCRb-wt-opt2-6MD]-F-P2A-IgSP-Apa-CD20-2HCD25-VHH-GS-[TCRa-wt-opt2-6MD]-F-F2A-PAC | 4189 | 14879 |
| | CD20 | CD22 | CD8SP-CD22-FHVH-24-GS-[TCRb-wt-opt2-6MD]-F-P2A-IgSP-Apa-CD20-2HCD25-VHH-IgG1-Hinge-v2-[TCRa-wt-opt2-6MD]-F-F2A-PAC | 4190 | 14880 |
| | CD20 | CD22 | CD8SP-CD22-FHVH-24-IgG1-Hinge-[TCRb-wt-opt2-6MD]-F-P2A-IgSP-Apa-CD20-2HCD25-VHH-IgG1-Hinge-v2-[TCRa-wt-opt2-6MD]-F-F2A-PAC | 4191 | 14881 |
| | CD20 | CD22 | CD8SP-CD22-FHVH-24-IgG1-Hinge-[TCRb-wt-opt2-6MD]-F-P2A-IgSP-Apa-CD20-2HCD25-VHH-IgG1 -Hinge-v2-[TCRa-wt-opt2-6MD] | 4192 | 14882 |
| | CD20 | CD22 | CD8SP-CD22-FHVH-24-GS-[TCRb-wt-opt2-6MD]-F-P2A-IgSP-Apa-CD20-2HCD25-VHH-IgG1-Hinge-v2-[TCRa-wt-opt2-6MD] | 4193 | 14883 |
| | CD20 | CD22 | CD8SP-CD22-FHVH-24-[IgCL-TCRg-6MD]-F-P2A-IgSP-Apa-CD20-2HCD25-VHH-[IgG1-CH1-TCRd-6MD]-F-F2A-PAC | 4194 | 14884 |
| | CD20 | CD22 | CD8SP-CD22-FHVH-24-[IgCL-TCRg-6MD]-F-P2A-IgSP-Apa-CD20-2HCD25-VHH-[IgG1-CH1-TCRd-6MD] | 4195 | 14885 |
| | CD20 | CD22 | CD8SP-CD22-FHVH-24-GS-[TCRg-6MD]-F-P2A-IgSP-Apa-CD20-2HCD25-VHH-GS-[TCRd-6MD]-F-F2A-PAC | 4196 | 14886 |
| | CD20 | CD22 | CD8SP-CD22-FHVH-24-GS-[TCRg-6MD]-F-P2A-IgSP-Apa-CD20-2HCD25-VHH-GS-[TCRd-6MD] | 4197 | 14887 |
| | CD20 | CD22 | CD8SP-CD22-FHVH-24-IgG1-Hinge-[TCRg-6MD]-F-P2A-IgSP-Apa-CD20-2HCD25-VHH-GS-[TCRd-6MD]-F-F2A-PAC | 4198 | 14888 |
| | CD20 | CD22 | CD8SP-CD22-FHVH-24-GS-[TCRg-6MD]-F-P2A-IgSP-Apa-CD20-2HCD25-VHH-IgG1-Hinge-v2-[TCRd-6MD]-F-F2A-PAC | 4199 | 14889 |
| | CD20 | CD22 | CD8SP-CD22-FHVH-24-IgG1-Hinge-[TCRg-6MD]-F-P2A-IgSP-Apa-CD20-2HCD25-VHH-IgG1-Hinge-v2-[TCRd-6MD]-F-F2A-PAC | 4200 | 14890 |
| | CD20 | CD22 | CD8SP-CD22-FHVH-24-IgG1-Hinge-[TCRg-6MD]-F-P2A-IgSP-Apa-CD20-2HCD25-VHH-IgG1-Hinge-v2-[TCRd-6MD] | 4201 | 14891 |
| | CD20 | CD22 | CD8SP-CD22-FHVH-24-GS-[TCRg-6MD]-F-P2A-IgSP-Apa-CD20-2HCD25-VHH-IgG1-Hinge-v2-[TCRd-6MD] | 4202 | 14892 |
| | CD20 | CD22 | CD8SP-CD22-FHVH-24-GS-[TCRg-7MD]-F-P2A-IgSP-Apa-CD20-2HCD25-VHH-GS-[TCRd-6MD]-F-F2A-PAC | 4203 | 14893 |
| | CD20 | CD22 | CD8SP-CD22-FHVH-24-GS-[TCRg-6MD]-F-P2A-IgSP-Apa-CD20-2HCD25-VHH-GS-[TCRd-7MD]-F-F2A-PAC | 4204 | 14894 |
| | CD20 | CD22 | CD8SP-CD22-FHVH-24-GS-[TCRg-7MD]-F-P2A-IgSP-Apa-CD20-2HCD25-VHH-GS-[TCRd-7MD]-F-F2A-PAC | 4205 | 14895 |
| | CD20 | CD22 | CD8SP-CD22-FHVH-24-GS-[TCRg-7MD]-F-P2A-IgSP-Apa-CD20-2HCD25-VHH-GS-[TCRd-7MD] | 4206 | 14896 |
| | CD20 | CD22 | CD8SP-CD22-FHVH-24-IgG1-Hinge-[TCRg-7MD]-F-P2A-IgSP-Apa-CD20-2HCD25-VHH-GS-[TCRd-7MD]-F-F2A-PAC | 4207 | 14897 |
| | CD20 | CD22 | CD8SP-CD22-FHVH-24-IgG1-Hinge-[TCRg-7MD]-F-P2A-IgSP-Apa-CD20-2HCD25-VHH-IgG1-Hinge-v2-[TCRd-7MD]-F-F2A-PAC | 4208 | 14898 |
| | CD20 | CD22 | CD8SP-CD22-FHVH-24-IgG1-Hinge-[TCRg-7MD]-F-P2A-IgSP-Apa-CD20-2HCD25-VHH-IgG1 -Hinge-v2-[TCRd-7MD] | 4209 | 14899 |
| | | CD22 | CD8SP-CD22-FHVH-24-[IgCL-TCRb-6MD] | 4210 | 14900 |
| | CD20 | CD22 | IgSP-Apa-CD20-2HCD25-VHH-[IgG1-CH1-TCRa-wt-opt2-6MD] | 4211 | 14901 |
| | | CD22 | CD8SP-CD22-FHVH-24-[IgCL-TCRg-6MD] | 4212 | 14902 |
| | CD20 | CD22 | IgSP-Apa-CD20-2HCD25-VHH-[IgG1-CH1-TCRd-6MD] | 4213 | 14903 |

TABLE 31

Uni-Bi and Multispecific SAR Constructs

| TARGET | | | | | | | |
|---|---|---|---|---|---|---|---|
| 1st | 2nd | 3rd | 4th | 5th | Name of fragment | SEQ ID NO (DNA) | SEQ ID NO (PRT) |
| CD1 9 | CD1 9 | | | | CD8SP-CD19-vHH-048-G4Sx3-R1-hu-mROO5-1-vL-Gly-Ser-Linker-hu-mROO5-1-vH-Myc-28z | 4976 | 15666 |
| CD1 9 | CD1 9 | | | | CD8SP-CD19-vHH-048-G4Sx3-R1-hu-mROO5-1-vL-Gly-Ser-Linker-hu-mROO5-1-vH-Myc-CD8TM-BBz | 4977 | 15667 |
| CD1 9 | CD1 9 | | | | CD8SP-CD19-vHH-048-G4Sx3-R1-hu-mROO5-1-vL-Gly-Ser-Linker-hu-mROO5-1-vH-Myc-CD8TM-z-P2A-K13-FLAG-T2A-PAC | 4978 | 15668 |
| CD1 9 | CD1 9 | | | | CD8SP-CD19-vHH-048-G4Sx3-R1-hu-mROO5-1-vL-[hTCRa-CSDVP]-F-F2A-SP-hu-mROO5-1-vH-[hTCRb-KACIAH]-F-P2A-PAC | 4979 | 15669 |
| CD1 9 | CD1 9 | | | | CD8SP-CD19-vHH-048-G4Sx3-R1-hu-mROO5-1-vL-[hTCRb-KACIAH]-F-P2A-SP-hu-mROO5-1-vH-[hTCRa-CSDVP]-F-F2A-PAC | 4980 | 15670 |
| CD1 9 | CD1 9 | | | | CD8SP-CD19-vHH-048-G4Sx3-R1-hu-mROO5-1-vL-[hTCRb-S57C]-F-P2A-SP-hu-mROO5-1-vH-[hTCRa-T48C] | 4981 | 15671 |
| CD1 9 | CD1 9 | | | | CD8SP-CD19-vHH-048-G4Sx3-R1-hu-mROO5-1-vL-[hTCRb-S57C]-F-P2A-SP-hu-mROO5-1-vH-[hTCRa-T48C]-F-F2A-K13-opt | 4982 | 15672 |
| CD1 9 | CD1 9 | | | | CD8SP-CD19-vHH-048-G4Sx3-R1-hu-mROO5-1-vL-[hTCRa-T48C]-F-P2A-SP-hu-mROO5-1-vH-[hTCRb-S57C] | 4983 | 15673 |
| CD1 9 | CD1 9 | | | | CD8SP-CD19-vHH-048-G4Sx3-R1-hu-mROO5-1-vL-[hTCRa-T48C]-F-P2A-SP-hu-mROO5-1-vH-[hTCRb-S57C]-F-P2A-K13-opt | 4984 | 15674 |
| CD1 9 | CD1 9 | | | | CDSSP-V5-[hTCRb-KACIAH]-F-P2A-CD8SP-CD19-vHH-048-G4Sx3-R1-hu-mROO5-1-vL-Gly-Ser-Linker-hu-mROO5-1 -vH-Myc-[hTCRa-CSDVP]-F-F2A-PAC | 4985 | 15675 |
| CD1 9 | CD1 9 | | | | CD8SP-MYC-[hTCRa-T48C-opt1]-F-F2A-SP-CD19-vHH-048-G4Sx3-R1-hu-mROO5-1-vL-Gly-Ser-Linker-hu-mR005-1-vH-V5-[hTCRb-S57C-opt1]-F-P2A-PAC | 4986 | 15676 |
| CD1 9 | CD1 9 | | | | CD8SP-CD19-vHH-048-G4Sx3-R1-hu-mROO5-1-vL-[hTCRb-opt2]-F-P2A-SP-hu-mROO5-1-vH-[hTCRa-opt2]-F-F2A-PAC | 4987 | 15677 |
| CD1 9 | CD1 9 | | | | CD8SP-CD19-vHH-048-G4Sx3-R1-hu-mROO5-1-vL-[hTCRb-opt2]-F-P2A-SP-hu-mROO5-1-vH-Myc-[pretc.Ra-Del48]-F-F2A-PAC | 4988 | 15678 |
| CD1 9 | CD1 9 | | | | CD8SP-[hTCRb-opt2]-F-P2A-CD8SP-CD19-vHH-048-G4Sx3-R1 -hu-mR005-1-vL-Gly-Ser-Linker-hu-mROO5-1-vH-Myc4-[pretc.Ra-Del48]-F-F2A-PAC | 4989 | 15679 |
| CD1 9 | CD1 9 | | | | CD8SP-CD19-vHH-048-G4Sx3-R1-hu-mROO5-1-vL-V5-[hTCRg1-opt]-F-P2A-SP-hu-mROO5-1-vH-Myc-[hTCRd-opt]-F-F2A-PAC | 4990 | 15680 |
| CD1 9 | CD1 9 | | | | CD8SP-CD19-vHH-048-G4Sx3-R1-hu-mROO5-1-vL-[hTCRd-opt]-F-P2A-SP-hu-mROO5-1-vH-[hTCRg1-opt] | 4991 | 15681 |
| CD1 9 | CD1 9 | | | | CD8SP-V5-[hTCRg1-opt]-F-P2A-CD8SP-CD19-vHH-048-G4Sx3-R1-hu-mR005-1-vL-Gly-Ser-Linker-hu-mROO5-1-vH-Myc-[hTCRd-opt]-F-F2A-PAC | 4992 | 15682 |
| CD1 9 | CD1 9 | | | | CD8SP-CD19-vHH-048-G4Sx3-R1-hu-mROO5-1-vL-IgCL-CD3zECDTMCP-opt-F-P2A-Spe-SP-hu-mR005-1-vH-IgG 1-CH1-CD3zECDTMCP-opt2-F-F2A-PAC | 4993 | 15683 |
| CD1 9 | CD1 9 | | | | CD8SP-CD19-vHH-048-G4Sx3-R1-hu-mROO5-1-vL-[hTCRbECD-CD3zECDTMCP-opt]-F-P2A-SP-hu-mROO5-1-vH-[hTCRaECD-CD3zECDTMCP-opt2] | 4994 | 15684 |
| CD1 9 | CD1 9 | | | | CD8SP-CD19-vHH-048-G4Sx3-R1 -hu-mROO5-1-vL-[hTCRb-KAC-ECD-CD3zECDTMCP-opt]-F-P2A-SP-hu-mROO5-1-vH-[hTCRa-CSDVP-ECD-CD3zECDTMCP-opt2] | 4995 | 15685 |
| CD1 9 | CD1 9 | | | | CD8SP-CD19-vHH-048-G4Sx3-R1-hu-mROO5-1-vL-V5-[hTCRbECD-CD3zECDTMCP-opt]-F-P2A-SP-hu-mROO5-1-vH-Myc-[hTCRaECD-CD3zECDTM-28z-opt2] | 4996 | 15686 |
| CD1 9 | CD1 9 | | | | CD8SP-CD19-vHH-048-G4Sx3-R1-hu-mROO5-1-vL-V5-[hTCRbECD-CD3zECDTM-28z-opt]-F-P2A-SP-hu-mR005-1-vH-Myc-[hTCRaECD-CD3zECDTM-28z-opt2] | 4997 | 15687 |
| CD1 9 | CD1 9 | | | | CD8SP-CD19-vHH-048-G4Sx3-R1-hu-mROO5-1-vL-V5-[hTCRbECD-CD3zECDTMCP-opt]-F-P2A-SP-hu-mR005-1-vH-Myc4-[hTCRaECD-CD3zECDTM-BBz-opt2] | 4998 | 15688 |
| CD1 9 | CD1 9 | | | | CD8SP-CD19-vHH-048-G4Sx3-R1-hu-mROO5-1-vL-V5-[hTCRbECD-CD3zECDTM-BBz-opt]-F-P2A-SP-hu-mR005-1-vH-Myc4-[hTCRaECD-CD3zECDTM-BBz-opt2] | 4999 | 15689 |
| CD1 9 | CD1 9 | | | | CD8SP-CD19-vHH-048-G4Sx3-R1-hu-mR005-1-vL-CD3zECDTMCP-opt-F-P2A-Spe-SP-hu-mR005-1-vH-M1u-CD3zECDTMCP-opt2-F-F2A-PAC | 5000 | 15690 |
| CD1 9 | CD1 9 | | | | CD8SP-CD19-vHH-048-G4Sx3-R1-hu-mROO5-1-vL-[IgCL-TCRg-6MD]-F-P2A-SP-hu-mROO5-1-vH-[IgG1-CH1-TCRd-6MD] | 5001 | 15691 |
| CD1 9 | CD1 9 | | | | CD8SP-CD19-vHH-048-G4Sx3-R1-hu-mROO5-1-vL-[IgCL-TCRb-IAH-6MD]-F-P2A-SP-hu-mR005-1-vH-[IgG1-CH1-TCRa-SDVP-6MD] | 5002 | 15692 |
| CD1 9 | CD1 9 | | | | CD8SP-CD19-vHH-048-G4Sx3-R1-hu-mR005-1 -vL-[IgCL-TCRb-wt-opt2-6MD] -F-P2A-SP-hu-mROO5-1-vH-[IgG1-CH1-TCRa-wt-op2-6MD] | 5003 | 15693 |
| CD1 9 | CD1 9 | | | | CD8SP-CD19-vHH-048-G4Sx3-R1-hu-mROO5-1-(vL-vH)-CD3e-ECDTMCP-opt2 | 5004 | 15694 |
| CD1 9 | CD1 9 | | | | CD8SP-CD19-vHH-048-G4Sx3-R1-hu-mR005-1-(vL-vH)-CD3d-ECDTMCP-opt2 | 5005 | 15695 |
| CD1 9 | CD1 9 | | | | CD8SP-CD19-vHH-048-G4Sx3-R1-hu-mROO5-1-(vL-vH)-CD3g-ECDTMCP-opt2 | 5006 | 15696 |
| CD1 9 | CD1 9 | | | | CD8SP-CD19-vHH-048-G4Sx3-R1-hu-mROO5-1-(vL-vH)-CD3z-ECDTMCP-opt2 | 5007 | 15697 |
| CD1 9 | CD1 9 | | | | CD8SP-CD19-vHH-048-G4Sx3-R1-hu-mR005-1-vL-Gly-Ser-Linker-hu-mR005-1-vH-[hTCRa-opt2]-F-F2A-PAC | 5008 | 15698 |
| CD1 9 | CD1 9 | | | | CD8SP-CD19-vHH-048-G4Sx3-R1-hu-mR005-1-vL-Gly-Ser-Linker-hu-mR005-1-vH-[hTCRb-opt2]-F-F2A-PAC | 5009 | 15699 |
| CD1 9 | CD1 9 | | | | CD8SP-CD19-vHH-048-G4Sx3-R1-hu-mR005-1-vL-Gly-Ser-Linker-hu-mR005-1-vH-Myc4-[pretc.Ra-De148]-F-F2A-PAC | 5010 | 15700 |
| CD1 9 | CD1 9 | | | | CD8SP-CD19-vHH-048-G4Sx3-R1-hu-mR005-1-vL-[hTCRb-opt2]-F-P2A-PAC | 5011 | 15701 |
| CD1 9 | CD1 9 | | | | CD8SP-CD19-vHH-048-G4Sx3-R1-hu-mROO5-1-vL-[hTCRb-opt2] | 5012 | 15702 |
| CD1 9 | CD1 9 | | | | CD8SP-CD19-vHH-048-G4Sx3-R1-hu-mROO5-1-vL-V5-[hTCRb-S57C-opt]-F-P2A-PAC | 5013 | 15703 |
| CD1 9 | CD1 9 | | | | CD8SP-CD19-vHH-048-G4Sx3-R1-hu-mROO5-1-vL-V5-[hTCRb-S57C-opt] | 5014 | 15704 |
| CD1 9 | CD1 9 | | | | CD8SP-CD19-vHH-048-G4Sx3-R1-hu-mR005-1-vL-Gly-Ser-Linker-hu-mR005-1-vH-[hTCRa-SDVP]-F-F2A-PAC | 5015 | 15705 |
| CD1 9 | CD1 9 | | | | CD8SP-CD19-vHH-048-G4Sx3-R1-hu-mR005-1-vL-Gly-Ser-Linker-hu-mR005-1-vH-[hTCRb-KAIAH]-F-P2A-PAC | 5016 | 15706 |
| CD1 9 | | CD 20 | | | IgSP-Apa-CD20-vHH-2HCD25-G4Sx3v2-hu-mR005-1-vH-Gly-Ser-Linker-vL-Myc-CD8TM-BBz | 5017 | 15707 |
| CD1 9 | | CD 20 | | | CD8SP-hu-mROO5-1-vL-[hTCRa-CSDVP]-F-F2A-IgSP-Apa-CD20-vHH-2HCD25-G4Sx3v2-hu-mR005-1-vH-[hTCRb-KACIAH]-F-P2A-PAC | 5018 | 15708 |
| CD1 9 | | CD 20 | | | CD8SP-hu-mROO5-1-vL-[hTCRb-KACIAH]-F-P2A-IgSP-Apa-CD20-vHH-2HCD25-G4Sx3v2-hu-mR005-1-vH-[hTCRa-CSDVP]-F-F2A-PAC | 5019 | 15709 |
| CD1 9 | | CD 20 | | | CD8SP-hu-mROO5-1-vL-[hTCRb-S57C]-F-P2A-IgSP-Apa-CD20-vHH-2HCD25-G4Sx3v2-hu-mROO5-1-vH-[hTCRa-T48C]-F-F2A-PAC | 5020 | 15710 |
| CD1 9 | | CD 20 | | | CD8SP-hu-mROO5-1-vL-[hTCRb-S57C]-F-P2A-IgSP-Apa-CD20-vHH-2HCD25-G4Sx3v2-hu-mROO5-1-vH-[hTCRa-T48C] | 5021 | 15711 |
| CD1 9 | | CD 20 | | | CD8SP-hu-mROO5-1-vL-[hTCRb-S57C]-F-P2A-IgSP-Apa-CD20-vHH-2HCD25-G4Sx3v2-hu-mROO5-1-vH-[hTCRa-T48C]-F-F2A-K13-opt | 5022 | 15712 |
| CD1 9 | | CD 20 | | | CD8SP-hu-mROO5-1-vL-[hTCRa-T48C]-F-P2A-IgSP-Apa-CD20-vHH-2HCD25-G4Sx3v2-hu-mR005-1-vH-[hTCRb-S57C] | 5023 | 15713 |
| CD1 9 | | CD 20 | | | CD8SP-hu-mROO5-1-vL-[hTCRa-T48C]-F-P2A-IgSP-Apa-CD20-vHH-2HCD25-G4Sx3v2-hu-mR005-1-vH-[hTCRb-S57C]-F-P2A-K13-opt | 5024 | 15714 |
| CD1 9 | | CD 20 | | | CD8SP-hu-mR005-1-vL-[hTCRb-opt2]-F-P2A-IgSP-Apa-CD20-vHH-2HCD25-G4Sx3v2-hu-mR005-1-vH-[hTCRa-opt2]-F-F2A-PAC | 5025 | 15715 |
| CD1 9 | | CD 20 | | | CD8SP-hu-mR005-1-vL-[hTCRb-opt2]-F-P2A-IgSP-Apa-CD20-vHH-2HCD25-G4Sx3v2-hu-mR005-1-vH-Myc-[pretc.Ra-Del48]-F-F2A-PAC | 5026 | 15716 |
| CD1 9 | | CD 20 | | | CD8SP-hu-mROO5-1-vL-V5-[hTCRg1-opt]-F-P2A-IgSP-Apa-CD20-vHH-2HCD25-G4Sx3v2-hu-mR005-1-vH-Myc-[hTCRd-opt]-F-F2A-PAC | 5027 | 15717 |
| CD1 9 | | CD 20 | | | CD8SP-hu-mROO5-1-vL-[hTCRd-opt]-F-P2A-IgSP-Apa-CD20-vHH-2HCD25-G4Sx3v2-hu-mR005-1-vH-[hTCRg1-opt] | 5028 | 15718 |
| CD1 9 | | CD 20 | | | CD8SP-hu-mROO5-1-vL-IgCL-CD3zECDTMCP-opt-F-P2A-Spe-IgSP-Apa-CD20-vHH-2HCD25-G4Sx3v2-hu-mR005-1-vH-IgG1-CH1-CD3zECDTMCP-opt2-F-F2A-PAC | 5029 | 15719 |
| CD1 9 | | CD 20 | | | CD8SP-hu-mROO5-1-vL-[hTCRbECD-CD3zECDTMCP-opt]-F-P2A-IgSP-Apa-CD20-vHH-2HCD25-G4Sx3v2-hu-mR005-1-vH-[hTCRaECD-CD3zECDTMCP-opt2] | 5030 | 15720 |
| CD1 9 | | CD 20 | | | CD8SP-hu-mROO5-1-vL-[hTCRb-KAC-ECD-CD3zECDTMCP-opt]-F-P2A-IgSP-Apa-CD20-vHH-2HCD25-G4Sx3v2-hu-mR005-1-vH-[hTCRa-CSDVP-ECD-CD3zECDTMCP-opt2] | 5031 | 15721 |
| CD1 9 | | CD 20 | | | CD8SP-hu-mROO5-1-vL-V5-[hTCRbECD-CD3zECDTMCP-opt]-F-P2A-IgSP-Apa-CD20-vHH-2HCD25-G4Sx3v2-hu-mROO5-1-vH-Myc-[hTCRaECD-CD3zECDTM-28z-opt2] | 5032 | 15722 |
| CD1 9 | | CD 20 | | | CD8SP-hu-mROO5-1-vL-V5-[hTCRbECD-CD3zECDTM-28z-opt]-F-P2A-IgSP-Apa-CD20-vHH-2HCD25-G4Sx3v2-hu-mROO5-1-vH-Myc-[hTCRaECD-CD3zECDTM-28z-opt2] | 5033 | 15723 |
| CD1 9 | | CD 20 | | | CD8SP-hu-mROO5-1-vL-V5-[hTCRbECD-CD3zECDTMCP-opt]-F-P2A-IgSP-Apa-CD20-vHH-2HCD25-G4Sx3v2-hu-mROO5-1-vH-Myc4-[hTCRaECD-CD3zECDTM-BBz-opt2] | 5034 | 15724 |
| CD1 9 | | CD 20 | | | CD8SP-hu-mROO5-1-vL-V5-[hTCRbECD-CD3zECDTM-BBz-opt]-F-P2A-IgSP-Apa-CD20-vHH-2HCD25-G4Sx3v2-hu-mROO5-1-vH-Myc4-[hTCRaECD-CD3zECDTM-BBz-opt2] | 5035 | 15725 |
| CD1 9 | | CD 20 | | | CD8SP-hu-mROO5-1-vL-CD3zECDTMCP-opt-F-P2A-Spe-IgSP-Apa-CD20-vHH-2HCD25-G4Sx3v2-hu-mR005-1-vH-Mlu-CD3zECDTMCP-opt2-F-F2A-PAC | 5036 | 15726 |
| CD1 9 | | CD 20 | | | CD8SP-hu-mROO5-1-vL-[IgCL-TCRg-6MD]-F-P2A-IgSP-Apa-CD20-vHH-2HCD25-G4Sx3v2-hu-mROO5-1-vH-[IgG1-CH1-TCRd-6MD] | 5037 | 15727 |
| CD1 9 | | CD 20 | | | CD8SP-hu-mROO5-1-vL-[IgCL-TCRb-IAH-6MD]-F-P2A-IgSP-Apa-CD20-vHH-2HCD25-G4Sx3v2-hu-mROO5-1-vH-[IgG1-CH1-TCRa-SDVP-6MD] | 5038 | 15728 |
| CD1 9 | | CD 20 | | | CD8SP-hu-mROO5-1-vL-[IgCL-TCRb-wt-opt2-6MD]-F-P2A-IgSP-Apa-CD20-vHH-2HCD25-G4Sx3v2-hu-mROO5-1-vH-[IgG1-CH1-TCRa-wt-op2-6MD] | 5039 | 15729 |
| CD1 9 | | CD 20 | | | IgSP-Apa-CD20-vHH-2HCD25-G4Sx3v2-hu-mROO5-1-(vH-vL)-G3S-CD3e-ECDTMCP-opt2 | 5040 | 15730 |
| CD1 9 | | CD 20 | | | IgSP-Apa-CD20-vHH-2HCD25-G4Sx3v2-hu-mR005-1-(vH-vL)-G3S-CD3d-ECDTMCP-opt2 | 5041 | 15731 |
| CD1 9 | | CD 20 | | | IgSP-Apa-CD20-vHH-2HCD25-G4Sx3v2-hu-mROO5-1-(vH-vL)-G3S-CD3g-ECDTMCP-opt2 | 5042 | 15732 |
| CD1 9 | | CD 20 | | | IgSP-Apa-CD20-vHH-2HCD25-G4Sx3v2-hu-mR005-1-(vH-vL)-G3S-CD3z-ECDTMCP-opt2 | 5043 | 15733 |
| CD1 9 | | CD 20 | | | IgSP-Apa-CD20-vHH-2HCD25-G4Sx3v2-hu-mROO5-1-vH-[hTCRa-opt2]-F-F2A-BlastR | 5044 | 15734 |
| CD1 9 | | CD 20 | | | IgSP-Apa-CD20-vHH-2HCD25-G4Sx3v2-hu-mR005-1-vH-[hTCRa-opt2] | 5045 | 15735 |
| CD1 9 | | CD 20 | | | IgSP-Apa-CD20-vHH-2HCD25-G4Sx3v2-hu-mROO5-1-vH-Myc-[hTCRa-T48C-opt]-F-F2A-BlastR | 5046 | 15736 |
| CD1 9 | | CD 20 | | | IgSP-Apa-CD20-vHH-2HCD25-G4Sx3v2-hu-mROO5-1-vH-Myc-[hTCRa-T48C-opt] | 5047 | 15737 |
| CD1 9 | CD1 9 | CD 20 | | | CD8SP-CD19-vHH-048-G4Sx3-R1-hu-mROO5-1-vL-[hTCRa-CSDVP]-F-F2A-IgSP-Apa-CD20-vHH-2HCD25-G4Sx3v2-hu-mROO5-1-vH-[hTCRb-KACIAH]-F-P2A-PAC | 5048 | 15738 |
| CD1 9 | CD1 9 | CD 20 | | | CD8SP-CD19-vHH-048-G4Sx3-R1-hu-mROO5-1-vL-[hTCRb-KACIAH]-F-P2A-IgSP-Apa-CD20-vHH-2HCD25-G4Sx3v2-hu-mROO5-1-vH-[hTCRa-CSDVP]-F-F2A-PAC | 5049 | 15739 |
| CD1 9 | CD1 9 | CD 20 | | | CD8SP-CD19-vHH-048-G4Sx3-R1-hu-mR005-1-vL-[hTCRb-S57C]-F-P2A-IgSP-Apa-CD20-vHH-2HCD25-G4Sx3v2-hu-mROO5-1-vH-[hTCRa-T48C]-F-F2A-PAC | 5050 | 15740 |
| CD1 9 | CD1 9 | CD 20 | | | CD8SP-CD19-vHH-048-G4Sx3-R1-hu-mR005-1-vL-[hTCRb-S57C]-F-P2A-IgSP-Apa-CD20-vHH-2HCD25-G4Sx3v2-hu-mROO5-1-vH-[hTCRa-T48C] | 5051 | 15741 |
| CD1 9 | CD1 9 | CD 20 | | | CD8SP-CD19-vHH-048-G4Sx3-R1-hu-mROO5-1-vL-[hTCRb-S57C]-F-P2A-IgSP-Apa-CD20-vHH-2HCD25-G4Sx3v2-hu-mR005-1-vH-[hTCRa-T4SC]-F-F2A-KI3-opt | 5052 | 15742 |
| CD1 9 | CD1 9 | CD 20 | | | CD8SP-CD19-vHH-048-G4Sx3-R1-hu-mR005-1-vL-[hTCRa-T48C]-F-P2A-IgSP-Apa-CD20-vHH-2HCD25-G4Sx3v2-hu-mR005-1-vH-[hTCRb-S57C] | 5053 | 15743 |
| CD1 9 | CD1 9 | CD 20 | | | CD8SP-CD19-vHH-048-G4Sx3-R1-hu-mR005-1-vL-[hTCRa-T48C]-F-P2A-IgSP-Apa-CD20-vHH-2HCD25-G4Sx3v2-hu-mROO5-1-vH-[hTCRb-S57C]-F-P2A-K13-opt | 5054 | 15744 |
| CD1 9 | CD1 9 | CD 20 | | | CD8SP-CD19-vHH-048-G4Sx3-R1-hu-mROO5-1-vL-[hTCRb-opt2]-F-P2A-IgSP-Apa-CD20-vHH-2HCD25-G4Sx3v2-hu-mROO5-1-vH-[hTCRa-opt2]-F-F2A-PAC | 5055 | 15745 |
| CD1 9 | CD1 9 | CD 20 | | | CD8SP-CD19-vHH-048-G4Sx3-R1-hu-mR005-1-vL-[hTCRb-opt2]-F-P2A-IgSP-Apa-CD20-vHH-2HCD25-G4Sx3v2-hu-mR005-1-vH-Myc-[pretc. Ra-Del48]-F-F2A-PAC | 5056 | 15746 |
| CD1 9 | CD1 9 | CD 20 | | | CD8SP-CD19-vHH-048-G4Sx3-R1-hu-mROO5-1-vL-V5-[hTCRg1-opt]-F-P2A-IgSP-Apa-CD20-vHH-2HCD25-G4Sx3v2-hu-mROO5-1-vH-Myc-[hTCRd-opt]-F-F2A-PAC | 5057 | 15747 |
| CD1 9 | CD1 9 | CD 20 | | | CD8SP-CD19-vHH-048-G4Sx3-R1-hu-mROO5-1-vL-[hTCRd-opt]-F-P2A-IgSP-Apa-CD20-vHH-2HCD25-G4Sx3v2-hu-mROO5-1-vH-[hTCRg1-opt] | 5058 | 15748 |
| CD1 9 | CD1 9 | CD 20 | | | CD8SP-CD19-vHH-048-G4Sx3-R1-hu-mROO5-1-vL-IgCL-CD3zECDTMCP-opt-F-P2A-Spe-IgSP-Apa-CD20-vHH-2HCD25-G4Sx3v2-hu-mROO5-1-vH-IgG1-CHI-CD3zECDTMCP-opt2-F-F2A-PAC | 5059 | 15749 |
| CD1 9 | CD1 9 | CD 20 | | | CD8SP-CD19-vHH-048-G4Sx3-R1-hu-mROO5-1-vL-[hTCRbECD-CD3zECDTMCP-opt]-F-P2A-IgSP-Apa-CD20-vHH-2HCD25-G4Sx3v2-hu-mR005-1-vH-[hTCRaECD-CD3zECDTMCP-opt2] | 5060 | 15750 |
| CD1 9 | CD1 9 | CD 20 | | | CD8SP-CD19-vHH-048-G4Sx3-R1-hu-mROO5-1-vL-[hTCRb-KAC-ECD-CD3zECDTMCP-opt]-F-P2A-IgSP-Apa-CD20-vHH-2HCD25-G4Sx3v2-hu-mROO5-1-vH-[hTCRa-CSDVP-ECD-CD3zECDTMCP-opt2] | 5061 | 15751 |
| CD1 9 | CD1 9 | CD 20 | | | CD8SP-CD19-vHH-048-G4Sx3-R1-hu-mROO5-1-vL-V5-[hTCRbECD-CD3zECDTMCP-opt]-F-P2A-IgSP-Apa-CD20-vHH-2HCD25-G4Sx3v2-hu-mROO5-1-vH-Myc-[hTCRaECD-CD3zECDTM-28z-opt2] | 5062 | 15752 |
| CD1 9 | CD1 9 | CD 20 | | | CD8SP-CD19-vHH-048-G4Sx3-R1-hu-mROO5-1-vL-V5-[hTCRbECD-CD3zECDTM-28z-opt]-F-P2A-IgSP-Apa-CD20-vHH-2HCD25-G4Sx3v2-hu-mR005-1-vH-Myc-[hTCRaECD-CD3zECDTM-28z-opt2] | 5063 | 15753 |
| CD1 9 | CD1 9 | CD 20 | | | CD8SP-CD19-vHH-048-G4Sx3-R1-hu-mROO5-1-vL-V5-[hTCRbECD-CD3zECDTMCP-opt]-F-P2A-IgSP-Apa-CD20-vHH-2HCD25-G4Sx3v2-hu-mROO5-1-vH-Myc4-[hTCRaECD-CD3zECDTM-BBz-opt2] | 5064 | 15754 |
| CD1 9 | CD1 9 | CD 20 | | | CD8SP-CD19-vHH-048-G4Sx3-R1-hu-mROO5-1-vL-V5-[hTCRbECD-CD3zECDTM-BBz-opt]-F-P2A-IgSP-Apa-CD20-vHH-2HCD25-G4Sx3v2-hu-mROO5-1-vH-Myc4-[hTCRaECD-CD3zECDTM-BBz-opt2] | 5065 | 15755 |
| CD1 9 | CD1 9 | CD 20 | | | CD8SP-CD19-vHH-048-G4Sx3-RI-hu-mROO5-1-vL-CD3zECDTMCP-opt-F-P2A-Spe-IgSP-Apa-CD20-vHH-2HCD25-G4Sx3v2-hu-mROO5-1-vH-Mlu-CD3zECDTMCP-opt2-F-F2A-PAC | 5066 | 15756 |
| CD1 9 | CD1 9 | CD 20 | | | CD8SP-CD19-vHH-048-G4Sx3-R1-hu-mROO5-1-vL-[IgCL-TCRg-6MD]-F-P2A-IgSP-Apa-CD20-vHH-2HCD25-G4Sx3v2-hu-mR005-1-vH-[IgG-CH1-TCRd-6MD] | 5067 | 15757 |
| CD1 9 | CD1 9 | CD 20 | | | CD8SP-CD19-vHH-048-G4Sx3-R1-hu-mROO5-1-vL-[IgCL-TCRb-IAH-6MD]-F-P2A-IgSP-Apa-CD20-vHH-2HCD25-G4Sx3v2-hu-mR005-1-vH-[IgG1-CH1-TCRa-SDVP-6MD] | 5068 | 15758 |
| CD1 9 | CD1 9 | CD 20 | | | CD8SP-CD19-vHH-048-G4Sx3-R1-hu-mROO5-1-vL-[IgCL-TCRb-wt-opt2-6MD]-F-P2A-IgSP-Apa-CD20-vHH-2HCD25-G4Sx3v2-hu-mROO5-1-vH-[IgG1CH1-TCRa-wt-op2-6MD] | 5069 | 15759 |
| CD1 9 | CD1 9 | | BC MA | | CD8SP-BCMA-FHVH-33-G3Sx2-CD19-vHH-048-G4Sx3-R1-hu-mROO5-1-vL-Gly-Ser-Linker-hu-mROO5-1vH-Myc-28z | 5070 | 15760 |
| CD1 9 | CD1 9 | | BC MA | | CD8SP-BCMA-FHVH-33-G3Sx2-CD19-vHH-048-G4Sx3-R1-hu-mROO5-1-Gly-Ser-Linker-hu-mROO5-1-vH-Myc-CD8TM-BBz | 5071 | 15761 |
| CD1 9 | CD1 9 | | BC MA | | CD8SP-BCMA-FHVH-33-G3Sx2-CD19-vHH-048-G4Sx3-R1-hu-mROO5-1-vL-Gly-Ser-Linker-hu-mROO5-1-vH-Myc-CD8TM-zP2A-K13-FLAG-T2A-PAC | 5072 | 15762 |
| CD1 9 | CD1 9 | | BC MA | | CD8SP-BCMA-FHVH-33-G3Sx2-CD19-vHH-048-G4Sx3-R1-hu-mROO5-1-vL-[hTCRa-CSDVP]-F-F2A-SP-hu-mROO5-1-vH-[hTCRb-KACIAH]-F-P2A-PAC | 5073 | 15763 |
| CD1 9 | CD1 9 | | BC MA | | CD8SP-BCMA-FHVH-33-G3Sx2-CD19-vHH-048-G4Sx3-R1-hu-mROO5-1-vL-[hTCRb-KACIAH]-F-P2A-SP-hu-mROO5-1-vH-[hTCRa-CSDVP]-F-F2A-PAC | 5074 | 15764 |
| CD1 9 | CD1 9 | | BC MA | | CD8SP-BCMA-FHVH-33-G3Sx2-CD19-vHH-048-G4Sx3-R1-hu-mROO5-1-vL-[hTCRb-S57C]-F-P2A-SP-hu-mROO5-1-vH-[hTCRa-T48C] | 5075 | 15765 |
| CD1 9 | CD1 9 | | BC MA | | CD8SP-BCMA-FHVH-33-G3 Sx2-CD 19-vHH-048-G4Sx3-R1-hu-mROO5-1-vL-[hTCRb-S57C]-F-P2A-SP-hu-mROO5-1-vH-[hTCRa-T48C] -F-F2A-K13-opt | 5076 | 15766 |
| CD1 9 | CD1 9 | | BC MA | | CD8SP-BCMA-FHVH-33-G3Sx2-CD19-vHH-048-G4Sx3-R1-hu-mROO5-1-vL-[hTCRa-T48C]-F-P2A-SP-hu-mROO5-1-vH-[hTCRb-S57C] | 5077 | 15767 |
| CD1 9 | CD1 9 | | BC MA | | CD8SP-BCMA-FHVH-33-G3Sx2-CD19-vHH-048-G4Sx3-R1-hu-mROO5-1-vL-[hTCRa-T48C]-F-P2A-SP-hu-mROO5-1-vH-[hTCRb-S57C]-F-P2A-K13-opt | 5078 | 15768 |
| CD1 9 | CD1 9 | | BC MA | | CDSSP-V5-[hTCRb-KACIAH]-F-P2A-CD8SP-BCMA-FHVH-33-G3Sx2-CD19-vHH-048-G4Sx3-R1-hu-mROO5-1-vL-Gly-Ser-Linker-hu-mROO5-1-vH-Myc-[hTCRa-CSDVP]-F-F2A-PAC | 5079 | 15769 |
| CD1 9 | CD1 9 | | BC MA | | CD8SP-MYC-[hTCRa-T48C-opt1]-F-F2A-SP-BCMA-FHVH-33-G3Sx2-CD19-vHH-048-G4Sx3-R1-hu-mROO5-1-vL-Gly-Ser-Linker-hu-mROO5-1-vH-V5-[hTCRb-S57C-opt1]-F-P2A-PAC | 5080 | 15770 |
| CD1 9 | CD1 9 | | BC MA | | CD8SP-BCMA-FHVH-33-G3Sx2-CD19-vHH-048-G4Sx3-R1-hu-mROO5-1-vL-[hTCRb-opt2]-F-P2A-SP-hu-mROO5-1 -vH-[hTCRa-opt2]-F-F2A-PAC | 5081 | 15771 |
| CD1 9 | CD1 9 | | BC MA | | CD8SP-BCMA-FHVH-33-G3 Sx2-CD 19-vHH-048-G4Sx3-R1-hu-mROO5-1-vL-[hTCRb-opt2]-F-P2A-SP-hu-mROO5-1 -vH-Myc-[pretc. Ra-Del48]-F-F2A-PAC | 5082 | 15772 |
| CD1 9 | CD1 9 | | BC MA | | CD8SP-[hTCRb-opt2]-F-P2A-CD8SP-BCMA-FHVH-33-G3Sx2-CD19-vHH-048-G4Sx3-R1-hu-mROO5-1-vL-Gly-Ser-Linker-hu-mROO5-1-vH-Myc4-[pretc.Ra-Del48]-F-F2A-PAC | 5083 | 15773 |
| CD1 9 | CD1 9 | | BC MA | | CD8SP-BCMA-FHVH-33-G3Sx2-CD19-vHH-048-G4Sx3-Rl-hu-mROO5-1-vL-V5-[hTCRgl-opt]-F-P2A-SP-hu-mROO5-1-vH-Myc-[hTCRd-opt]-F-F2A-PAC | 5084 | 15774 |
| CD1 9 | CD1 9 | | BC MA | | CD8SP-BCMA-FHVH-33-G3Sx2-CD19-vHH-048-G4Sx3 -R1-hu-mROO5 -1-vL-[hTCRd-opt]-F-P2A-SP-hu-mROO5-1-vH-[hTCRg1-opt] | 5085 | 15775 |
| CD1 9 | CD1 9 | | BC MA | | CD8SP-V5-[hTCRgl-opt]-F-P2A-CD8SP-BCMA-FHVH-33-G3Sx2-CD19-vHH-048-G4Sx3-Rl-hu-mR005-1-vL-Gly-Ser-Linker-hu-mROO5-1-vH-Myc-[hTCRd-opt]-F-F2A-PAC | 5086 | 15776 |
| CD1 9 | CD1 9 | | BC MA | | CD8SP-BCMA-FHVH-33-G3Sx2-CD19-vHH-048-G4Sx3-R1-hu-mROO5-1-vL-IgCL-CD3zECDTMCP-opt-F-P2A-Spe-SP-hu-mROO5-1-vH-IgGI-CH1-CD3zECDTMCP-opt2-F-F2A-PAC | 5087 | 15777 |
| CD1 9 | CD1 9 | | BC MA | | CD8SP-BCMA-FHVH-33-G3Sx2-CD19-vHH-048-G4Sx3-R1-hu-mROO5-1-vL-[hTCRbECD-CD3zECDTMCP-opt]-F-P2A-SP-hu-mROO5-1-vH-[hTCRaECD-CD3zECDTMCP-opt2] | 5088 | 15778 |
| CD1 9 | CD1 9 | | BC MA | | CD8SP-BCMA-FHVH-33-G3Sx2-CD19-vHH-048-G4Sx3-R1-hu-mR005-1-vL-[hTCRb-KAC-ECD-CD3zECDTMCP-opt]-F-P2A-SP-hu-mROO5-1-vH-[hTCRa-CSDVP-ECD-CD3zECDTMCP-opt2] | 5089 | 15779 |
| CD1 9 | CD1 9 | | BC MA | | CD8SP-BCMA-FHVH-33-G3Sx2-CD19-vHH-048-G4Sx3-R1-hu-mROO5-1-vL-V5-[hTCRbECD-CD3zECDTMCP-opt]-F-P2A-SP-hu-mROO5-1-vH-Myc-[hTCRaECD-CD3zECDTM-28z-opt2] | 5090 | 15780 |
| CD1 9 | CD1 9 | | BC MA | | CD8SP-BCMA-FHVH-33-G3Sx2-CD19-vHH-048-G4Sx3-R1-hu-mROO5-1-vL-V5-[hTCRbECD-CD3zECDTM-28z-opt]-F-P2A-SP-hu-mROO5-1-vH-Myc-[hTCRaECD-CD3zECDTM-28z-opt2] | 5091 | 15781 |
| CD1 9 | CD1 9 | | BC MA | | CD8SP-BCMA-FHVH-33-G3Sx2-CD19-vHH-048-G4Sx3-R1-hu-mROO5-1-vL-V5-[hTCRbECD-CD3zECDTMCP-opt]-F-P2A-SP-hu-mROO5-1-vH-Myc4-[hTCRaECD-CD3zECDTM-BBz-opt2] | 5092 | 15782 |
| CD1 9 | CD1 9 | | BC MA | | CD8SP-BCMA-FHVH-33-G3Sx2-CD19-vHH-048-G4Sx3-R1-hu-mROO5-1-vL-V5-[hTCRbECD-CD3zECDTM-BBz-opt]-F-P2A-SP-hu-mROO5-1-vH-Myc4-[hTCRaECD-CD3zECDTM-BBz-opt2] | 5093 | 15783 |
| CD1 9 | CD1 9 | | BC MA | | CD8SP-BCMA-FHVH-33-G3Sx2-CD19-vHH-048-G4Sx3-R1-hu-mROO5-1-vL-CD3zECDTMCP-opt-F-P2A-Spe-SP-hu-mROO5-1-vH-Mlu-CD3zECDTMCP-opt2-F-F2A-PAC | 5094 | 15784 |
| CD1 9 | CD1 9 | | BC MA | | CD8SP-BCMA-FHVH-33-G3Sx2-CD19-vHH-048-G4Sx3-R1-hu-mROO5-1-vL-[IgCL-TCRg-6MD]-F-P2A-SP-hu-mROO5-1-vH-[IgG1-CH1-TCRd-6MD] | 5095 | 15785 |
| CD1 9 | CD1 9 | | BC MA | | CD8SP-BCMA-FHVH-33-G3Sx2-CD19-vHH-048-G4Sx3-R1-hu-mROO5-1-vL-[IgCL-TCRb-IAH-6MD]-F-P2A-SP-hu-mROO5-1-vH-[IgG1-CH1-TCRa-SDVP-6MD] | 5096 | 15786 |
| CD1 9 | CD1 9 | | BC MA | | CD8SP-BCMA-FHVH-33-G3Sx2-CD19-vHH-048-G4Sx3-R1-hu-mROO5-1-vL-[IgCL-TCRb-wt-opt2-6MD]-F-P2A-SP-hu-mROO5-1-vH-[IgG1-CH1-TCRa-wt-op2-6MD] | 5097 | 15787 |
| CD1 9 | CD1 9 | | BC MA | | CD8SP-BCMA-FHVH-33-G3Sx2-CD19-vHH-048-G4Sx3-R1-hu-mROO5-1-(vL-vH)-CD3e-ECDTMCP-opt2 | 5098 | 15788 |
| CD1 9 | CD1 9 | | BC MA | | CD8SP-BCMA-FHVH-33-G3 Sx2-CD19-vHH-048-G4Sx3-R1-hu-mROO5-1-(vL-vH)-CD3d-ECDTMCP-opt2 | 5099 | 15789 |
| CD1 9 | CD1 9 | | BC MA | | CD8SP-BCMA-FHVH-33-G3Sx2-CD19-vHH-048-G4Sx3-R1-hu-mROO5-1-(vL-vH)-CD3g-ECDTMCP-opt2 | 5100 | 15790 |
| CD1 9 | CD1 9 | | BC MA | | CD8SP-BCMA-FHVH-33-G3Sx2-CD19-vHH-048-G4Sx3-R1-hu-mROO5-1-(vL-vH)-CD3z-ECDTMCP-opt2 | 5101 | 15791 |
| CD1 9 | CD1 9 | | BC MA | | CD8SP-BCMA-FHVH-33-G3Sx2-CD19-vHH-048-G4Sx3-R1-hu-mROO5-1-vL-Gly-Ser-Linker-hu-mROO5-1-vH-[hTCRa-opt2]-F-F2A-PAC | 5102 | 15792 |
| CD1 9 | CD1 9 | | BC MA | | CD8SP-BCMA-FHVH-33-G3Sx2-CD19-vHH-048-G4Sx3-R1-hu-mR005-1-vL-Gly-Ser-Linker-hu-mROO5-1-vH-[hTCRb-opt2]-F-F2A-PAC | 5103 | 15793 |
| CD1 9 | CD1 9 | | BC MA | | CD8SP-BCMA-FHVH-33-G3Sx2-CD19-vHH-048-G4Sx3-R1-hu-mROO5-1-vL-Gly-Ser-Linker-hu-mROO5-1-vH-Myc4-[pretc.Ra-Del48]-F-F2A-PAC | 5104 | 15794 |
| CD1 9 | CD1 9 | | BC MA | | CD8SP-BCMA-FHVH-33-G3Sx2-CD19-vHH-048-G4Sx3-R1-hu-mROO5-1-vL-[hTCRb-opt2]-F-P2A-PAC | 5105 | 15795 |
| CD1 9 | CD1 9 | | BC MA | | CD8SP-BCMA-FHVH-33-G3Sx2-CD19-vHH-048-G4Sx3-R1-hu-mROO5-1-vL-[hTCRb-opt2] | 5106 | 15796 |
| CD1 9 | CD1 9 | | BC MA | | CD8SP-BCMA-FHVH-33-G3Sx2-CD19-vHH-048-G4Sx3-R1-hu-mROO5-1-vL-V5-[hTCRb-S57C-opt]-F-P2A-PAC | 5107 | 15797 |
| CD1 9 | CD1 9 | | BC MA | | CD8SP-BCMA-FHVH-33-G3Sx2-CD19-vHH-048-G4Sx3-R1-hu-mROO5-1-vL-V5-[hTCRb-S57C-opt] | 5108 | 15798 |
| CD1 9 | CD1 9 | | BC MA | | CD8SP-BCMA-FHVH-33-G3Sx2-CD19-vHH-048-G4Sx3-R1-hu-mROO5-1-vL-Gly-Ser-Linker-hu-mROO5-1-vH-[hTCRa-SDVP]-F-F2A-PAC | 5109 | 15799 |
| CD1 9 | CD1 9 | | BC MA | | CD8SP-BCMA-FHVH-33-G3Sx2-CD19-vHH-048-G4Sx3-R1-hu-mROO5-1-vL-Gly-Ser-Linker-hu-mROO5-1-vH-[hTCRb-KAIAH]-F-P2A-PAC | 5110 | 15800 |
| CD1 9 | CD1 9 | | BC MA | | CD8SP-BCMA-FHVH-33-G3Sx2-CD19-vHH-048-G4Sx3-R1-hu-mROO5-1-vL-[hTCRa-CSDVP]-F-F2A-IgSP-Apa-CD20-vHH-2HCD25-G4Sx3v2-hu-mROO5-1-vH-[hTCRb-KACIAH]-F-P2A-PAC | 5111 | 15801 |
| CD1 9 | CD1 9 | | BC MA | | CD8SP-BCMA-FHVH-33-G3Sx2-CD19-vHH-048-G4Sx3-R1-hu-mROO5-1-vL-[hTCRb-KACIAH]-F-P2A-IgSP-Apa-CD20-vHH-2HCD25-G4Sx3v2-hu-mROO5-1-vH-[hTCRa-CSDVP]-F-F2A-PAC | 5112 | 15802 |
| CD1 9 | CD1 9 | | BC MA | | CD8SP-BCMA-FHVH-33-G3Sx2-CD19-vHH-048-G4Sx3-R1-hu-mROO5-1-vL-[hTCRb-S57C]-F-P2A-IgSP-Apa-CD20-vHH-2HCD25-G4Sx3v2-hu-mROO5-1-vH-[hTCRa-T48C]-F-F2A-PAC | 5113 | 15803 |
| CD1 9 | CD1 9 | | BC MA | | CD8SP-BCMA-FHVH-33-G3Sx2-CD19-vHH-048-G4Sx3-R1-hu-mROO5-1-vL-[hTCRb-S57C]-F-P2A-IgSP-Apa-CD20-vHH-2HCD25-G4Sx3v2-hu-mROO5-1-vH-[hTCRa-T48C] | 5114 | 15804 |
| CD1 9 | CD1 9 | | BC MA | | CD8SP-BCMA-FHVH-33-G3Sx2-CD19-vHH-048-G4Sx3-R1-hu-mROO5-1-vL-[hTCRb-S57C]-F-P2A-IgSP-Apa-CD20-vHH-2HCD25-G4Sx3v2-hu-mR005-1-vH-[hTCRa-T48C]-F-F2A-K13-opt | 5115 | 15805 |
| CD1 9 | CD1 9 | | BC MA | | CD8SP-BCMA-FHVH-33-G3Sx2-CD19-vHH-048-G4Sx3-R1-hu-mROO5-1-vL-[hTCRa-T48C]-F-P2A-IgSP-Apa-CD20-vHH-2HCD25-G4Sx3v2-hu-mROO5-1-vH-[hTCRb-S57C] | 5116 | 15806 |
| CD1 9 | CD1 9 | | BC MA | | CD8SP-BCMA-FHVH-33-G3Sx2-CD19-vHH-048-G4Sx3-R1-hu-mROO5-1-vL-[hTCRa-T48C]-F-P2A-IgSP-Apa-CD20-vHH-2HCD25-G4Sx3v2-hu-mROO5-1-vH-[hTCRb-S57C]-F-P2A-K13-opt | 5117 | 15807 |
| CD1 9 | CD1 9 | | BC MA | | CD8SP-BCMA-FHVH-33-G3Sx2-CD19-vHH-048-G4Sx3-R1-hu-mROO5-1-vL-[hTCRb-opt2]-F-P2A-IgSP-Apa-CD20-vHH-2HCD25-G4Sx3v2-hu-mROO5-1-vH-[hTCRa-opt2]-F-F2A-PAC | 5118 | 15808 |
| CD1 9 | CD1 9 | | BC MA | | CD8SP-BCMA-FHVH-33-G3 Sx2-CD 19-vHH-048-G4Sx3-R1-hu-mROO5-1-vL-[hTCRb-opt2]-F-P2A-IgSP-Apa-CD20-vHH-2HCD25-G4Sx3v2-hu-mROO5-1-vH-Myc-[pretc. Ra-Del48]-F-F2A-PAC | 5119 | 15809 |
| CD1 9 | CD1 9 | | BC MA | | CD8SP-BCMA-FHVH-33-G3 Sx2-CD19-vHH-048-G4Sx3-R1-hu-mROO5-1-vL-V5-[hTCRg1 -opt] -F-P2A-IgSP-Apa-CD20-vHH-2HCD25-G4Sx3v2-hu-mROO5-1-vH-Myc-[hTCRd-opt]-F-F2A-PAC | 5120 | 15810 |
| CD1 9 | CD1 9 | | BC MA | | CD8SP-BCMA-FHVH-33-G3Sx2-CD19-vHH-048-G4Sx3-R1-hu-mROO5-1-vL-[hTCRd-opt]-F-P2A-IgSP-Apa-CD20-vHH-2HCD25-G4Sx3v2-hu-mROO5-1-vH-[hTCRgl-opt] | 5121 | 15811 |
| CD1 9 | CD1 9 | | BC MA | | CD8SP-BCMA-FHVH-33-G3Sx2-CD19-vHH-048-G4Sx3-R1-hu-mROO5-1-vL-IgCL-CD3zECDTMCP-opt-F-P2A-Spe-IgSP-Apa-CD20-vHH-2HCD25-G4Sx3v2-hu-mROO5-1-vH-IgG1-CH1-CD3zECDTMCP-opt2-F-F2A-PAC | 5122 | 15812 |
| CD1 9 | CD1 9 | | BC MA | | CD8SP-BCMA-FHVH-33-G3Sx2-CD19-vHH-048-G4Sx3-R1-hu-mROO5-1-vL-[hTCRbECD-CD3zECDTMCP-opt]-F-P2A-IgSP-Apa-CD20-vHH-2HCD25-G4Sx3v2-hu-mROO5-1-vH-[hTCRaECD-CD3zECDTMCP-opt2] | 5123 | 15813 |
| CD1 9 | CD1 9 | | BC MA | | CD8SP-BCMA-FHVH-33-G3Sx2-CD19-vHH-048-G4Sx3-R1-hu-mROO5-1-vL-[hTCRb-KAC-ECD-CD3zECDTMCP-opt]-F-P2A-IgSP-Apa-CD20-vHH-2HCD25-G4Sx3v2-hu-mROO5-1-vH-[hTCRa-CSDVP-ECD-CD3zECDTMCP-opt2] | 5124 | 15814 |
| CD1 9 | CD1 9 | | BC MA | | CD8SP-BCMA-FHVH-33-G3Sx2-CD19-vHH-048-G4Sx3-R1-hu-mROO5-1-vL-V5-[hTCRbECD-CD3zECDTMCP-opt]-F-P2A-IgSP-Apa-CD20-vHH-2HCD25-G4Sx3v2-hu-mROO5-1-vH-Myc-[hTCRaECD-CD3zECDTM-28z-opt2] | 5125 | 15815 |
| CD1 9 | CD1 9 | | BC MA | | CD8SP-BCMA-FHVH-33-G3Sx2-CD19-vHH-048-G4Sx3-R1-hu-mROO5-1-vL-V5-[hTCRbECD-CD3zECDTM-28z-opt]-F-P2A-IgSP-Apa-CD20-vHH-2HCD25-G4Sx3v2-hu-mROO5-1-vH-Myc-[hTCRaECD-CD3zECDTM-28z-opt2] | 5126 | 15816 |
| CD1 9 | CD1 9 | | BC MA | | CD8SP-BCMA-FHVH-33-G3Sx2-CD19-vHH-048-G4Sx3-R1-hu-mROO5-1-vL-V5-[hTCRbECD-CD3zECDTMCP-opt]-F-P2A-IgSP-Apa-CD20-vHH-2HCD25-G4Sx3v2-hu-mROO5-1-vH-Myc4-[hTCRaECD-CD3zECDTM-BBz-opt2] | 5127 | 15817 |
| CD1 9 | CD1 9 | | BC MA | | CD8SP-BCMA-FHVH-33-G3Sx2-CD19-vHH-048-G4Sx3-R1-hu-mROO5-1-vL-V5-[hTCRbECD-CD3zECDTM-BBz-opt]-F-P2A-IgSP-Apa-CD20-vHH-2HCD25-G4Sx3v2-hu-mROO5-1-vH-Myc4-[hTCRaECD-CD3zECDTM-BBz-opt2] | 5128 | 15818 |
| CD1 9 | CD1 9 | | BC MA | | CD8SP-BCMA-FHVH-33-G3Sx2-CD19-vHH-048-G4Sx3-R1-hu-mROO5-1-vL-CD3zECDTMCP-opt-F-P2A-Spe-IgSP-Apa-CD20-vHH-2HCD25-G4Sx3v2-hu-mROO5-1-vH-Mlu-CD3zECDTMCP-opt2-F-F2A-PAC | 5129 | 15819 |
| CD1 9 | CD1 9 | | BC MA | | CD8SP-BCMA-FHVH-33-G3Sx2-CD19-vHH-048-G4Sx3-R1-hu-mROO5-1-vL-[IgCL-TCRg-6MD]-F-P2A-IgSP-Apa-CD20-vHH-2HCD25-G4Sx3v2-hu-mROO5-1-vH-[IgG1-CH1-TCRd-6MD] | 5130 | 15820 |
| CD1 9 | CD1 9 | | BC MA | | CD8SP-BCMA-FHVH-33-G3Sx2-CD19-vHH-048-G4Sx3-R1-hu-mROO5-1-vL-[IgCL-TCRb-IAH-6MD]-F-P2A-IgSP-Apa-CD20-vHH-2HCD25-G4Sx3v2-hu-mROO5-1-vH-[IgG1-CH1-TCRa-SDVP-6MD] | 5131 | 15821 |
| CD1 9 | CD1 9 | | BC MA | | CD8SP-BCMA-FHVH-33-G3Sx2-CD19-vHH-048-G4Sx3-R1-hu-mROO5-1-vL-[IgCL-TCRb-wt-opt2-6MD]-F-P2A-IgSP-Apa-CD20-vHH-2HCD25-G4Sx3v2-hu-mROO5-1-vH-[IgG1-CHI-TCRa-wt-op2-6MD] | 5132 | 15822 |
| | CD1 9 | CD 20 | BC MA | | CD8SP-BCMA-FHVH-33-G3Sx2-CD19-vHH-048-[IgCL-TCRb-wt-opt2-6MD]-F-P2A-IgSP-Apa-CD20-2HCD25-VHH-[IgG1-CH1-TCRa-wt-opt2-6MD]-F-F2A-PAC | 5133 | 15823 |
| | CD1 9 | CD 20 | BC MA | | CD8SP-BCMA-FHVH-33-G3 Sx2-CD19-vHH-048-[IgCL-TCRb-wt-opt2-6MD]-F-P2A-IgSP-Apa-CD20-2HCD25-VHH-[IgG1-CH1-TCRa-wt-opt2-6MD] | 5134 | 15824 |
| | CD1 9 | CD 20 | BC MA | | CD8SP-BCMA-FHVH-33-G3Sx2-CD19-vHH-048-GS-[TCRb-wt-opt2-6MD]-F-P2A-IgSP-Apa-CD20-2HCD25-VHH-GS-[TCRa-wt-opt2-6MD]-F-F2A-PAC | 5135 | 15825 |
| | CD1 9 | CD 20 | BC MA | | CD8SP-BCMA-FHVH-33-G3Sx2-CD19-vHH-048-GS-[TCRb-wt-opt2-6MD]-F-P2A-IgSP-Apa-CD20-2HCD25-VHH-GS-[TCRa-wt-opt2-6MD] | 5136 | 15826 |
| | CD1 9 | CD 20 | BC MA | | CD8SP-BCMA-FHVH-33-G3Sx2-CD19-vHH-048-IgG1 -Hinge-[TCRb-wt-opt2-6MD]-F-P2A-IgSP-Apa-CD20-2HCD25-VHH-GS-[TCRa-wt-opt2-6MD]-F-F2A-PAC | 5137 | 15827 |
| | CD1 9 | CD 20 | BC MA | | CD8SP-BCMA-FHVH-33-G3Sx2-CD19-vHH-048-GS-[TCRb-wt-opt2-6MD]-F-P2A-IgSP-Apa-CD20-2HCD25-VHH-IgG1-Hinge-v2-[TCRa-wt-opt2-6MD]-F-F2A-PAC | 5138 | 15828 |
| | CD1 9 | CD 20 | BC MA | | CD8SP-BCMA-FHVH-33-G3 Sx2-CD 19-vHH-048-IgG1 -Hinge-[TCRb-wt-opt2-6MD]-F-P2A-IgSP-Apa-CD20-2HCD25-VHH-IgG1 -Hinge-v2-[TCRa-wt-opt2-6MD]-F-F2A-PAC | 5139 | 15829 |
| | CD1 9 | CD 20 | BC MA | | CD8SP-BCMA-FHVH-33-G3 Sx2-CD19-vHH-048-IgG1 -Hinge-[TCRb-wt-opt2-6MD]-F-P2A-IgSP-Apa-CD20-2HCD25-VHH-IgG1 -Hinge-v2- [TCRa-wt-opt2-6MD] | 5140 | 15830 |
| | CD1 9 | CD 20 | BC MA | | CD8SP-BCMA-FHVH-33-G3Sx2-CD19-vHH-048-GS-[TCRb-wt-opt2-6MD]-F-P2A-IgSP-Apa-CD20-2HCD25-VHH-IgG1-Hinge-v2-[TCRa-wt-opt2-6MD] | 5141 | 15831 |
| | CD1 9 | CD 20 | BC MA | | CD8SP-BCMA-FHVH-33-G3Sx2-CD19-vHH-048-[IgCL-TCRg-6MD]-F-P2A-IgSP-Apa-CD20-2HCD25-VHH-[IgG1-CH1-TCRd-6MD]-F-F2A-PAC | 5142 | 15832 |
| | CD1 9 | CD 20 | BC MA | | CD8SP-BCMA-FHVH-33-G3Sx2-CD19-vHH-048-[IgCL-TCRg-6MD]-F-P2A-IgSP-Apa-CD20-2HCD25-VHH-[IgG1-CH1-TCRd-6MD] | 5143 | 15833 |
| | CD1 9 | CD 20 | BC MA | | CD8SP-BCMA-FHVH-33-G3Sx2-CD19-vHH-048-GS-[TCRg-6MD]-F-P2A-IgSP-Apa-CD20-2HCD25-VHH-GS-[TCRd-6MD]-F-F2A-PAC | 5144 | 15834 |
| | CD1 9 | CD 20 | BC MA | | CD8SP-BCMA-FHVH-33-G3Sx2-CD19-vHH-048-GS-[TCRg-6MD]-F-P2A-IgSP-Apa-CD20-2HCD25-VHH-GS-[TCRd-6MD] | 5145 | 15835 |
| | CD1 9 | CD 20 | BC MA | | CD8SP-BCMA-FHVH-33-G3Sx2-CD19-vHH-048-IgG1-Hinge-[TCRg-6MD]-F-P2A-IgSP-Apa-CD20-2HCD25-VHH-GS-[TCRd-6MD]-F-F2A-PAC | 5146 | 15836 |
| | CD1 9 | CD 20 | BC MA | | CD8SP-BCMA-FHVH-33-G3 Sx2-CD19-vHH-048-GS-[TCRg-6MD]-F-P2A-IgSP-Apa-CD20-2HCD25 -VHH-IgG1 -Hinge-v2-[TCRd-6MD]-F-F2A-PAC | 5147 | 15837 |
| | CD1 9 | CD 20 | BC MA | | CD8SP-BCMA-FHVH-33-G3Sx2-CD19-vHH-048-IgG1-Hinge-[TCRg-6MD]-F-P2A-IgSP-Apa-CD20-2HCD25-VHH-IgG1-Hinge-v2-[TCRd-6MD]-F-F2A-PAC | 5148 | 15838 |
| | CD1 9 | CD 20 | BC MA | | CD8SP-BCMA-FHVH-33-G3Sx2-CD19-vHH-048-IgG1-Hinge-[TCRg-6MD]-F-P2A-IgSP-Apa-CD20-2HCD25-VHH-IgG1-Hinge-v2-[TCRd-6MD] | 5149 | 15839 |
| | CD1 9 | CD 20 | BC MA | | CD8SP-BCMA-FHVH-33-G3 Sx2-CD19-vHH-048-GS-[TCRg-6MD]-F-P2A-IgSP-Apa-CD20-2HCD25 -VHH-IgG1 -Hinge-v2-[TCRd-6MD] | 5150 | 15840 |
| | CD1 9 | CD 20 | BC MA | | CD8SP-BCMA-FHVH-33-G3Sx2-CD19-vHH-048-GS-[TCRg-7MD]-F-P2A-IgSP-Apa-CD20-2HCD25-VHH-GS-[TCRd-6MD]-F-F2A-PAC | 5151 | 15841 |
| | CD1 9 | CD 20 | BC MA | | CD8SP-BCMA-FHVH-33-G3Sx2-CD19-vHH-048-GS-[TCRg-6MD]-F-P2A-IgSP-Apa-CD20-2HCD25-VHH-GS-[TCRd-7MD]-F-F2A-PAC | 5152 | 15842 |
| | CD1 9 | | BC MA | | CD8SP-BCMA-FHVH-33-G3Sx2-CD19-vHH-048-[IgCL-TCRb-6MD] | 5153 | 15843 |
| | CD1 9 | | BC MA | | CD8SP-BCMA-FHVH-33-G3Sx2-CD19-vHH-048-[IgCL-TCRg-6MD] | 5154 | 15844 |
| CD1 9 | CD2 2 | CD 20 | | | IgSP-CD22-FHVH-158-G4Sx2-CD20-vHH-2HCD25-G4Sx3v2-hu-mROO5-1-vH-Gly-Ser-Linker-vL-Myc-CD8TM-BBz | 5155 | 15845 |
| CD1 9 | CD2 2 | CD 20 | | | CD8SP-hu-mROO5-1-vL-[hTCRa-CSDVP]-F-F2A-IgSP-CD22-FHVH-158-G4Sx2-CD20-vHH-2HCD25-G4Sx3v2-hu-mROO5-1-vH-[hTCRb-KACIAH] -F-P2A-PAC | 5156 | 15846 |
| CD1 9 | CD2 2 | CD 20 | | | CD8SP-hu-mROO5-1-vL-[hTCRb-KACIAH]-F-P2A-IgSP-CD22-FHVH-158-G4Sx2-CD20-vHH-2HCD25-G4Sx3v2-hu-mROO5-1-vH-[hTCRa-CSDVP]-F-F2A-PAC | 5157 | 15847 |
| CD1 9 | CD2 2 | CD 20 | | | CD8SP-hu-mROO5-1-vL-[hTCRb-S57C]-F-P2A-IgSP-CD22-FHVH-158-G4Sx2-CD20-vHH-2HCD25-G4Sx3v2-hu-mROO5-1-vH-[hTCRa-T48C]-F-F2A-PAC | 5158 | 15848 |
| CD1 9 | CD2 2 | CD 20 | | | CD8SP-hu-mROO5-1-vL-[hTCRb-S57C]-F-P2A-IgSP-CD22-FHVH-158-G4Sx2-CD20-vHH-2HCD25-G4Sx3v2-hu-mROO5-1-vH-[hTCRa-T48C] | 5159 | 15849 |
| CD1 9 | CD2 2 | CD 20 | | | CD8SP-hu-mROO5-1-vL-[hTCRb-S57C]-F-P2A-IgSP-CD22-FHVH-158-G4Sx2-CD20-vHH-2HCD25-G4Sx3v2-hu-mROO5-1-vH-[hTCRa-T48C]-F-F2A-K13-opt | 5160 | 15850 |
| CD1 9 | CD2 2 | CD 20 | | | CD8SP-hu-mROO5-1-vL-[hTCRa-T48C]-F-P2A-IgSP-CD22-FHVH-158-G4Sx2-CD20-vHH-2HCD25-G4Sx3v2-hu-mROO5-1-vH-[hTCRb-S57C] | 5161 | 15851 |
| CD1 9 | CD2 2 | CD 20 | | | CD8SP-hu-mROO5-1-vL-[hTCRa-T48C]-F-P2A-IgSP-CD22-FHVH-158-G4Sx2-CD20-vHH-2HCD25-G4Sx3v2-hu-mROO5-1-vH-[hTCRb-S57C]-F-P2A-K13-opt | 5162 | 15852 |
| CD1 9 | CD2 2 | CD 20 | | | CD8SP-hu-mROO5-1-vL-[hTCRb-opt2]-F-P2A-IgSP-CD22-FHVH-158-G4Sx2-CD20-vHH-2HCD25-G4Sx3v2-hu-mROO5-1-vH-[hTCRa-opt2]-F-F2A-PAC | 5163 | 15853 |
| CD1 9 | CD2 2 | CD 20 | | | CD8SP-hu-mROO5-1-vL-[hTCRb-opt2]-F-P2A-IgSP-CD22-FHVH-158-G4Sx2-CD20-vHH-2HCD25-G4Sx3v2-hu-mROO5-1-vH-Myc-[pretc.Ra-Del48]-F-F2A-PAC | 5164 | 15854 |
| CD1 9 | CD2 2 | CD 20 | | | CD8SP-hu-mROO5-1-vL-V5-[hTCRg1-opt]-F-P2A-IgSP-CD22-FHVH-158-G4Sx2-CD20-vHH-2HCD25-G4Sx3v2-hu-mROO5-1-vH-Myc-[hTCRd-opt]-F-F2A-PAC | 5165 | 15855 |
| CD1 9 | CD2 2 | CD 20 | | | CD8SP-hu-mROO5-1-vL-[hTCRd-opt]-F-P2A-IgSP-CD22-FHVH-158-G4Sx2-CD20-vHH-2HCD25-G4Sx3v2-hu-mRO05-1-vH-[hTCRg1-opt] | 5166 | 15856 |
| CD1 9 | CD2 2 | CD 20 | | | CD8SP-hu-mROO5-1-vL-IgCL-CD3zECDTMCP-opt-F-P2A-Spe-IgSP-CD22-FHVH-158-G4Sx2-CD20-vHH-2HCD25-G4Sx3v2-hu-mROO5-1-vH-IgG1-CH1-CD3zECDTMCP-opt2-F-F2A-PAC | 5167 | 15857 |
| CD1 9 | CD2 2 | CD 20 | | | CD8SP-hu-mROO5-1-vL-[hTCRbECD-CD3zECDTMCP-opt]-F-P2A-IgSP-CD22-FHVH-158-G4Sx2-CD20-vHH-2HCD25-G4Sx3v2-hu-mROO5-1-vH-[hTCRaECD-CD3zECDTMCP-opt2] | 5168 | 15858 |
| CD1 9 | CD2 2 | CD 20 | | | CD8SP-hu-mROO5-1-vL-[hTCRb-KAC-ECD-CD3zECDTMCP-opt]-F-P2A-IgSP-CD22-FHVH-158-G4Sx2-CD20-vHH-2HCD25-G4Sx3v2-hu-mROO5-1-vH-[hTCRa-CSDVP-ECD-CD3zECDTMCP-opt2] | 5169 | 15859 |
| CD1 9 | CD2 2 | CD 20 | | | CD8SP-hu-mROO5-1-vL-V5-[hTCRbECD-CD3zECDTMCP-opt]-F-P2A-IgSP-CD22-FHVH-158-G4Sx2-CD20-vHH-2HCD25-G4Sx3v2-hu-mROO5-1-vH-Myc-[hTCRaECD-CD3zECDTM-28z-opt2] | 5170 | 15860 |
| CD1 9 | CD2 2 | CD 20 | | | CD8SP-hu-mROO5-1-vL-V5-[hTCRbECD-CD3zECDTM-28z-opt]-F-P2A-IgSP-CD22-FHVH-158-G4Sx2-CD20-vHH-2HCD25-G4Sx3v2-hu-mROO5-1-vH-Myc-[hTCRaECD-CD3zECDTM-28z-opt2] | 5171 | 15861 |
| CD1 9 | CD2 2 | CD 20 | | | CD8SP-hu-mROO5-1-vL-V5-[hTCRbECD-CD3zECDTMCP-opt]-F-P2A-IgSP-CD22-FHVH-15 8-G4Sx2-CD20-vHH-2HCD25-G4Sx3v2-hu-mROO5-1-vH-Myc4-[hTCRaECD-CD3zECDTM-BBz-opt2] | 5172 | 15862 |
| CD1 9 | CD2 2 | CD 20 | | | CD8SP-hu-mROO5-1-vL-V5-[hTCRbECD-CD3zECDTM-BBz-opt]-F-P2A-IgSP-CD22-FHVH-15 8-G4Sx2-CD20-vHH-2HCD25-G4Sx3v2-hu-mROO5-1-vH-Myc4-[hTCRaECD-CD3zECDTM-BBz-opt2] | 5173 | 15863 |
| CD1 9 | CD2 2 | CD 20 | | | CD8SP-hu-mROO5-1-vL-CD3zECDTMCP-opt-F-P2A-Spe-IgSP-CD22-FHVH-158-G4Sx2-CD20-vHH-2HCD25-G4Sx3v2-hu-mROO5-1-vH-Mlu-CD3zECDTMCP-opt2-F-F2A-PAC | 5174 | 15864 |
| CD1 9 | CD2 2 | CD 20 | | | CD8SP-hu-mROO5-1-vL-[IgCL-TCRg-6MD]-F-P2A-IgSP-CD22-FHVH-158-G4Sx2-CD20-vHH-2HCD25-G4Sx3v2-hu-mROO5-1-vH-[IgG1-CH1-TCRd-6MD] | 5175 | 15865 |
| CD1 9 | CD2 2 | CD 20 | | | CD8SP-hu-mROO5-1-vL-[IgCL-TCRb-IAH-6MD]-F-P2A-IgSP-CD22-FHVH-158-G4Sx2-CD20-vHH-2HCD25-G4Sx3v2-hu-mROO5-1-vH-[IgG1-CH1-TCRa-SDVP-6MD] | 5176 | 15866 |
| CD1 9 | CD2 2 | CD 20 | | | CD8SP-hu-mROO5-1-vL-[IgCL-TCRb-wt-opt2-6MD]-F-P2A-IgSP-CD22-FHVH-158-G4Sx2-CD20-vHH-2HCD25-G4Sx3v2-hu-mROO5-1-vH-[IgG1-CH1-TCRa-wt-op2-6MD] | 5177 | 15867 |
| CD1 9 | CD2 2 | CD 20 | | | IgSP-CD22-FHVH-158-G4Sx2-CD20-vHH-2HCD25-G4Sx3v2-hu-mROO5-1-(vH-vL)-G3S-CD3e-ECDTMCP-opt2 | 5178 | 15868 |
| CD1 9 | CD2 2 | CD 20 | | | IgSP-CD22-FHVH-158-G4Sx2-CD20-vHH-2HCD25-G4Sx3v2-hu-mROO5-1-(vH-vL)-G3S-CD3d-ECDTMCP-opt2 | 5179 | 15869 |
| CD1 9 | CD2 2 | CD 20 | | | IgSP-CD22-FHVH-158-G4Sx2-CD20-vHH-2HCD25-G4Sx3v2-hu-mROO5-1-(vH-vL)-G3S-CD3g-ECDTMCP-opt2 | 5180 | 15870 |
| CD1 9 | CD2 2 | CD 20 | | | IgSP-CD22-FHVH-158-G4Sx2-CD20-vHH-2HCD25-G4Sx3v2-hu-mROO5-1-(vH-vL)-G3S-CD3z-ECDTMCP-opt2 | 5181 | 15871 |
| CD1 9 | CD2 2 | CD 20 | | | IgSP-CD22-FHVH-158-G4Sx2-CD20-vHH-2HCD25-G4Sx3v2-hu-mROO5-1-vH-[hTCRa-opt2]-F-F2A-BlastR | 5182 | 15872 |
| CD1 9 | CD2 2 | CD 20 | | | IgSP-CD22-FHVH-158-G4Sx2-CD20-vHH-2HCD25-G4Sx3v2-hu-mROO5-1-vH-[hTCRa-opt2] | 5183 | 15873 |
| CD1 9 | CD2 2 | CD 20 | | | IgSP-CD22-FHVH-158-G4Sx2-CD20-vHH-2HCD25-G4Sx3v2-hu-mROO5-1-vH-Myc-[hTCRa-T48C-opt]-F-F2A-BlastR | 5184 | 15874 |
| CD1 9 | CD2 2 | CD 20 | | | IgSP-CD22-FHVH-158-G4Sx2-CD20-vHH-2HCD25-G4Sx3v2-hu-mROO5-1-vH-Myc-[hTCRa-T48C-opt] | 5185 | 15875 |
| CD1 9 | CD1 9 | CD 22 | CD 20 | BC MA | CD8SP-BCMA-FHVH-33-G3Sx2-CD19-vHH-048-G4Sx3-R1-hu-mROO5-1-vL-[hTCRa-CSDVP]-F-F2A-IgSP-CD22-FHVH-158-G4Sx2-CD20-vHH-2HCD25-G4Sx3v2-hu-mROO5-1-vH-[hTCRb-KACIAH]-F-P2A-PAC | 5186 | 15876 |
| CD1 9 | CD1 9 | CD 22 | CD 20 | BC MA | CD8SP-BCMA-FHVH-33-G3Sx2-CD19-vHH-048-G4Sx3-R1-hu-mROO5-1-vL-[hTCRb-KACIAH]-F-P2A-IgSP-CD22-FHVH-15 8-G4Sx2-CD20-vHH-2HCD25-G4Sx3v2-hu-mROO5-1-vH-[hTCRa-CSDVP]-F-F2A-PAC | 5187 | 15877 |
| CD1 9 | CD1 9 | CD 22 | CD 20 | BC MA | CD8SP-BCMA-FHVH-33-G3Sx2-CD19-vHH-048-G4Sx3-R1-hu-mROO5-1-vL-[hTCRb-S57C]-F-P2A-IgSP-CD22-FHVH-158-G4Sx2-CD20-vHH-2HCD25-G4Sx3v2-hu-mROO5-1-vH-[hTCRa-T48C]-F-F2A-PAC | 5188 | 15878 |
| CD1 9 | CD1 9 | CD 22 | CD 20 | BC MA | CD8SP-BCMA-FHVH-33-G3Sx2-CD19-vHH-048-G4Sx3-R1-hu-mROO5-1-vL-[hTCRb-S57C]-F-P2A-IgSP-CD22-FHVH-158-G4Sx2-CD20-vHH-2HCD25-G4Sx3v2-hu-mROO5-1-vH-[hTCRa-T48C] | 5189 | 15879 |
| CD1 9 | CD1 9 | CD 22 | CD 20 | BC MA | CD8SP-BCMA-FHVH-33-G3Sx2-CD19-vHH-048-G4Sx3-R1-hu-mROO5-1-vL-[hTCRb-S57C]-F-P2A-IgSP-CD22-FHVH-158-G4Sx2-CD20-vHH-2HCD25-G4Sx3v2-hu-mROO5-1-vH-[hTCRa-T48C]-F-F2A-K13-opt | 5190 | 15880 |
| CD1 9 | CD1 9 | CD 22 | CD 20 | BC MA | CD8SP-BCMA-FHVH-33-G3Sx2-CD19-vHH-048-G4Sx3-R1-hu-mROO5-1-vL-[hTCRa-T48C]-F-P2A-IgSP-CD22-FHVH-158-G4Sx2-CD20-vHH-2HCD25-G4Sx3v2-hu-mROO5-1-vH-[hTCRb-S57C] | 5191 | 15881 |
| CD1 9 | CD1 9 | CD 22 | CD 20 | BC MA | CD8SP-BCMA-FHVH-33-G3Sx2-CD19-vHH-048-G4Sx3-R1-hu-mROO5-1-vL-[hTCRa-T48C]-F-P2A-IgSP-CD22-FHVH-158-G4Sx2-CD20-vHH-2HCD25-G4Sx3v2-hu-mROO5-1-vH-[hTCRb-S57C]-F-P2A-K13-opt | 5192 | 15882 |
| CD1 9 | CD1 9 | CD 22 | CD 20 | BC MA | CD8SP-BCMA-FHVH-33-G3Sx2-CD19-vHH-048-G4Sx3-R1-hu-mROO5-1-vL-[hTCRb-opt2]-F-P2A-IgSP-CD22-FHVH-158-G4Sx2-CD20-vHH-2HCD25-G4Sx3v2-hu-mROO5-1-vH-[hTCRa-opt2]-F-F2A-PAC | 5193 | 15883 |
| CD1 9 | CD1 9 | CD 22 | CD 20 | BC MA | CD8SP-BCMA-FHVH-33-G3Sx2-CD19-vHH-048-G4Sx3-R1-hu-mROO5-1-vL-[hTCRb-opt2]-F-P2A-IgSP-CD22-FHVH-158-G4Sx2-CD20-vHH-2HCD25-G4Sx3v2-hu-mROO5-1-vH-Myc-[pretc.Ra-Del48]-F-F2A-PAC | 5194 | 15884 |
| CD1 9 | CD1 9 | CD 22 | CD 20 | BC MA | CD8SP-BCMA-FHVH-33-G3Sx2-CD19-vHH-048-G4Sx3-R1-hu-mROO5-1-vL-V5-[hTCRg1-opt]-F-P2A-IgSP-CD22-FHVH-158-G4Sx2-CD20-vHH-2HCD25-G4Sx3v2-hu-mROO5-1-vH-Myc-[hTCRd-opt]-F-F2A-PAC | 5195 | 15885 |
| CD1 9 | CD1 9 | CD 22 | CD 20 | BC MA | CD8SP-BCMA-FHVH-33-G3Sx2-CD19-vHH-048-G4Sx3-R1-hu-mROO5-1-vL-[hTCRd-opt]-F-P2A-IgSP-CD22-FHVH-158-G4Sx2-CD20-vHH-2HCD25-G4Sx3v2-hu-mROO5-1-vH-[hTCRg1-opt] | 5196 | 15886 |
| CD1 9 | CD1 9 | CD 22 | CD 20 | BC MA | CD8SP-BCMA-FHVH-33-G3Sx2-CD19-vHH-048-G4Sx3-R1-hu-mROO5-1-vL-IgCL-CD3zECDTMCP-opt-F-P2A-Spe-IgSP-CD22-FHVH-158-G4Sx2-CD20-vHH-2HCD25-G4Sx3v2-hu-mROO5-1-vH-IgG1-CH1-CD3zECDTMCP-opt2-F-F2A-PAC | 5197 | 15887 |
| CD1 9 | CD1 9 | CD 22 | CD 20 | BC MA | CD8SP-BCMA-FHVH-33-G3Sx2-CD19-vHH-048-G4Sx3-R1-hu-mROO5-1-vL-[hTCRbECD-CD3zECDTMCP-opt]-F-P2A-IgSP-CD22-FHVH-158-G4Sx2-CD20-vHH-2HCD25-G4Sx3v2-hu-mROO5-1-vH-[hTCRaECD-CD3zECDTMCP-opt2] | 5198 | 15888 |
| CD1 9 | CD1 9 | CD 22 | CD 20 | BC MA | CD8SP-BCMA-FHVH-33-G3Sx2-CD19-vHH-048-G4Sx3-R1-hu-mROO5-1-vL-[hTCRb-KAC-ECD-CD3zECDTMCP-opt]-F-P2A-IgSP-CD22-FHVH-158-G4Sx2-CD20-vHH-2HCD25-G4Sx3v2-hu-mROO5-1-vH-[hTCRa-CSDVP-ECD-CD3zECDTMCP-opt2] | 5199 | 15889 |
| CD1 9 | CD1 9 | CD 22 | CD 20 | BC MA | CD8SP-BCMA-FHVH-33-G3Sx2-CD19-vHH-048-G4Sx3-R1-hu-mROO5-1-vL-V5-[hTCRbECD-CD3zECDTMCP-opt]-F-P2A-IgSP-CD22-FHVH-158-G4Sx2-CD20-vHH-2HCD25-G4Sx3v2-hu-mROO5-1-vH-Myc-[hTCRaECD-CD3zECDTM-28z-opt2] | 5200 | 15890 |
| CD1 9 | CD1 9 | CD 22 | CD 20 | BC MA | CD8SP-BCMA-FHVH-33-G3Sx2-CD19-vHH-048-G4Sx3-R1-hu-mROO5-1-vL-V5-[hTCRbECD-CD3zECDTM-28z-opt]-F-P2A-IgSP-CD22-FHVH-158-G4Sx2-CD20-vHH-2HCD25-G4Sx3v2-hu-mROO5-1-vH-Myc-[hTCRaECD-CD3zECDTM-28z-opt2] | 5201 | 15891 |
| CD1 9 | CD1 9 | CD 22 | CD 20 | BC MA | CD8SP-BCMA-FHVH-33-G3Sx2-CD19-vHH-048-G4Sx3-R1-hu-mROO5-1-vL-V5-[hTCRbECD-CD3zECDTMCP-opt]-F-P2A-IgSP-CD22-FHVH-158-G4Sx2-CD20-vHH-2HCD25-G4Sx3v2-hu-mROO5-1-vH-Myc4-[hTCRaECD-CD3zECDTM-BBz-opt2] | 5202 | 15892 |
| CD1 9 | CD1 9 | CD 22 | CD 20 | BC MA | CD8SP-BCMA-FHVH-33-G3Sx2-CD19-vHH-048-G4Sx3-R1-hu-mROO5-1-vL-V5-[hTCRbECD-CD3zECDTM-BBz-opt]-F-P2A-IgSP-CD22-FHVH-158-G4Sx2-CD20-vHH-2HCD25-G4Sx3v2-hu-mROO5-1-vH-Myc4-[hTCRaECD-CD3zECDTM-BBz-opt2] | 5203 | 15893 |
| CD1 9 | CD1 9 | CD 22 | CD 20 | BC MA | CD8SP-BCMA-FHVH-33-G3Sx2-CD19-vHH-048-G4Sx3-R1-hu-mROO5-1-vL-CD3zECDTMCP-opt-F-P2A-Spe-IgSP-CD22-FHVH-158-G4Sx2-CD20-vHH-2HCD25-G4Sx3v2-hu-mROO5-1-vH-Mlu-CD3zECDTMCP-opt2-F-F2A-PAC | 5204 | 15894 |
| CD1 9 | CD1 9 | CD 22 | CD 20 | BC MA | CD8SP-BCMA-FHVH-33-G3Sx2-CD19-vHH-048-G4Sx3-R1-hu-mROO5-1-vL-[IgCL-TCRg-6MD]-F-P2A-IgSP-CD22-FHVH-15 8-G4Sx2-CD20-vHH-2HCD25-G4Sx3v2-hu-mROO5-1-vH-[IgG1-CH1-TCRd-6MD] | 5205 | 15895 |
| CD1 9 | CD1 9 | CD 22 | CD 20 | BC MA | CD8SP-BCMA-FHVH-33-G3Sx2-CD19-vHH-048-G4Sx3-R1-hu-mROO5-1-vL-[IgCL-TCRb-IAH-6MD]-F-P2A-IgSP-CD22-FHVH-158-G4Sx2-CD20-vHH-2HCD25-G4Sx3v2-hu-mROO5-1-vH-[IgG1-CH1-TCRa-SDVP-6MD] | 5206 | 15896 |
| CD1 9 | CD1 9 | CD 22 | CD 20 | BC MA | CD8SP-BCMA-FHVH-33-G3Sx2-CD19-vHH-048-G4Sx3-R1-hu-mROO5-1-vL-[IgCL-TCRb-wt-opt2-6MD]-F-P2A-IgSP-CD22-FHVH-158-G4Sx2-CD20-vHH-2HCD25-G4Sx3v2-hu-mROO5-1-vH-[IgG1-CH1-TCRa-wt-op2-6MD] | 5207 | 15897 |
| | CD1 9 | CD 22 | CD 20 | BC MA | CD8SP-BCMA-FHVH-33-G3Sx2-CD19-vHH-048-[IgCL-TCRb-wt-opt2-6MD]-F-P2A-IgSP-CD22-FHVH-158-G4Sx2-CD20-2HCD25-VHH-[IgG1-CH1-TCRa-wt-opt2-6MD]-F-F2A-PAC | 5208 | 15898 |
| | CD1 9 | CD 22 | CD 20 | BC MA | CD8SP-BCMA-FHVH-33-G3Sx2-CD19-vHH-048-[IgCL-TCRb-wt-opt2-6MD]-F-P2A-IgSP-CD22-FHVH-158-G4Sx2-CD20-2HCD25-VHH-[IgG1-CH1-TCRa-wt-opt2-6MD] | 5209 | 15899 |
| | CD1 9 | CD 22 | CD 20 | BC MA | CD8SP-BCMA-FHVH-33-G3Sx2-CD19-vHH-048-GS-[TCRb-wt-opt2-6MD]-F-P2A-IgSP-CD22-FHVH-158-G4Sx2-CD20-2HCD25-VHH-GS-[TCRa-wt-opt2-6MD]-F-F2A-PAC | 5210 | 15900 |
| | CD1 9 | CD 22 | CD 20 | BC MA | CD8SP-BCMA-FHVH-33-G3Sx2-CD19-vHH-048-GS-[TCRb-wt-opt2-6MD]-F-P2A-IgSP-CD22-FHVH-158-G4Sx2-CD20-2HCD25-VHH-GS-[TCRa-wt-opt2-6MD] | 5211 | 15901 |
| | CD1 9 | CD 22 | CD 20 | BC MA | CD8SP-BCMA-FHVH-33-G3Sx2-CD19-vHH-048-IgG1-Hinge-[TCRb-wt-opt2-6MD]-F-P2A-IgSP-CD22-FHVH-158-G4Sx2-CD20-2HCD25-VHH-GS-[TCRa-wt-opt2-6MD]-F-F2A-PAC | 5212 | 15902 |
| | CD1 9 | CD 22 | CD 20 | BC MA | CD8SP-BCMA-FHVH-33-G3Sx2-CD19-vHH-048-GS-[TCRb-wt-opt2-6MD]-F-P2A-IgSP-CD22-FHVH-158-G4Sx2-CD20-2HCD25-VHH-IgG1-Hinge-v2-[TCRa-wt-opt2-6MD]-F-F2A-PAC | 5213 | 15903 |
| | CD1 9 | CD 22 | CD 20 | BC MA | CD8SP-BCMA-FHVH-33-G3Sx2-CD19-vHH-048-IgG1-Hinge-[TCRb-wt-opt2-6MD]-F-P2A-IgSP-CD22-FHVH-158-G4Sx2-CD20-2HCD25-VHH-IgG1-Hinge-v2-[TCRa-wt-opt2-6MD]-F-F2A-PAC | 5214 | 15904 |
| | CD1 9 | CD 22 | CD 20 | BC MA | CD8SP-BCMA-FHVH-33-G3Sx2-CD19-vHH-048-IgG1-Hinge-[TCRb-wt-opt2-6MD]-F-P2A-IgSP-CD22-FHVH-158-G4Sx2-CD20-2HCD25-VHH-IgG1-Hinge-v2-[TCRa-wt-opt2-6MD] | 5215 | 15905 |
| | CD1 9 | CD 22 | CD 20 | BC MA | CD8SP-BCMA-FHVH-33-G3Sx2-CD19-vHH-048-GS-[TCRb-wt-opt2-6MD]-F-P2A-IgSP-CD22-FHVH-158-G4Sx2-CD20-2HCD25-VHH-IgG1-Hinge-v2-[TCRa-wt-opt2-6MD] | 5216 | 15906 |
| | CD1 9 | CD 22 | CD 20 | BC MA | CD8SP-BCMA-FHVH-33-G3Sx2-CD19-vHH-048-[IgCL-TCRg-6MD]-F-P2A-IgSP-CD22-FHVH-158-G4Sx2-CD20-2HCD25-VHH-[IgG1-CH1-TCRd-6MD]-F-F2A-PAC | 5217 | 15907 |
| | CD1 9 | CD 22 | CD 20 | BC MA | CD8SP-BCMA-FHVH-33-G3Sx2-CD19-vHH-048-[IgCL-TCRg-6MD]-F-P2A-IgSP-CD22-FHVH-15 8-G4Sx2-CD20-2HCD25-VHH-[IgG1-CH1-TCRd-6MD] | 5218 | 15908 |
| | CD1 9 | CD 22 | CD 20 | BC MA | CD8SP-BCMA-FHVH-33-G3Sx2-CD19-vHH-048-GS-[TCRg-6MD]-F-P2A-IgSP-CD22-FHVH-15 8-G4Sx2-CD20-2HCD25-VHH-GS-[TCRd-6MD]-F-F2A-PAC | 5219 | 15909 |
| | CD1 9 | CD 22 | CD 20 | BC MA | CD8SP-BCMA-FHVH-33-G3Sx2-CD19-vHH-048-GS-[TCRg-6MD]-F-P2A-IgSP-CD22-FHVH-15 8-G4Sx2-CD20-2HCD25-VHH-GS-[TCRd-6MD] | 5220 | 15910 |
| | CD1 9 | CD 22 | CD 20 | BC MA | CD8SP-BCMA-FHVH-33-G3Sx2-CD19-vHH-048-IgG1-Hinge-[TCRg-6MD]-F-P2A-IgSP-CD22-FHVH-158-G4Sx2-CD20-2HCD25-VHH-IgG1-Hinge-v2-[TCRd-6MD] | 5221 | 15911 |
| | | CD 22 | CD 20 | | IgSP-CD22-FHVH-158-G4Sx2-CD20-2HCD25-VHH-[IgG1-CH1-TCRa-wt-opt2-6MD] | 5222 | 15912 |
| | | CD 22 | CD 20 | | IgSP-CD22-FHVH-158-G4Sx2-CD20-2HCD25-VHH-[IgG1-CH1-TCRd-6MD] | 5223 | 15913 |

[0248] TABLE 32: Bispecifics and Trispecific Constructs on different backbones targeting different antigens. These constructs were generated by changing the AABD modules of the construct in Table 31 with the modules shown in the first construct of each series in the Table below. The order of the TCR constant chain fragments of the constructs of each series in Table 32 is the same as the order of TCR constant chain fragments of the constructs of series 1 whose details are provided in Table 31.

TABLE 32

| TARGET | | | | | | | |
|---|---|---|---|---|---|---|---|
| 1st | 2nd | 3rd | 4th | 5th | Name of first construct in the series | SEQ ID NO Series (DNA) | SEQ ID NO Series (PRT) |
| CD1 9 | CD1 9 | CD2 0 | CD 22 | BC MA | CD8SP-CD19-vHH-048-G4Sx3-R1-hu-mROO5-1-vL-Gly-Ser-Linker-hu-mROO5-1-vH-Myc-28z | 4976-5223 | 15666-15913 |
| CD1 9 | CD3 8 | CD2 0 | CD 22 | BC MA | CD8SP-CD38-FHVH-309021-G4Sx3-R1-hu-mROO5-1-vL-Gly-Ser-Linker-hu-mROO5-1-vH-Myc-28z | 5224-5471 | 15914-16161 |
| CD1 9 | CD1 23 | CD2 0 | CD 22 | BC MA | CD8SP-CD123-vHH-2-309021-G4Sx3-R1-hu-mROO5-1-vL-Gly-Ser-Linker-hu-mROO5-1-vH-Myc-28z | 5472-5719 | 16162-16409 |
| CD1 9 | Her2 | Her3 | CD 22 | EGF R | CD8SP-Her2-vHH-2D3-309021-G4Sx3-R1-hu-mROO5-1-vL-Gly-Ser-Linker-hu-mROO5-1-vH-Myc-28z | 5720-5967 | 16410-16657 |
| CD1 9 | Her2 | IL13 Ra2 | CD 22 | BC MA | CD8SP-Her2-vHH-2D3-309021-G4Sx3-R1-hu-mROO5-1-vL-Gly-Ser-Linker-hu-mROO5-1-vH-Myc-28z | 5968-6215 | 16658-16905 |
| CD1 9 | CD3 8 | CD2 0 | CD 22 | BC MA | CD8SP-CD38-USC1-FHVH-32184-G4Sx3-R1-hu-mROO5-1-vL-Gly-Ser-Linker-hu-mROO5-1-vH-Myc-28z | 6216-6463 | 16906-17153 |

TABLE 33

Bispecific SAR Constructs targeting CD22 and/or PSMA

| Name of fragment | SEQ ID NO (DNA) | SEQ ID NO (PRT) |
|---|---|---|
| CD8SP-CD22-FHVH-24-SG4S-PSMA-chVH-71v2-Myc-CD8TM-BBz-T2A-PAC | 6464 | 17154 |
| CD8SP-CD22-FHVH-24-SG4S-PSMA-chVH-71v2-Myc-28z-T2A-PAC | 6465 | 17155 |
| CD8SP-CD22-FHVH-24-SG4S-PSMA-chVH-71v2-Myc-28z | 6466 | 17156 |
| CD8SP-CD22-FHVH-24-SG4S-PSMA-chVH-71v2-Myc-CD8TM-BBz | 6467 | 17157 |
| CD8SP-PSMA-chVH-71v2-SG4S-CD22-FHVH-24-Myc-CD8TM-BBz | 6468 | 17158 |
| CD8SP-CD22-FHVH-24-SG4S-PSMA-chVH-71v2-Myc-CD8TM-z-P2A-K13-FLAG-T2A-PAC | 6469 | 17159 |
| CD8SP-CD22-FHVH-24-[hTCRa-CSDVP]-F-F2A-SP-PSMA-chVH-71v2-[hTCRb-KACIAH]-F-P2A-PAC | 6470 | 17160 |
| CD8SP-CD22-FHVH-24-[hTCRb-KACIAH]-F-P2A-SP-PSMA-chVH-71v2-[hTCRa-CSDVP]-F-F2A-PAC | 6471 | 17161 |
| CD8SP-CD22-FHVH-24-[hTCRb-S57C]-F-P2A-SP-PSMA-chVH-71v2-[hTCRa-T48C] | 6472 | 17162 |
| CD8SP-CD22-FHVH-24-[hTCRb-S57C]-F-P2A-SP-PSMA-chVH-71v2-[hTCRa-T48C]-F-F2A-K13-opt | 6473 | 17163 |
| CD8SP-CD22-FHVH-24-[hTCRa-T48C]-F-P2A-SP-PSMA-chVH-71v2-[hTCRb-S57C] | 6474 | 17164 |
| CD8SP-CD22-FHVH-24-[hTCRa-T48C]-F-P2A-SP-PSMA-chVH-71v2-[hTCRb-S57C]-F-P2A-K13-opt | 6475 | 17165 |
| CD8SP-V5-[hTCRb-KACIAH]-F-P2A-CD8SP-CD22-FHVH-24-SG4S-PSMA-chVH-71v2-Myc-[hTCRa-CSDVP]-F-F2A-PAC | 6476 | 17166 |
| CD8SP-MYC-[hTCRa-T48C-opt1]-F-F2A-SP-CD22-FHVH-24-SG4S-PSMA-chVH-71v2-V5-[hTCRb-S57C-opt1]-F-P2A-PAC | 6477 | 17167 |
| CD8SP-CD22-FHVH-24-[hTCRb-opt2]-F-P2A-SP-PSMA-chVH-71v2-[hTCRa-opt2]-F-F2A-PAC | 6478 | 17168 |
| CD8SP-CD22-FHVH-24-[hTCRb-opt2]-F-P2A-SP-PSMA-chVH-71v2-Myc-[pretc.Ra-Del48]-F-F2A-PAC | 6479 | 17169 |
| CD8SP-[hTCRb-opt2]-F-P2A-CD8SP-CD22-FHVH-24-SG4S-PSMA-chVH-71v2-Myc4-[pretc.Ra-Del48]-F-F2A-PAC | 6480 | 17170 |
| CD8SP-CD22-FHVH-24-V5-[hTCRg1-opt]-F-P2A-SP-PSMA-chVH-71v2-Myc- [hTCRd-opt] -F-F2A-PAC | 6481 | 17171 |
| CD8SP-CD22-FHVH-24-[hTCRd-opt]-F-P2A-SP-PSMA-chVH-71v2-[hTCRg1-opt] | 6482 | 17172 |
| CD8SP-V5-[hTCRg1-opt]-F-P2A-CD8SP-CD22-FHVH-24-SG4S-PSMA-chVH-71v2-Myc-[hTCRd-opt]-F-F2A-PAC | 6483 | 17173 |
| CD8-CD22-FHVH-24-IgCL-CD3zECDTMCP-opt-F-P2A-Spe-SP-PSMA-chVH-71v2-IgG1-CH1-CD3zECDTMCP-opt2-F-F2A-PAC | 6484 | 17174 |
| CD8SP-CD22-FHVH-24-[hTCRbECD-CD3zECDTMCP-opt]-F-P2ASP-PSMA-chVH-71v2-[hTCRaECD-CD3zECDTMCP-opt2] | 6485 | 17175 |
| CD8SP-CD22-FHVH-24-[hTCRb-KAC-ECD-CD3zECDTMCP-opt]-F-P2A-SP-PSMA-chVH-71v2-[hTCRa-CSDVP-ECD-CD3zECDTMCP-opt2] | 6486 | 17176 |
| CD8SP-CD22-FHVH-24-V5-[hTCRbECD-CD3zECDTMCP-opt]-F-P2A-SP-PSMA-chVH-71v2-Myc-[hTCRaECD-CD3zECDTM-28z-opt2] | 6487 | 17177 |
| CD8SP-CD22-FHVH-24-V5-[hTCRbECD-CD3zECDTM-28z-opt]-F-P2A-SP-PSMA-chVH-71v2-Myc-[hTCRaECD-CD3zECDTM-28z-opt2] | 6488 | 17178 |
| CD8SP-CD22-FHVH-24-V5-[hTCRbECD-CD3zECDTMCP-opt]-F-P2A-SP-PSMA-chVH-71v2-Myc4-[hTCRaECD-CD3zECDTM-BBz-opt2] | 6489 | 17179 |
| CD8SP-CD22-FHVH-24-V5-[hTCRbECD-CD3zECDTM-BBz-opt]-F-P2A-SP-PSMA-chVH-71v2-Myc4-[hTCRaECD-CD3zECDTM-BBz-opt2] | 6490 | 17180 |
| CD8-CD22-FHVH-24-CD3zECDTMCP-opt-F-P2A-Spe-SP-PSMA-chVH-71v2-Mlu-CD3zECDTMCP-opt2-F-F2A-PAC | 6491 | 17181 |
| CD8SP-CD22-FHVH-24-[IgCL-TCRg-6MD]-F-P2A-SP-PSMA-chVH-71v2-[IgG1-CH1-TCRd-6MD] | 6492 | 17182 |
| CD8SP-CD22-FHVH-24-[IgCL-TCRb-IAH-6MD]-F-P2A-SP-PSMA-chVH-71v2-[IgG1-CH1-TCRa-SDVP-6MD] | 6493 | 17183 |
| CD8SP-CD22-FHVH-24-[IgCL-TCRb-wt-opt2-6MD]-F-P2A-SP-PSMA-chVH-71v2-[IgG1-CH1-TCRa-wt-op2-6MD] | 6494 | 17184 |
| CD8SP-CD22-FHVH-24-SG4S-PSMA-chVH-71v2-CD3e-ECDTMCP-opt2 | 6495 | 17185 |
| CD8SP-CD22-FHVH-24-SG4S-PSMA-chVH-71v2-CD3d-ECDTMCP-opt2 | 6496 | 17186 |
| CD8SP-CD22-FHVH-24-SG4S-PSMA-chVH-71v2-CD3g-ECDTMCP-opt2 | 6497 | 17187 |
| CD8SP-CD22-FHVH-24-SG4S-PSMA-chVH-71v2-CD3z-ECDTMCP-opt2 | 6498 | 17188 |
| CD8SP-PSMA-chVH-71v2-SG4S-CD22-FHVH-24-CD3e-ECDTMCP-opt2 | 6499 | 17189 |
| CD8SP-PSMA-chVH-71v2-SG4S-CD22-FHVH-24-CD3d-ECDTMCP-opt2 | 6500 | 17190 |
| CD8SP-PSMA-chVH-71v2-SG4S-CD22-FHVH-24-CD3g-ECDTMCP-opt2 | 6501 | 17191 |
| CD8SP-PSMA-chVH-71v2-SG4S-CD22-FHVH-24-CD3z-ECDTMCP-opt2 | 6502 | 17192 |
| CD8SP-CD22-FHVH-24-SG4S-PSMA-chVH-71v2-[hTCRa-opt2]-F-F2A-PAC | 6503 | 17193 |
| CD8SP-CD22-FHVH-24-SG4S-PSMA-chVH-71v2-[hTCRb-opt2]-F-F2A-PAC | 6504 | 17194 |
| CD8SP-CD22-FHVH-24-SG4S-PSMA-chVH-71v2-Myc4-[pretc.Ra-Del48]-F-F2A-PAC | 6505 | 17195 |
| CD8SP-CD22-FHVH-24-[hTCRb-opt2]-F-P2A-PAC | 6506 | 17196 |
| CD8SP-CD22-FHVH-24-[hTCRb-opt2] | 6507 | 17197 |
| IgHSP-PSMA-chVH-71v2-[hTCRa-opt2]-F-F2A-BlastR | 6508 | 17198 |
| IgHSP-PSMA-chVH-71v2-[hTCRa-opt2] | 6509 | 17199 |
| CD8SP-CD22-FHVH-24-V5-[hTCRb-S57C-opt]-F-P2A-PAC | 6510 | 17200 |
| CD8SP-CD22-FHVH-24-V5-[hTCRb-S57C-opt] | 6511 | 17201 |
| IgHSP-PSMA-chVH-71v2-Myc-[hTCRa-T48C-opt]-F-F2A-BlastR | 6512 | 17202 |
| IgHSP-PSMA-chVH-71v2-Myc-[hTCRa-T48C-opt] | 6513 | 17203 |
| CD8SP-CD22-FHVH-24-SG4S-PSMA-chVH-71v2-[hTCRa-SDVP]-F-F2A-PAC | 6514 | 17204 |
| CD8SP-CD22-FHVH-24-SG4S-PSMA-chVH-71v2-[hTCRb-KAIAH]-F-P2A-PAC | 6515 | 17205 |
| CD8SP-CD22-FHVH-24-SG4S-PSMA-chVH-71v2-G4S-CD3e-ECDTMCP-opt2-F-F2A-PAC | 6516 | 17206 |
| CD8SP-CD22-FHVH-24-SG4S-PSMA-chVH-71v2-G4S-CD3d-ECDTMCP-opt2-F-F2A-PAC | 6517 | 17207 |
| CD8SP-CD22-FHVH-24-SG4S-PSMA-chVH-71v2-G4S-CD3g-ECDTMCP-opt2-F-F2A-PAC | 6518 | 17208 |
| CD8SP-CD22-FHVH-24-SG4S-PSMA-chVH-71v2-G4S-CD3z-ECDTMCP-opt2-F-F2A-PAC | 6519 | 17209 |
| CD8SP-CD22-FHVH-24-[IgCL-TCRb-wt-opt2-6MD]-F-P2A-SP-PSMA-chVH-71v2-[IgG1-CH1-TCRa-wt-opt2-6MD]-F-F2A-PAC | 6520 | 17210 |
| CD8SP-CD22-FHVH-24-[IgCL-TCRb-wt-opt2-6MD]-F-P2A-SP-PSMA-chVH-71v2-[IgG1-CH1-TCRa-wt-opt2-6MD] | 6521 | 17211 |
| CD8SP-CD22-FHVH-24-GS-[TCRb-wt-opt2-6MD]-F-P2A-SP-PSMA-chVH-71v2-GS-[TCRa-wt-opt2-6MD]-F-F2A-PAC | 6522 | 17212 |
| CD8SP-CD22-FHVH-24-GS-[TCRb-wt-opt2-6MD]-F-P2A-SP-PSMA-chVH-71v2-GS-[TCRa-wt-opt2-6MD] | 6523 | 17213 |
| CD8SP-CD22-FHVH-24-IgG1-Hinge-[TCRb-wt-opt2-6MD]-F-P2ASP-PSMA-chVH-71v2-GS-[TCRa-wt-opt2-6MD]-F-F2A-PAC | 6524 | 17214 |
| CD8SP-CD22-FHVH-24-GS-[TCRb-wt-opt2-6MD]-F-P2A-SP-PSMA-chVH-71v2-IgG1-Hinge-v2-[TCRa-wt-opt2-6MD]-F-F2A-PAC | 6525 | 17215 |
| CD8SP-CD22-FHVH-24-IgG1-Hinge-[TCRb-wt-opt2-6MD]-F-P2ASP-PSMA-chVH-71v2-IgG1-Hinge-v2-[TCRa-wt-opt2-6MD]-F-F2A-PAC | 6526 | 17216 |
| CD8SP-CD22-FHVH-24-IgG1-Hinge-[TCRb-wt-opt2-6MD]-F-P2ASP-PSMA-chVH-71v2-IgG1-Hinge-v2-[TCRa-wt-opt2-6MD] | 6527 | 17217 |
| CD8SP-CD22-FHVH-24-GS-[TCRb-wt-opt2-6MD]-F-P2A-SP-PSMA-chVH-71v2-IgG1-Hinge-v2-[TCRa-wt-opt2-6MD] | 6528 | 17218 |
| CD8SP-CD22-FHVH-24-[IgCL-TCRg-6MD]-F-P2A-SP-PSMA-chVH-71v2-[IgG1-CH1-TCRd-6MD]-F-F2A-PAC | 6529 | 17219 |
| CD8SP-CD22-FHVH-24-[IgCL-TCRg-6MD]-F-P2A-SP-PSMA-chVH-71v2-[IgG1-CH1-TCRd-6MD] | 6530 | 17220 |
| CD8SP-CD22-FHVH-24-GS-[TCRg-6MD]-F-P2A-SP-PSMA-chVH-71v2-GS-[TCRd-6MD]-F-F2A-PAC | 6531 | 17221 |
| CD8SP-CD22-FHVH-24-GS-[TCRg-6MD]-F-P2A-SP-PSMA-chVH-71v2-GS-[TCRd-6MD] | 6532 | 17222 |
| CD8SP-CD22-FHVH-24-IgG1-Hinge-[TCRg-6MD]-F-P2A-SP-PSMA-chVH-71v2-GS-[TCRd-6MD]-F-F2A-PAC | 6533 | 17223 |
| CD8SP-CD22-FHVH-24-GS-[TCRg-6MD]-F-P2A-SP-PSMA-chVH-71v2-IgG1-Hinge-v2-[TCRd-6MD]-F-F2A-PAC | 6534 | 17224 |
| CD8SP-CD22-FHVH-24-IgG1-Hinge-[TCRg-6MD]-F-P2A-SP-PSMA-chVH-71v2-IgG1-Hinge-v2- [TCRd-6MD] -F-F2A-PAC | 6535 | 17225 |
| CD8SP-CD22-FHVH-24-IgG1-Hinge-[TCRg-6MD]-F-P2A-SP-PSMA-chVH-71v2-IgG1-Hinge-v2-[TCRd-6MD] | 6536 | 17226 |

[0249] TABLE 34: Bispecifics and Trispecific Constructs on different backbones targeting different antigens. These constructs were generated by changing the AABD modules of the construct in Table 33 with the modules shown in the first construct of each series in the Table below. The order of the backbone (e.g., TCR constant chain fragments) of the constructs of each series in Table 34 is the same as the order of the backbones (e.g., TCR constant chain fragments) of the constructs of series 1 whose details are provided in Table 33.

TABLE 34

| Ist target | 2nd target | Name of first construct in the series | SEQ ID NO of Series (DNA) | SEQ ID NO of Series (PRT) |
|---|---|---|---|---|
| CD22 | BCMA | CD8SP-CD22-FHVH-24-SG4S-PSMA-chVH-71v2-Myc-CD8TM-BBz-T2A-PAC | 6464-6536 | 17154-17226 |
| CD22 | PSMA | CD8SP-CD22-FHVH-24-SG4S-PSMA-chVH-28-Myc-CD8TM-BBz-T2A-PAC | 6537-6609 | 17227-17299 |
| CD22 | CD19 | CD8SP-CD22-FHVH-24-SG4S-CD19-FHVH-354-Myc-CD8TM-BBz-T2A-PAC | 6610-6682 | 17300-17372 |
| CD22 | BCMA | CD8SP-CD22-FHVH-24-SG4S-BCMA-FHVH-74-Myc-CD8TM-BBz-T2A-PAC | 6683-6755 | 17373-17445 |
| CD22 | BCMA | CD8SP-CD22-FHVH-24-SG4S-BCMA-FHVH-93-Myc-CD8TM-BBz-T2A-PAC | 6756-6828 | 17446-17518 |
| CD22 | CEA | CD8SP-CD22-FHVH-24-SG4S-CEA-aVH-3001-Myc-CD8TM-BBz-T2A-PAC | 6829-6901 | 17519-17591 |
| CEA | BCMA | CD8SP-CEA-aVH-300-SG4S-BCMA-FHVH-93-Myc-CD8TM-BBz-T2A-PAC | 6902-6974 | 17592-17664 |
| BCMA | CD19 | CD8SP-BCMA-FHVH-93-SG4S-CD19-FHVH-354-Myc-CD8TM-BBz-T2A-PAC | 6975-7047 | 17665-17737 |
| BCMA | CD38 | CD8SP-BCMA-FHVH-74-SG4S-CD38-FHVH-309021-Myc-CD8TM-BBz-T2A-PAC | 7048-7120 | 17738-17810 |
| CD20 | CD22 | CD8SP-CD20-vHH-USC 1-2HC2D6-SG4S-CD22-USC1-FHVH-160-Myc-CD8TM-BBz-T2A-PAC | 7121-7193 | 17811-17883 |
| BCMA | CD38 | CD8SP-BCMA-FHVH-74-SG4S-CD38-FHVH-USC1-32184-Myc-CD8TM-BBz-T2A-PAC | 7194-7266 | 17884-17956 |
| CD20 | CD19 | CD8SP-CD20-vHH-USC 1-2HC2D6-SG4S-CD19-FHVH-354-Myc-CD8TM-BBz-T2A-PAC | 7267-7339 | 17957-18029 |

TABLE 35

SARs based on hu-mROO5 vL and vH domains (Series 1)

| TYPE | Name of fragment | SEQ ID NO (DNA) | SEQ ID NO (PRT) |
|---|---|---|---|
| 2nd Gen.CAR | CD8SP-hu-mROO5-1-vL-Gly-Ser-Linker-hu-mROO5-1-vH-Myc-CD8TM-BBz-T2A-PAC | 7340 | 18030 |
| 2nd Gen.CAR | CD8SP-hu-mROO5-1-vL-Gly-Ser-Linker-hu-mROO5-1-vH-Myc-28z-T2A-PAC | 7341 | 18031 |
| 2nd Gen.CAR | CD8SP-hu-mROO5-1-vL-Gly-Ser-Linker-hu-mROO5-1-vH-Myc-28z | 7342 | 18032 |
| 2nd Gen.CAR | CD8SP-hu-mROO5-1-vL-Gly-Ser-Linker-hu-mROO5-1-vH-Myc-CD8TM-BBz | 7343 | 18033 |
| 2nd Gen.CAR | CD8SP-hu-mROO5-1-vH-Gly-Ser-Linker-vL-Myc-CD8TM-BBz | 7344 | 18034 |
| 2nd Gen.CAR | CD8SP-hu-mROO5-1-vL-Gly-Ser-Linker-hu-mROO5-1-vH-Myc-CD8TM-z-P2A-K13-FLAG-T2A-PAC | 7345 | 18035 |
| DC SIR | CD8SP-hu-mROO5-1-vL-[hTCRa-CSDVP]-F-F2A-SP-hu-mROO5-1-vH-[hTCRb-KACIAH]-F-P2A-PAC | 7346 | 18036 |
| DC SIR | CD8SP-hu-mROO5-1-vL-[hTCRb-KACIAH]-F-P2A-SP-hu-mROO5-1-vH-[hTCRa-CSDVP]-F-F2A-PAC | 7347 | 18037 |
| DC SIR | CD8SP-hu-mROO5-1-vL-[hTCRb-S57C]-F-P2A-SP-hu-mROO5-1-vH-[hTCRa-T48C] | 7348 | 18038 |
| DC SIR | CD8SP-hu-mROO5-1-vL-[hTCRb-S57C]-F-P2A-SP-hu-mROO5-1-vH-[hTCRa-T48C]-F-F2A-K13-opt | 7349 | 18039 |
| DC SIR | CD8SP-hu-mROO5-1-vL-[hTCRa-T48C]-F-P2A-SP-hu-mROO5-1-vH-[hTCRb-S57C] | 7350 | 18040 |
| DC SIR | CD8SP-hu-mROO5-1-vL-[hTCRa-T48C]-F-P2A-SP-hu-mROO5-1-vH-[hTCRb-S57C]-F-P2A-K13-opt | 7351 | 18041 |
| OHC SIR | CD8SP-V5-[hTCRb-KACIAH]-F-P2A-CD8SP-hu-mROO5-1-vL-Gly-Ser-Linker-hu-mROO5-1-vH-Myc-[hTCRa-CSDVP]-F-F2A-PAC | 7352 | 18042 |
| OHC SIR | CD8SP-MYC-[hTCRa-T48C-opt1]-F-F2A-SP-hu-mROO5-1-vL-Gly-Ser-Linker-hu-mROO5-1-vH-V5-[hTCRb-S57C-opt1]-F-P2A-PAC | 7353 | 18043 |
| DC SIR | CD8SP-hu-mROO5-1-vL-[hTCRb-opt2]-F-P2A-SP-hu-mROO5-1-vH-[hTCRa-opt2]-F-F2A-PAC | 7354 | 18044 |
| DC SIR | CD8SP-hu-mROO5-1-vL-[hTCRb-opt2]-F-P2A-SP-hu-mROO5-1-vH-Myc-[pretc.Ra-Del48]-F-F2A-PAC | 7355 | 18045 |
| OHC SIR | CD8SP-[hTCRb-opt2]-F-P2A-CD8SP-hu-mROO5-1-vL-Gly-Ser-Linker-hu-mROO5-1-vH-Myc4-[pretc.Ra-Del48]-F-F2A-PAC | 7356 | 18046 |
| DC SIR | CD8SP-hu-mROO5-1-vL-V5-[hTCRg1-opt]-F-P2A-SP-hu-mROO5-1-vH-Myc-[hTCRd-opt]-F-F2A-PAC | 7357 | 18047 |
| DC SIR | CD8SP-hu-mROO5-1-vL-[hTCRd-opt]-F-P2A-SP-hu-mROO5-1-vH-[hTCRg1-opt] | 7358 | 18048 |
| OHC SIR | CD8SP-V5-[hTCRg1-opt]-F-P2A-CD8SP-hu-mROO5-1-vL-Gly-Ser-Linker-hu-mROO5-1-vH-Myc-[hTCRd-opt]-F-F2A-PAC | 7359 | 18049 |
| DC zSIR | CD8SP-hu-mROO5-1-vL-IgCL-CD3zECDTMCP-opt-F-P2A-Spe-SP-hu-mROO5-1-vH-IgG1-CH1-CD3zECDTMCP-opt2-F-F2A-PAC | 7360 | 18050 |
| DC SIR | CD8SP-hu-mROO5-1-vL-[hTCRbECD-CD3zECDTMCP-opt]-F-P2A-SP-hu-mROO5-1-vH-[hTCRaECD-CD3zECDTMCP-opt2] | 7361 | 18051 |
| DC SIR | CD8SP-hu-mROO5-1-vL-[hTCRb-KAC-ECD-CD3zECDTMCP-opt]-F-P2A-SP-hu-mROO5-1-vH-[hTCRa-CSDVP-ECD-CD3zECDTMCP-opt2] | 7362 | 18052 |
| DC SIR | CD8SP-hu-mROO5-1-vL-V5-[hTCRbECD-CD3zECDTMCP-opt]-F-P2A-SP-hu-mROO5-1-vH-Myc-[hTCRaECD-CD3zECDTM-28z-opt2] | 7363 | 18053 |
| DC SIR | CD8 SP-hu-mROO5-1 -vL-V5 - [hTCRbECD-CD3zECDTM-28z-opt]-F-P2A-SP-hu-mROO5-1-vH-Myc-[hTCRaECD-CD3zECDTM-28z-opt2] | 7364 | 18054 |
| DC SIR | CD8 SP-hu-mROO5-1 -vL-V5 - [hTCRbECD-CD3zECDTMCP-opt]-F-P2A-SP-hu-mROO5-1-vH-Myc4-[hTCRaECD-CD3zECDTM-BBz-opt2] | 7365 | 18055 |
| DC SIR | CD8SP-hu-mROO5-1-vL-V5-[hTCRbECD-CD3zECDTM-BBz-opt]-F-P2A-SP-hu-mROO5-1-vH-Myc4-[hTCRaECD-CD3zECDTM-BBz-opt2] | 7366 | 18056 |
| DC SIR | CD8SP-hu-mROO5-1-vL-CD3zECDTMCP-opt-F-P2A-Spe-SP-hu-mROO5-1-vH-Mlu-CD3zECDTMCP-opt2-F-F2A-PAC | 7367 | 18057 |
| DC Ab-TCR | CD8SP-hu-mROO5-1-vL-[IgCL-TCRg-6MD]-F-P2A-SP-hu-mROO5-1-vH-[IgG1-CH1-TCRd-6MD] | 7368 | 18058 |
| DC Ab-TCR | CD8SP-hu-mROO5-1-vL-[IgCL-TCRb-IAH-6MD]-F-P2A-SP-hu-mROO5-1-vH-[IgG1-CH1-TCRa-SDVP-6MD] | 7369 | 18059 |
| DC Ab-TCR | CD8SP-hu-mROO5-1-vL-[IgCL-TCRb-wt-opt2-6MD]-F-P2A-SP-hu-mROO5-1-vH-[IgG1-CH1-TCRa-wt-op2-6MD] | 7370 | 18060 |
| TFPe | CD8SP-hu-mROO5-1-scFv-CD3e-ECDTMCP-opt2 | 7371 | 18061 |
| TFPd | CD8SP-hu-mROO5-1-scFv-CD3d-ECDTMCP-opt2 | 7372 | 18062 |
| TFPg | CD8SP-hu-mROO5-1-scFv-CD3g-ECDTMCP-opt2 | 7373 | 18063 |
| TFPz | CD8SP-hu-mROO5-1-scFv-CD3z-ECDTMCP-opt2 | 7374 | 18064 |
| TFPe | CD8SP-hu-mROO5-1-scFv-CD3e-ECDTMCP-opt2 | 7375 | 18065 |
| TFPd | CD8SP-hu-mROO5-1-scFv-CD3d-ECDTMCP-opt2 | 7376 | 18066 |
| TFPg | CD8SP-hu-mROO5-1-scFv-CD3g-ECDTMCP-opt2 | 7377 | 18067 |
| TFPz | CD8SP-hu-mROO5-1-scFv-CD3z-ECDTMCP-opt2 | 7378 | 18068 |
| SIR Chain | CD8SP-hu-mROO5-1-vL-Gly-Ser-Linker-hu-mROO5-1-vH-[hTCRa-opt2]-F-F2A-PAC | 7379 | 18069 |
| SIR Chain | CD8SP-hu-mROO5-1-vL-Gly-Ser-Linker-hu-mROO5-1-vH-[hTCRb-opt2]-F-F2A-PAC | 7380 | 18070 |
| SIR Chain | CD8SP-hu-mROO5-1-vL-Gly-Ser-Linker-hu-mROO5-1-vH-Myc4-[pretc.Ra-Del48]-F-F2A-PAC | 7381 | 18071 |
| SIR Chain | CD8SP-hu-mROO5-1-vL-[hTCRb-opt2]-F-P2A-PAC | 7382 | 18072 |
| SIR Chain | CD8SP-hu-mROO5-1-vL-[hTCRb-opt2] | 7383 | 18073 |
| SIR Chain | IgHSP-hu-mROO5-1-vH-[hTCRa-opt2]-F-F2A-BlastR | 7384 | 18074 |
| SIR Chain | IgHSP-hu-mROO5-1-vH-[hTCRa-opt2] | 7385 | 18075 |
| SIR Chain | CD8SP-hu-mROO5-1-vL-V5-[hTCRb-S57C-opt]-F-P2A-PAC | 7386 | 18076 |
| SIR Chain | CD8SP-hu-mROO5-1-vL-V5-[hTCRb-S57C-opt] | 7387 | 18077 |
| SIR Chain | IgHSP-hu-mROO5-1-vH-Myc-[hTCRa-T48C-opt]-F-F2A-BlastR | 7388 | 18078 |
| SIR Chain | IgHSP-hu-mROO5-1-vH-Myc-[hTCRa-T48C-opt] | 7389 | 18079 |
| SIR Chain | CD8SP-hu-mROO5-1-vL-Gly-Ser-Linker-hu-mROO5-1-vH-[hTCRa-SDVP]-F-F2A-PAC | 7390 | 18080 |
| SIR Chain | CD8SP-hu-mROO5-1-vL-Gly-Ser-Linker-hu-mROO5-1-vH-[hTCRb-KAIAH]-F-P2A-PAC | 7391 | 18081 |
| TFPS-CD3e-ECDTMCP-opt2-F | CD8SP-hu-mROO5-1-scFv-G4S-CD3e-ECDTMCP-opt2-F-F2A-PAC | 7392 | 18082 |
| TFP-CD3d-ECDTMCP-opt2-F | CD8SP-hu-mROO5-1-scFv-G4S-CD3d-ECDTMCP-opt2-F-F2A-PAC | 7393 | 18083 |
| TFPS-CD3g-ECDTMCP-opt2-F | CD8SP-hu-mROO5-1-scFv-G4S-CD3g-ECDTMCP-opt2-F-F2A-PAC | 7394 | 18084 |
| TFPS-CD3z-ECDTMCP-opt2-F | CD8SP-hu-mROO5-1-scFv-G4S-CD3z-ECDTMCP-opt2-F-F2A-PAC | 7395 | 18085 |
| Bispecific DC SAR | CD8SP-CD19-FHVH-354-G4S3-CD19-hu-mROO5-1-vL-[hTCRb-S57C-opt]-F-P2A-SP-CD19-hu-mROO5-1-vH-[hTCRa-T48C-opt] | 7396 | 18086 |
| Bispecific DC SAR | CD8SP-CD19-FHVH-354-G4S3-CD19-hu-mROO5-1-vL-[hTCRa-T48C]-F-F2A-SP-CD19-hu-mROO5-1-vH-[hTCRb-S57C] | 7397 | 18087 |
| Bispecific DC SAR | CD8SP-CD19-FHVH-354-G4S3-CD19-hu-mROO5-1-vL-[hTCRbECD-CD3zECDTMCP-opt]-F-P2A-SP-CD19-hu-mROO5-1-vH-[hTCRaECD-CD3zECDTMCP-opt2] | 7398 | 18088 |
| Bispecific DC SAR | CD8SP-CD19-FHVH-354-G4S3-CD19-hu-mROO5-1-vL-[IgCL-TCRg-6MD]-F-P2A-SP-CD 19-hu-mROO5-1-vH-[IgG1-CH1-TCRd-6MD] | 7399 | 18089 |
| Bispecific DC SAR | CD8SP-CD19-FHVH-354-G4S3-CD19-hu-mROO5-1-vL-[IgCL-TCRb-wt-opt2-6MD]-F-F2A-SP-CD19-hu-mROO5-1-vH-[IgG1-CH1-TCRa-wt-op2-6MD] | 7400 | 18090 |
| Trispecific DC SAR | CD8SP-CD19-FHVH-354-G4S3-CD19-hu-mROO5-1-vL-[hTCRa-T48C]-F-F2A-SP-CD22-FHVH-24-CD19-hu-mROO5-1-vH-[hTCRb-S57C] | 7401 | 18091 |
| Trispecific DC SAR | CD8SP-CD19-FHVH-354-G4S3-CD19-hu-mROO5-1-vL-[hTCRbECD-CD3zECDTMCP-opt]-F-P2A-SP-CD22-FHVH-24-CD19-hu-mROO5-1-vH-[hTCRaECD-CD3zECDTMCP-opt2] | 7402 | 18092 |
| Trispecific DC SAR | CD8SP-CD19-FHVH-354-G4S3-CD19-hu-mROO5-1-vL-[IgCL-TCRg-6MD]-F-P2A-SP-CD22-FHVH-24-CD19-hu-mROO5-1-vH-[IgG1-CH1-TCRd-6MD] | 7403 | 18093 |
| Trispecific DC SAR | CD8SP-CD19-FHVH-354-G4S3-CD19-hu-mROO5-1-vL-[IgCL-TCRb-wt-opt2-6MD]-F-F2A-SP-CD22-FHVH-24-CD19-hu-mROO5-1-vH-[IgG1-CH1-TCRa-wt-op2-6MD] | 7404 | 18094 |
| Bispecific DC SAR | CD8SP-CD38-USC1-FHVH-32184-G4Sx3-R1-hu-mROO5-1-vL-[hTCRb-S57C]-F-P2A-SP-hu-mROO5-1-vH-[hTCRa-T48C] | 7405 | 18095 |
| Bispecific DC SAR | CD8SP-hu-mROO5-1-vL-[hTCRb-S57C]-F-P2A-IgSP-Apa-CD20-USC1-vHH-2HCD26-G4Sx3v2-hu-mROO5-1-vH-[hTCRa-T48C] | 7406 | 18096 |
| Trispecific DC SAR | CD8SP-hu-mROO5-1-vL-[hTCRb-S57C]-F-P2A-IgSP-CD22-USC1-FHVH-160-G4Sx2-CD20-USC1-vHH-2HCD26-G4Sx3v2-hu-mROO5-1-vH-[hTCRa-T48C] | 7407 | 18097 |
| Trispecific DC SAR | CD8SP-CD38-USC1-FHVH-32184-G4Sx3-R1-hu-mROO5-1-vL-[hTCRb-S57C]-F-P2A-IgSP-Apa-CD20-USC1-vHH-2HCD26-G4Sx3v2-hu-mROO5-1-vH-[hTCRa-T48C] | 7408 | 18098 |

[0250] TABLE 36: Unispecific, Bispecifics and Trispecific Constructs on different backbones targeting different antigens. These constructs were generated by changing the vL/vH modules of the construct in Table 35 with the vL/vH shown in the first construct of each series in the Table below. The order of the TCR constant chain fragments of the constructs of each series in Table 36 is the same as the order of TCR constant chain fragments of the constructs of series 1 whose details are provided in Table 35.

TABLE 36

| Series | Target | Name of first construct in the series | SEQ ID NO of Series (DNA) | SEQ ID NO of Series (PRT) |
|---|---|---|---|---|
| 1 | CD19 | CD8SP-hu-mR005-1-vL-G4Sx3-hu-mR005-1-vH-Myc-CD8TM-BBz-T2A-PAC | 7340-7408 | 18030-18098 |
| 2 | BCMA | CD8SP-BCMA-hu-USC73-vL-G4Sx3-BCMA-hu-USC73-G32S-vH-Myc-CD8TM-BBz-T2A-PAC | 7409-7477 | 18099-18167 |
| 3 | BCMA | CD8SP-BCMA-hu-USC74-vL-G4Sx3-BCMA-hu-USC74-F35Y-vH-Myc-CD8TM-BBz-T2A-PAC | 7478-7546 | 18168-18236 |
| 4 | BCMA | CD8SP-BCMA-hu-USC75-vL-G4Sx3-BCMA-hu-USC75-V104T-vH-Myc-CD8TM-BBz-T2A-PAC | 7547-7615 | 18237-18305 |
| 5 | BCMA | CD8SP-BCMA-huUSC76-vL-G4Sx3-BCMA-huUSC76-I58S-vH-Myc-CD8TM-BBz-T2A-PAC | 7616-7684 | 18306-18374 |
| 6 | BCMA | CD8SP-BCMA-hu-USC77-vL-G4Sx3-BCMA-hu-USC77-T59S-vH-Myc-CD8TM-BBz-T2A-PAC | 7685-7753 | 18375-18443 |
| 9 | BCMA | CD8SP-BCMA-hu-USC80-N25K-vL-G4Sx3-BCMA-huUSC80-vH-Myc-CD8TM-BBz-T2A-PAC | 7892-7960 | 18582-18650 |
| 10 | BCMA | CD8SP-BCMA-huUSC81-I27L-vL-G4Sx3-BCMA-huUSC81-vH-Myc-CD8TM-BBz-T2A-PAC | 7961-8029 | 18651-18719 |
| 11 | BCMA | CD8SP-BCMA-hu-USC82-S29G-vL-G4Sx3-BCMA-huUSC82-vH-Myc-CD8TM-BBz-T2A-PAC | 8030-8098 | 18720-18788 |
| 12 | BCMA | CD8SP-BCMA-hu-USC83-S31T-vL-G4Sx3-BCMA-huUSC83-vH-Myc-CD8TM-BBz-T2A-PAC | 8099-8167 | 18789-18857 |
| 13 | BCMA | CD8SP-BCMA-hu-USC80-N25K-vL-G4Sx3-BCMA-hu-USC73-G32S-vH-Myc-CD8TM-BBz-T2A-PAC | 8168-8236 | 18858-18926 |
| 14 | BCMA | CD8SP-BCMA-hu-USC81-I27L-vL-G4Sx3-BCMA-hu-USC73-G32S-vH-Myc-CD8TM-BBz-T2A-PAC | 8237-8305 | 18927-18995 |
| 15 | BCMA | CD8SP-BCMA-hu-USC82-S29G-vL-G4Sx3-BCMA-hu-USC73-G32S-vH-Myc-CD8TM-BBz-T2A-PAC | 8306-8374 | 18996-19064 |
| 16 | ROR1 | CD8SP-ROR1-JJ-67-vL-G4Sx3-ROR1-JJ-67-vH-Myc-CD8TM-BBz-T2A-PAC | 8375-8443 | 19065-19133 |
| 17 | ROR1 | CD8SP-ROR1-JJ-78-vL-G4Sx3-ROR1-JJ-78-vH-Myc-CD8TM-BBz-T2A-PAC | 8444-8512 | 19134-19202 |
| 18 | ROR1 | CD8SP-ROR1-JJ-76-vL-G4Sx3-ROR1-JJ-76-vH-Myc-CD8TM-BBz-T2A-PAC | 8513-8581 | 19203-19271 |
| 19 | CD20 | CD8SP-CD20-Rituximab-vL-G4Sx3-CD20-Rituximab-vH-Myc-CD8TM-BBz-T2A-PAC | 8582-8650 | 19272-19340 |
| 20 | Her2 | CD8SP-Her2-FRP5-vL-G4Sx3-Her2-FRP5-vH-Myc-CD8TM-BBz-T2A-PAC | 8651-8719 | 19341-19409 |
| 21 | CEA | CD8SP-CEA-huMN14-vL-G4Sx3-CEA-huMN14-vH-Myc-CD8TM-BBz-T2A-PAC | 8720-8788 | 19410-19478 |
| 22 | CEA | CD8SP-CEA-BW431-26-vL-G4Sx3-CEA-BW431-26-vH-Myc-CD8TM-BBz-T2A-PAC | 8789-8857 | 19479-19547 |
| 23 | Her2 | CD8SP-Her2-huMab4D5-H91A-vL-G4Sx3-Her2-huMab4D5-D98A-F100A-Y102V-Myc-CD8TM-BBz-T2A-PAC | 8858-8926 | 19548-19616 |
| 24 | Her2 | CD8SP-Her2-USC-1516-vL-G4Sx3-Her2-USC-1516-vH-Myc-CD8TM-BBz-T2A-PAC | 8927-8995 | 19617-19685 |
| 25 | TOSO | CD8SP-TOSO-6B 10-vL-G4Sx3-TOSO-6B 10-vH-Myc-CD8TM-BBz-T2A-PAC | 8996-9064 | 19686-19754 |
| 26 | CD30 | CD8SP-CD30-HRS3-vL-G4Sx3-CD30-HRS3-vH-Myc-CD8TM-BBz-T2A-PAC | 9065-9133 | 19755-19823 |
| 27 | CD229 | CD8SP-CD229-USC1-2D4-vL-G4Sx3-CD229-USC1-2D4-vH-Myc-CD8TM-BBz-T2A-PAC | 9134-9202 | 19824-19892 |
| 28 | CD229 | CD8SP-CD229-2A2-vL-G4Sx3-CD229-2A2-vH-Myc-CD8TM-BBz-T2A-PAC | 9203-9271 | 19893-19961 |
| 29 | CD229 | CD8SP-CD229-USC3-2D5-vL-G4Sx3-CD229-USC3-2D5-vH-Myc-CD8TM-BBz-T2A-PAC | 9272-9340 | 19962-20030 |
| 30 | CD229 | CD8SP-CD229-USC2-2D4-vL-G4Sx3-CD229-USC2-2D4-vH-Myc-CD8TM-BBz-T2A-PAC | 9341-9409 | 20031-20099 |
| 31 | EBV-gp350 | CD8SP-EBV-gp350-7A1-vL-G4Sx3-EBV-gp350-7A1-vH-Myc-CD8TM-BBz-T2A-PAC | 9410-9478 | 20100-20168 |
| 32 | EBV-gp350 | CD8SP-EBV-gp350-6G4-vL-G4Sx3-EBV-gp350-6G4-vH-Myc-CD8TM-BBz-T2A-PAC | 9479-9547 | 20169-20237 |
| 33 | INFLU ENZA-NA | CD8SP-INFL-NA-1E01-vL-G4Sx3-INFL-NA-1E01-vH-Myc-CD8TM-BBz-T2A-PAC | 9548-9616 | 20238-20306 |
| 34 | EBV-LMP1 | CD8SP-EBV-LMP1-HLEA-vL-G4Sx3-EBV-LMP1-HLEA-vH-Myc-CD8TM-BBz-T2A-PAC | 9617-9685 | 20307-20375 |
| 35 | PSMA | CD8SP-PSMA-J591-ds75-vL-G4Sx3-PSMA-J591-ds75-vH-Myc-CD8TM-BBz-T2A-PAC | 9686-9754 | 20376-20444 |
| 36 | PSMA | CD8SP-hu-PSMA-J591-vL-G4Sx3-hu-PSMA-J591-vH-Myc-CD8TM-BBz-T2A-PAC | 9755-9823 | 20445-20513 |
| 37 | PSMA | CD8SP-hu-PSMA-2-J591-vL-G4Sx3-hu-PSMA-2-J591-vH-Myc-CD8TM-BBz-T2A-PAC | 9824-9892 | 20514-20582 |
| 38 | PSMA | CD8SP-hu-PSMA-J591-vL-G4Sx3-PSMA-J591-ds75-vH-Myc-CD8TM-BBz-T2A-PAC | 9893-9961 | 20583-20651 |
| 39 | PSMA | CD8SP-PSMA-J591-ds75-vL-G4Sx3-hu-PSMA-J591-vH-Myc-CD8TM-BBz-T2A-PAC | 9962-10030 | 20652-20720 |
| 40 | MUC1 | CD8SP-hu-MUC1-star2-MN-E6-vL-G4Sx3-hu-MUC1-star2-MN-E6-vH-Myc-CD8TM-BBz-T2A-PAC | 10031-10099 | 20721-20789 |
| 41 | MUC1 | CD8SP-MUC1-star-MN-E6-vL-G4Sx3-MUC1-star-MN-E6-vH-Myc-CD8TM-BBz-T2A-PAC | 10100-10168 | 20790-20858 |
| 42 | MUC1 | CD8SP-hu-MUC1-star-MN-C2-vL-G4Sx3-hu-MUC1-star-MN-C2-vH-Myc-CD8TM-BBz-T2A-PAC | 10169-10237 | 20859-20927 |
| 43 | gpA33 | CD8SP-hu-gpA33-C825-vL-G4Sx3-hu-gpA33-C825-vH-Myc-CD8TM-BBz-T2A-PAC | 10238-10306 | 20928-20996 |
| 44 | MSLN | CD8SP-MSLN-7D 10-vL-G4Sx3-MSLN-7D 10-vH-Myc-CD8TM-BBz-T2A-PAC | 10307-10375 | 20997-21065 |
| 45 | MSLN | CD8SP-MSLN-7D9-HL-vL-G4Sx3-MSLN-7D9-HL-vH-Y27F-Myc-CD8TM-BBz-T2A-PAC | 10376-10444 | 21066-21134 |
| 46 | MSLN | CD8SP-MSLN-7D9-HL-vL-V29-G4Sx3-MSLN-7D9-HL-vH-Myc-CD8TM-BBz-T2A-PAC | 10445-10513 | 21135-21203 |
| 47 | MSLN | CD8SP-MSLN-hu22A10-vL-G4Sx3-MSLN-hu22A10-vH-F27Y-Myc-CD8TM-BBz-T2A-PAC | 10514-10582 | 21204-21272 |
| 48 | MSLN | CD8SP-MSLN-hu22A10-vL-N31S-vH-G4Sx3-MSLN-hu22A10 -vH-Myc-CD8TM-BBz-T2A-PAC | 10583-10651 | 21273-21341 |
| 49 | MSLN | CD8SP-MSLN-hu22A10-vL-Y96W-G4Sx3-MSLN-hu22A10-vH-Myc-CD8TM-BBz-T2A-PAC | 10652-10720 | 21342-21410 |

TABLE 37

EXEMPLARY EPITOPE TAGS

| SEQ ID NO | NAME | SEQ ID NO: | NAME |
|---|---|---|---|
| 22411 | RITX | 22423 | Cituximab-mimo-1 |
| 22412 | Ritx2 | 22424 | Cituximab-mimotopx2 |
| 22413 | RitxGA | 22425 | Cituximab-mimotop |
| 22414 | RitxGA4 | 22426 | Panitumumab-tag1 |
| 22415 | RituxGAtag | 22427 | Panitumumab-tag2 |
| 22416 | RitxGAx22-opt2 | 22428 | Panitumumab-tag3 |
| 22417 | RitxGAx2 | 22429 | Panitumumab-tag4 |
| 22418 | R15Cx2 | 22430 | Panitumumab-tag2x2 |
| 22419 | R5pLx2-Qbendx2CD28TM | 22431 | Panitumumab-tag2-v2 |
| 22420 | RituxGAtag-Herceptin-Mimotag | 22432 | Herceptin-Mimotag |
| 22421 | Cituxumab-Mimotope1 | 22433 | HercepMimotopx3 |
| 22422 | Cituximab-mimo-1x2 | | |

TABLE 38

MHC restricted Epitopes

| Name of fragment | SEQ ID NO | Name of fragment | SEQ ID NO |
|---|---|---|---|
| gp100 | 21443 | EBNA-3c | 21455 |
| gp100 | 21444 | WT1 | 21456 |
| gp100 | 21445 | PR1 | 21457 |
| MUC1-A7(130-138) | 21446 | Ras9-G12V | 21458 |
| MUC1-D6(13-21) | 21447 | HPV16-E7 | 21459 |
| TAX(11-19) | 21448 | NY-ESO-1-(155-163) | 21460 |
| hTERT(540-548) | 21449 | NY-ESO-1-(157-165) | 21461 |
| hTERT(865-873) | 21450 | NY-ESO-1-(157-167) | 21462 |
| HIV1gag(77-85) | 21451 | Mesothelin | 21463 |
| CMV-pp65(495-503) | 21452 | MAGE-A3peptide | 21464 |
| MART(26-35) | 21453 | AFP-158 | 21465 |
| EBNA-3A(596-604) | 21454 | | |

TABLE 39

NOVEL ANTIGEN BINDING DOMAINS WITH CDRs

| TARGET | Name of Fragmentt | SEQ ID NO | CDR1 SEQ ID NO | CDR2 SEQ ID NO | CDR3 SEQ ID NO |
|---|---|---|---|---|---|
| MSLN | MSLN-7D10-vL | 23136 | 23181 | 23226 | 23271 |
| MSLN | MSLN-7D9-HL-vL | 23137 | 23182 | 23227 | 23272 |
| MSLN | MSLN-7D9-HL-V29L-vL | 23138 | 23183 | 23228 | 23273 |
| MSLN | MSLN-hu22A10-vL | 23139 | 23184 | 23229 | 23274 |
| MSLN | MSLN-hu22A10-N31S-vL | 23140 | 23185 | 23230 | 23275 |
| MSLN | MSLN-hu22A10-Y96W-vL | 23141 | 23186 | 23231 | 23276 |
| BCMA | BCMA-hu-USC79-vL | 23142 | 23187 | 23232 | 23277 |
| BCMA | BCMA-hu-USC80-N25K-vL | 23143 | 23188 | 23233 | 23278 |
| BCMA | BCMA-hu-USC81-I27L-vL | 23144 | 23189 | 23234 | 23279 |
| BCMA | BCMA-hu-USC82-S29G-vL | 23145 | 23190 | 23235 | 23280 |
| BCMA | BCMA-hu-USC83-S31T-vL | 23146 | 23191 | 23236 | 23281 |
| CS1 | hu-Luc64-2-vL | 23147 | 23192 | 23237 | 23282 |
| MSLN | MSLN-7D10-vH | 23148 | 23193 | 23238 | 23283 |
| MSLN | MSLN-7D9-HL-Y27F-vH | 23149 | 23194 | 23239 | 23284 |
| MSLN | MSLN-7D9-HL-vH | 23150 | 23195 | 23240 | 23285 |
| MSLN | MSLN-hu22A10-F27Y-vH | 23151 | 23196 | 23241 | 23286 |
| MSLN | MSLN-hu22A10-vH | 23152 | 23197 | 23242 | 23287 |
| MSLN | MSLN-hu22A10-vH | 23153 | 23198 | 23243 | 23288 |
| BCMA | BCMA-hu-USC73-G32S-vH | 23154 | 23199 | 23244 | 23289 |
| BCMA | BCMA-huUSC74-F35Y-vH | 23155 | 23200 | 23245 | 23290 |
| BCMA | BCMA-huUSC75-V104T-vH | 23156 | 23201 | 23246 | 23291 |
| BCMA | BCMA-huUSC76-I58S-vH | 23157 | 23202 | 23247 | 23292 |
| BCMA | BCMA-huUSC77-T59S-vH | 23158 | 23203 | 23248 | 23293 |
| BCMA | BCMA-huUSC78-S64G-vH | 23159 | 23204 | 23249 | 23294 |
| BCMA | BCMA-huUSC79-S64T-vH | 23160 | 23205 | 23250 | 23295 |
| CS1 | hu-Luc64-A60T-vH | 23161 | 23206 | 23251 | 23296 |
| CD20 | CD20-VHH-USC1 | 23162 | 23207 | 23252 | 23297 |
| MUC16 | MUC16-vHH-R3MU5-USC1 | 23163 | 23208 | 23253 | 23298 |
| MUC16 | MUC16-USC2-huR3MU30 | 23164 | 23209 | 23254 | 23299 |
| IL 13Ra2 | IL13Ra2-vHH-USC2-C13 | 23165 | 23210 | 23255 | 23300 |
| IL 13Ra2 | IL13Ra2-huvHH-USC1-C1 | 23166 | 23211 | 23256 | 23301 |
| BCMA | BCMA917-vHH-E59D | 23167 | 23212 | 23257 | 23302 |
| CD38 | CD38-331-vHH-D64E | 23168 | 23213 | 23258 | 23303 |
| CD38 | CD38-331-vHH-S53E | 23169 | 23214 | 23259 | 23304 |
| CD123 | CD123-USC-3-vHH | 23170 | 23215 | 23260 | 23305 |
| PD1 | PD1-vHH-USC-102C4 | 23171 | 23216 | 23261 | 23306 |
| PD1 | PD1-vHH-USC-707 | 23172 | 23217 | 23262 | 23307 |
| PD1 | PD1-vHH-C13 | 23173 | 23218 | 23263 | 23308 |
| CD22 | CD22-FHVH-162 | 23174 | 23219 | 23264 | 23309 |
| PSMA | PSMA-USC-29-chVH | 23175 | 23220 | 23265 | 23310 |
| PSMA | PSMA-USC-30-chVH | 23176 | 23221 | 23266 | 23311 |
| PSMA | PSMA-USC-31-chVH | 23177 | 23222 | 23267 | 23312 |
| PSMA | PSMA-USC76-chVH | 23178 | 23223 | 23268 | 23313 |
| PSMA | PSMA-USC101-chVH | 23179 | 23224 | 23269 | 23314 |
| PSMA | PSMA-USC104-chVH | 23180 | 23225 | 23270 | 23315 |

TABLE 40

Exemplary diseases targeted by SARs

| | |
|---|---|
| SAR/BiTE “X” TARGET | EXEMPLARY DISEASE TARGETED BY SARs (i.e., conventional CARs and next generation CARs. e.g., SIR, cTCR, Ab-TCR, AABD-TCR, TFP, Tri-TAC and TCR) |
| CD19 | ALL, CLL, lymphoma, lymphoid blast crisis of CML, multiple myeloma, immune disorders |
| ALK | Non-small cell lung Cancer (NSCLC), ALCL (anaplastic large cell lymphoma), IMT (inflammatory myofibroblastic tumor), or neuroblastoma |
| CD45 | Blood cancers |
| BCMA | Myeloma, PEL, plasma cell leukemia, Waldenstrom’s macroglobinemia |
| CD5 | Blood cancer, T cell leukemia, T cell lymphoma |
| CD20 | Blood cancers, Leukemia, ALL, CLL, lymphoma, immune disorders |
| CD22 | Blood cancers, Leukemia, ALL, CLL, lymphoma, lymphoid blast crisis of CML, immune disorders |
| CD23 | Blood cancers, Leukemia, ALL, CLL, lymphoma, autoimmune disorders |
| CD30 | Hodgkins’s lymphoma, Cutaneous T cell lymphoma |
| CD32 | Solid tumors |
| CD33 | Blood cancers, AML, MDS |
| CD34 | Blood cancers, AML, MDS |
| CD44v6 | Blood cancers, AML, MDS |
| CD70 | Blood cancers, lymphoma, myeloma, Waldenstrom’s macroglobulinemia, Kidney cancer |
| CD79b | Blood cancers, ALL, Lymphoma |
| CD123 | Blood cancers, AML, MDS |
| CD138 | Blood cancers, Myeloma, PEL, plasma cell leukemia, waldenstrom’s macroglobulinemia |
| CD179b | Blood cancers, ALL, Lymphoma |
| CD276/B7-H3 | Ewing’s sarcoma, neuroblastoma, rhabdomyosarcoma, ovarian, colorectal and lung cancers |
| CD324 | Solid tumors, esophageal, prostate, colorectal, breast, lung cancers |
| CDH6 | Solid tumors, renal, ovarian, thyroid cancers |
| CDH17 | Adenocarciniomas, gastrointestinal, lung, ovarian, endometrial cancers |
| CDH19 | Solid tumor, Melanoma |
| EGFR | Colon cancer, lung cancer |
| CLEC5A | Blood cancers, Leukemia, AML |
| GR/LHR | Prostate cancer, ovarian cancer or breast cancer |
| CLL1 | Blood cancer, Leukemia |
| CMVpp65 | CMV infection, CMV colitis, CMV pneumonitis |
| CS 1/SLAMF7 | Blood cancers, myeloma, PEL, plasma cell leukemia, CLL, melanoma, lung cancer, ovarian cancer |
| CSF2RA | AML, CML, MDS |
| CD123 | Blood cancers, AML, MDS |
| DLL3 | Melanoma, lung cancer or ovarian cancer |
| EBNA3c/MHC I | Epstein Barr virus infection and related diseases including cancers |
| EBV-gp350 | Epstein Barr virus infection and related diseases |
| EGFR | Solid tumors, Colon cancer, lung cancer |
| EGFRvIII | Solid tumors, glioblastoma |
| EpCam1 | Gastrointestinal cancer |
| FLT3 | Blood cancers, AML, MDS, ALL |
| Folate Receptor alpha(FR1 or FOLR1) | Ovarian cancer, NSCLC, endometrial cancer, renal cancer, or other solid tumors |
| FSHR | Prostate cancer, ovarian cancer or breast cancer |
| GD2 | Neuroblastoma |
| GD3 | Melanoma |
| GFRa4 | Cancer, thyroid medullary cancer |
| Fucosyl-GM1(GM1) | Small cell lung cancer |
| GPRC5D | Myeloma, PEL, plasma cell leukemia, waldenstrom’s macroglobulinemia |
| gp100 | Melanoma |
| GPC3 | Solid tumors, Lung cancer |
| gpNMB | Melanoma, brain tumors, gastric cancers |
| GRP78 | Myeloma |
| Her2 | Solid tumors, breast cancer, stomach cancer |
| Her3 | Colorectal, breast cancer |
| HMW-MAA | Melanoma |
| HTLV1-TAX/MHC I | HTLV1 infection associated diseases, Adult T cell leukemia-lymphoma |
| IL11Ra | Blood cancers, AML, ALL, CML, MDS, sarcomas |
| IL6Ra | Solid tumors, Liver cancer |
| IL 13Ra2 | Glioblastomas |
| KSHV-K8.1 | Kaposi’s sarcoma, PEL, Multicentric Castleman’s disease |
| LAMP1 | Blood cancers, AML, ALL, MDS, CLL, CML |
| LewisY | Cancers |
| L1CAM | Solid tumors, ovarian, breast, endometrial cancers, melanoma |
| LHR | Prostate cancer, ovarian cancer or breast cancer |
| Lym1 | Blood cancer, Leukemia, Lymphoma |
| Lym2 | Blood cancer, Leukemia, Lymphoma |
| CD79b | Blood cancers, lymphoma |
| MART1/MHC I | Melanoma |
| Mesothelin | Mesothelioma, ovarian cancer, pancreatic cancer |
| Muc1/MHC I | Breast cancer, gastric cancer, colorectal cancer, lung cancer, or other solid tumors |
| Muc16 | Ovarian cancer |
| NKG2D | Leukemia, lymphoma or myeloma |
| NYBR1 | Breast cancer |
| PSCA | Prostate cancer |
| PR1/MHC I | Blood cancer, Leukemia |
| Prolactin Receptor | Breast cancer, chromophobe renal cell cancer |
| PSMA | Prostate cancer |
| PTK7 | Melanoma, lung cancer or ovarian cancer |
| ROR1 | Blood cancer, B cell malignancy, lymphoma, CLL |
| SLea | Pancreatic cancer, colon cancer |
| SSEA4 | Pancreatic cancer |
| Tyrosinase/MHC I | Melanoma |
| TCRB1 | T cell leukemias and lymphomas, autoimmune disorders |
| TCRB2 | T cell leukemias and lymphomas, autoimmune disorders |
| TCRgd | T cell leukemias and lymphomas, autoimmune disorders |
| hTERT | Solid tumors, blood cancers |
| TGFBR2 | Solid tumors, keloid |
| TIM1/HAVCR1 | Kidney cancer, liver cancer |
| TROP2 | Solid tumors, Breast cancer,prostate cancer |
| TSHR | Thyroid cancer, T cell leukemia, T cell Lymphoma |
| TSLPR | Blood cancers, Leukemias, AML, MDS |
| Tyrosinase/MHC I | Melanoma |
| VEGFR3 | Solid tumors |
| WT1/MHC I | Blood cancers, AML |
| Folate Receptorβ | AML, Myeloma |
| B7H4 | Breast cancer or ovarian cancer |
| CD23 | Blood cancers, Leukemias, CLL |
| GCC | Gastrointestinal cancer |
| CD200R | Blood cancers, AML, MDS |
| AFP/MHC I | Solid tumors, Liver cancer |
| CD99 | Liver cancer |
| GPRC5D | Myeloma, waldenstrom’s macroglobinemia |
| HPV16-E7/MHC I | HPV16 associated cancers, cervical cancer, head and neck cancers |
| Tissue Factor 1 (TF1) | Solid tumors |
| Tn-Muc1 | Solid tumors and blood cancers |
| Igk-Light Chain | Myeloma, plasma cell leukemia |
| Ras G12V/ MHC I | Solid tumors and blood cancers |
| CLD18A2 (Claudin 18.2) | Gastric, pancreatic, esophageal, ovarian, or lung cancer |
| CD43 | Blood cancers, AML |
| NY-ESO-1/MHC I | Myeloma |
| MPL/TPO-R | Blood cancer, AML, MDS, CML, ALL, Myeloproliferative disorders, Polycythemia vera, Myelofibrosis, Essential Polycythemia |
| P-glycoprotein (MDR1) | Renal cancer, liver cancer, Myeloma |
| CD179a | Blood cancers, Acute Leukemia, CLL, ALL, Lymphoma |
| STEAP1 | Gastric or prostate cancer, or lymphoma |
| Liv1 (SLC39A6) | Breast or prostate cancer |
| Nectin4 (PVRL4) | Bladder, renal, cervical, lung, head and neck or breast cancer |
| Cripto (TDGF1) | Colorectal or endometrial or ovarian cancer |
| gpA33 | Colorectal or endometrial or ovarian cancer |
| FLT3 | Blood cancers, AML, ALL, MDS |
| BST1/CD157 | Blood cancers, AML, MDS |
| IL 1 RAP | Liver, colorectal, cervical, lung or ovarian cancer |
| Low Conductance Chloride Channel (LCCC) | Glioma |
| IgE | Allergy |
| HLA-A2 | Graft vs host disease, tissue rejection (SIR Expressed in regulatory T cells) |
| Amyloid | Amyloidoses, alzheimer’s disease |
| HIV1-env | HIVI/AIDS and related conditions |
| HIV1-gag | HIV1/AIDS and related conditions |
| Influenza A HA | Influenza A infection |
| CD32b | Blood cancers, AML, CLL, ALL, CML, Myeloma, Lymphoma |
| CD96 | Blood cancers, AML, B-ALL, T cell lymphoma, T-ALL, melanoma |
| CD229 | Blood cancers, myeloma, lymphoma |

[0251] In one aspect, the disclosure provides novel compositions of synthetic antigen receptor (SARs). In another aspect, the disclosure provides novel configuration/architectures of SARs. In another aspect, the disclosure provides SARs with useful biological properties (e.g., expression, binding affinity, effector functions etc.). In another aspect, the disclosure provides SARs capable of binding to one or more than one antigen. In another aspect, the disclosure provides SARs capable of binding to one or more than one epitope of an antigen.

[0252] In one aspect, the disclosure provides a synthetic antigen receptor (SAR) comprising more than one (i.e., 2, 3, 4, 5 or more) antigen binding domains. In another aspect, the disclosure provides a SAR capable of binding to and/or responding to more than one antigen or more than one epitope of an antigen. In another aspect, the disclosure provides a bispecific and/or a multispecific SAR capable of binding to and/or responding to more than one antigen or more than one epitope of an antigen. In another aspect, the disclosure provides useful antigen binding domains for construction of a bispecific and/or a multispecific SAR. In another aspect, the disclosure provides useful configurations (i.e., the location of different domains) for a bispecific and/or a multispecific SAR. The bispecific and multispecific SAR of disclosure when expressed in an immune effector cell (e.g., a T cell, NKT cell or NK cell etc.) confers on it the ability to bind to and/or respond to more than one antigen or more than one epitope of an antigen with nearly equal efficacy or greater efficacy as compared to two or more unispecific SAR targeting those same antigens or same epitopes of those antigens.

[0253] The presence of two or more antigen binding domains in a bispeficic or multi-specific SAR may result in steric hinderance, non-specific aggregation, poor expression, protein unfolding, and/or interference with antigen binding. In addition, the location of the antigen binding domain(s) relative to the transmebrane domain of SARs needs to be optimized in order to optimize signal transduction by the resulting receptor. Bispecific and multispecific CARs incorporating two or more scFv have been described in the art. However, the disclosure identifies that presence of more than one scFv (i.e., 2, 3, 4 or more) in a SAR (e.g., 2^{nd} generation CAR, SIR, Ab-TCR, zSIR, TFP or rTCR etc.) often results in steric hinderance, non-specific aggregation, tonic-signaling, poor expression, protein unfolding, and/or interference with antigen binding resulting in poor signaling and effector function (e.g., cytokine production, cytotoxicity etc.). Therefore, a major challenge in the generation of bispecific and multi-specific SARs comprising two or more antigen binding domains is to determine useful antigen binding domains (e.g., scFv, Fv, Fab, vHH, FHVH, Centyrin, affibody, cytokine, receptor, svd-TCR, etc.) that should be incorporated in such SARs so as to reduce steric hinderance, non-specific aggregation, tonic-signaling, poor expression, protein unfolding, and/or interference with antigen binding that can lead to poor signaling and effector function (e.g., cytokine production, cytotoxicity etc.).

[0254] A second challenge is to determine a useful configuration of the various antigen binding domains that comprise the bispecific and multi-specific SARs. For example, the optimal order of various antigen binding domains with respect to each other and with respect to other components of the SAR (e.g., hinge domain, transmembrane domain etc.) needs to be determined to reduce non-specific aggregation, tonic-signaling, poor expression, protein unfolding, and/or interference with antigen binding resulting in poor signaling and effector function (e.g., cytokine production, cytotoxicity etc.). This is a significant challenge for all SARs and particularly for multichain SARs, such as SIR, Ab-TCR, zSIR, αβTFP or γδTFP whose antigen binding domain is composed of two different fragments (e.g., vL and vH, Va and Vb or Vg and Vd etc.). For example, the attachment of a second antigen binding domain (e.g., scFv or a vHH domain) to a double chain SIR (e.g., CD8SP-hu-mROO5-1-vL-[hTCRb-S57C]-F-P2A-SP-hu-mROO5-1-vH-[hTCRa-T48C]; SEQ ID NO: 7348) which binds to CD19 through a vL and vH fragments that are operably linked to two separate TCR constant chains but join to form a Fv that binds to CD19 could potentially interfere with the interaction between the vL and vH fragments resulting in their inability to form a funcational Fv that can bind CD19.

[0255] The length of the hinge domain, which determines the distance between the antigen binding domain and the cell membrane, may influence the signaling via a chimeric antigen receptor. Therefore, another challenge in the field is that it is not known at the present whether attachment of multiple antigen binding domains may adversely affect the formation of an effective immunological synapse and signaling via a SAR by increasing the distance between the target antigen and the cell membrane.

[0256] Fusion of multiple antigen binding domains in a SAR could result in steric hinderance and improper folding. Another challenge in the field is that it is not known at the present whether linker domains are needed between the different antigen binding domains of a bispecific/multispecific SAR. The length and nature of the linker domains is also not known. This is of particular importance in case of double chain SAR (e.g., double chain SIR, double chain zSIR, Ab-TCR, αβTFP or γδ TFP etc.) as the addition of an improper linker could potentially interfere with the interaction between the two chains or formation of a functional Fv. Additionally, linker(s) could adversely affect the formation of an effective immunological synapse and signaling via a SAR by increasing the distance between the target antigen and the cell membrane.

[0257] In one aspect, the present disclosure offers solution to the above problems.

[0258] In one aspect, the disclosure provides SARs with one or more antigen binding domains and one or more transmembrane domains. In an embodiment, the disclosure provides useful antigen binding domains for construction of bispecific and multispecific SARs.

[0259] The disclosure provides several exemplary SARs comprising different antigen binding domains, hinge domains, linker domains, connecting peptides, transmembrane domains, activation domains, costimulatory domains, accessory modules and therapeutic controls etc. The names and SEQ ID (DNA) and SEQ ID (PRT) of exemplary components that can be used in the construction of the SAR are provided in Tables 1 to 20 and 24. The names and SEQ ID (DNA) and SEQ ID (PRT) of exemplary SARs are provided in Tables 25-36 and 41-50. The target antigen(s), configuration and composition of the SARs can be deduced from their nucleic acid sequences and amino-acid sequences provided in this disclosure by performing sequence homology search for their component modules using programs such as BLAST. Alternatively, softwares, such as ApE (https://jorgensen.biology.utah.edu/wayned/ape/), can be used to determine the composition of the different SAR constructs whose nucleic acid sequences are provided in this disclosure. Finally, the configuration and composition of the different SARs of the disclosure can be deduced from their names by those skilled in the art.

[0260] In an embodiment, the disclosure provides a novel SAR with the architecture and/or configuration represented by any of the exemplary SARs provided in Tables 25-36 and 41-50. In an embodiment, the disclosure provides a novel SAR with the composition of any of the exemplary SARs provided in Tables 25-36 and 41-50 or a functional variant thereof. In an embodiment, the disclosure provides a novel SAR with at least 70% homology (e.g., 70%, 75%, 80%, 85%, 90%, 95%, 98%, 99% homology) to the amino acid sequence of any of the exemplary SARs provided in Tables 25-36 and 41-50. In an embodiment, the disclosure provides a novel SAR with at least 70% homology (e.g., 70%, 75%, 80%, 85%, 90%, 95%, 98%, 99% homology) to the amino acid sequence of any of the exemplary SARs provided in Tables 25-36 and 41-50 excluding the optional accessory modules. The nucleic acid and amino acid sequences of the SARs in Tables 25-36 and 41-50 include their signal peptides. However, as the signal peptides are removed from the mature SAR polypeptide chains, the sequences encoding the signal peptides are excluded for the purpose of determining the homology. Similarly, the sequence encoding the accessory modules and/or any cleavage linkers (e.g., P2A, F2A etc.) or furine cleavage sites are excluded for the purpose of determining sequence homology. Thus, in an embodiment, the disclosure provides a novel SAR with at least 70% homology (e.g., 70%, 75%, 80%, 85%, 90%, 95%, 98%, 99% homology) to the amino acid sequence of any of the exemplary SARs provided in Tables 25-36 and 41-50 in the regions comprising their antigen binding domain(s) and signaling chain(s) (e.g., TCR constant chains).

[0261] In one aspect, the disclosure relates to the use of autonomous antigen binding domains (AABD) including human V_{H} domains, typically multiple human V_{H} domains, as building blocks to make SARs with advantageous antigen binding domains.

[0262] The present disclosure relates in one aspect to an autonomous antigen binding domain (AABD), methods of generating the same and uses of such domains for construction of synthetic antigen receptors and potentially antibody therapeutics. In one embodiment, the AABD domain has improved stability. In another embodiment, the AABD domain has improved thermal stability. In another embodiment, the AABD domain has improved solubility. In another embodiment, the AABD domain has less tendency for self-aggregation. In another embodiment, the AABD domain has improved ability to be secreted in the extracellular space when expessed in a mammalian cell with an N-terminal signal peptide.

[0263] In one aspect the AABD is a single domain antibody or antibody fragment. In one aspect, an AABD is a single variable heavy chain (VH or vH) domain (SVH domain) or a fragment thereof that is capable of binding the antigen in the absence of a variable light chain (VL or vL) domain. In another aspect, the AABD is a single variable heavy chain (VH) domain (or a SVH domain) of a fragment thereof that can be expressed as a soluble protein in the absence of a vL domain. In another aspect, the AABD is a single variable heavy chain (VH) domain (or a SVH domain) or a fragment thereof that can be expressed as a secreted protein in the absence of a vL domain when joined to an N-terminal secretory signal. Certain embodiments of present disclosure relate to a SAR comprising a first AABD, the first AABD specifically binding to an antigen in the absence of a second domain.

[0264] In one aspect the AABD is a single variable light chain (VL or vL) domain or a SVL domain or a fragment thereof that is capable of binding the antigen in the absence of a variable heavy chain (VH or vH) domain. In another aspect, the AABD is a single variable light chain (VL) domain (or a SVL domain) or a fragment thereof that can be expressed as a soluble protein in the absence of a vH domain. In another aspect, the AABD is a single variable light chain (VL) domain (or a SVL domain) or a fragment thereof that can be expressed as a secreted protein in the absence of a vH domain when joined to an N-terminal secretory signal.

[0265] In an embodiment, an AABD is a non-scFv based antigen binding domain or a fragment thereof.

[0266] In an embodiment, an AABD is a camelid vHH domain or a humanized vHH domain or a fragment thereof.

[0267] In an embodiment, an AABD is a non-immunoglobulin antigen binding scaffold or a fragment thereof.

[0268] In an embodiment, an AABD is a cytokine or a ligand or a fragment thereof.

[0269] In an embodiment, an AABD is the extracellular domain of a receptor or a fragment thereof.

[0270] In an embodiment, an AABD is a single variable domain T cell receptor (TCR) or a fragment thereof.

[0271] In an embodiment, an AABD is an autoantigen or a fragment thereof.

[0272] In an embodiment, an AABD is an adaptor domain, an adaptor binding domain or a fragment thereof. Exemaplary adaptors and adaptor binding domain include but are not limited to: RZIP, EZIP, E4, K4, NKG2D-YA, NKG2D-AF, D domains and the like.

[0273] The terms “single domain antibody, variable single domain or immunoglobulin single variable domain (ISV)” are all well known in the art and describe the single variable fragment of an antibody that binds to a target antigen. These terms are used interchangeably herein. As explained below, preferred embodiments of the various aspects of the disclosure relate to SARs comprising single heavy chain variable domain antibodies/immunoglobulin heavy chain single variable domains, designated SVH domains, which bind to different antigens, such as CD19, CD20, CD22, BCMA, CD38, MPL, CD123, CD33, Mesothelin, Her2, CS1/SLAMF7, CD30, GD2, GD3, PLT3, ROR1, CD79b, Lym1, Lym2, PSCA, PSMA, ALK, CD138, CEA, FAP, TAJ, CD229, IL13Ra2, CD32b, GPC3, Muc16 and KIR3DL2 in the absence of light chain. Human heavy chain single variable domain antibodies are particularly preferred.

[0274] Thus, in some preferred embodiments, the SARs of the disclosure comprise a binding domain that comprises or consist of a single domain antibody wherein said domain is a single human heavy chain variable domain (SVH). Thus, in a preferred aspect, the SARs of the disclosure comprise one or more binding domain that is devoid of V_{L} domains.

[0275] Thus, in some preferred embodiments, the SARs of the disclosure comprise a binding domain that comprises or consist of a single domain antibody wherein said domain is a camelid vHH (or VHH) domain or humanized vHH domain.

[0276] As used herein, the V_{H} domain is a human V_{H} domain or a non-human V_{H} domain. The term “a human V_{H} domain” includes a V_{H} domain that is derived from or based on a human V_{H} domain amino acid or nucleic acid sequence. Thus, the term includes variable heavy chain regions derived from human germline immunoglobulin sequences. As used herein, the term human V_{H} domain includes V_{H} domains that are isolated from transgenic mice expressing human immunoglobulin V genes, in particular in response to an immunisation with an antigen of interest, for example as described in WO 2016/062990. Such domains are typically fully human. In one embodiment, a human V_{H} domain can also include a V_{H} domain that is derived from or based on a human V_{H} domain amino acid or nucleic acid sequence encoding such V_{H} domain. Thus, the term includes variable heavy chain regions derived from or encoded by human germline immunoglobulin sequences. A substantially human V_{H} domain or V_{H} domain that is derived from or based on a human V_{H} domain may include amino acid residues not encoded by human germline immunoglobulin sequences (e.g., mutations introduced in vitro, e.g., by random or site-specific mutagenesis, or introduced by somatic mutation in vivo). The term “human V_{H} domain” therefore also includes a substantially human V_{H} domain wherein one or more amino acid residue has been modified. For example, a substantially human V_{H} domain the V_{H} domain may include up to 10, for example 1, 2, 3, 4 or 5 amino acid modifications compared to a fully human sequence.

[0277] As used herein, the term VH, V_{H} or “variable domain” refers to immunoglobulin variable domains defined by Kabat et al., Sequences of Immunological Interest, 5^{th} ed., U.S. Dept. Health & Human Services, Washington, D.C. (1991). The numbering and positioning of CDR amino acid residues within the variable domains is in accordance with the well-known Kabat numbering convention.

[0278] In one aspect, the novel AABD of a SAR is a single variable heavy chain (VH) domain or a SVH domain. The term SVH domain as used herein refers to a single human VH domain antibody (VH sdAb). These terms are thus used interchangeably. The term SVH is also used interchangeably with independent vH domains or autonomous vH domains. The disclosure relates to the use of human, typically multiple human SVH domains as building blocks to make SARs.

[0279] The SVH domains are small molecules of 12-14 kDa which can be combined into different formats to give multivalent or multispecific antigen binding domains of a SAR. SVH domains are robust and are characterised by high affinity and stability in serum. SVH domains are also characterised by high solubility in serum and lack of aggregation.

[0280] Each single V_{H} domain (SVH) antibody comprises three CDRs and four FRs, arranged from amino-terminus to carboxy-terminus in the following order: FR1-CDR1-FR2-CDR2-FR3-CDR3-FR4. Thus, in one embodiment of the invention, the domain is a human variable heavy chain (V_{H}) domain with the following formula FR1-CDR1-FR2-CDR2-FR3-CDR3-FR4.

[0281] In an embodiment, the present disclosure provides single-chain and multi chain SARs (e.g., SIRs, cTCRs Ab-TCR, TCR, αβTFP, or γδTFP etc.) that can be constructed using SVH domains having a W103R substitution according to Kabat system. An exemplary SVH targeting CD19 with W103R substitution is CD19-FHVH-354 and is represented by SEQ ID NO (DNA): 836 and SEQ ID NO (PRT): 11526 (Table 5). Additional exemplary AABD comprising a SVH with a W103R substitution are listed in Table 5.

[0282] In another embodiment, the disclosure provides multichain SARs (e.g., SIRs, cTCRs Ab-TCR, αβTFP, γδTFP or recombinant TCR etc.) having bispecific, bivalent or biparatopic antigen binding moieties that comprise SVH domains having a W103R substitution according to Kabat system. Exemplary SARs targeting different antigens based on the SIR backbone and comprising CD19-FHVH-354 as one of the antigen binding domains are presented in Table 25.

[0283] In another embodiment, the present disclosure provides multichain SARs (e.g, SIRs, cTCRs Ab-TCR, αβTFP, γδTFP or recombinant TCR etc.) having multispecific, multiivalent or multiparatopic antigen binding moieties that comprise SVH domains having a W103R substitution according to Kabat system. Exemplary bispecific and trispecific SARs targeting different antigens based on the SIR, zSIR and Ab-TCR backbones and comprising CD19-FHVH-354 as one of the antigen binding domains are presented in Table 26. As AABD are modular in nature, the CD19-FHVH-354 can be substituted by other AABD targeting different antigens to develop SARs targeting those antigens.

[0284] In another embodiment, the present disclosure provides single chain SARs (e.g, CARs, TFPs etc.) having bispecific, bivalent or biparatopic antigen binding moieties that comprise SVH having a W103R substitution according to Kabat system. An exemplary single chain bispecific SAR targeting CD22 and CD 19 comprising CD22-FHVH-24 as one of the antigen binding domains is CD8SP-CD22-FHVH-24-G4Sx3-R1-hu-mROO5-1-vL-Gly-Ser-Linker-hu-mROO5-1-vH-Myc-28z (SEQ ID NO (DNA): 4118 and SEQ ID NO (PRT): 14808). In this SAR construct, the CD22-FHVH-24 is operably linked to the N-terminus of hu-mROO5-1 scFV via a Glycine-Serine (G4Sx3) linker. The scFV is fused in frame to a human CD28 hinge and transmembrane domain via a Myc linker. The SAR also carries a CD3z activation domain at its C-terminus. SARs with similar modular architecture are also within the scope of the present disclosure.

[0285] In another embodiment, the present disclosure provides single chain SARs (e.g, CARs, TFPs etc.) having multispecific, multiivalent or multiparatopic antigen binding moieties comprising SVH having a W103R substitution according to Kabat system.

[0286] In an embodiment, the present disclosure provides that single chain and multichain SARs can be constructed using SVH stabilized by the introduction of non-canonical cysteines, which are capable of forming disulfide bonds and/or form disulfide bridges under suitable conditions. An exemplary SVH comprising non-canonical cysteins is CEA-300-aVH and is provided in SEQ ID NO (DNA): 954 and SEQ ID NO (PRT): 11644. Additional exemplary such SVH are provided in WO2019149715, which is incorporated in its entirety by reference herein. An exemplary SAR incorporating CEA-300-aVH is represented by SEQ ID NO: 21956.

[0287] In one embodiment, the present disclosure is aimed at mitigating the shortcomings of existing adoptive cellular therapies by providing single chain SARs (e.g., CARs, TFPs etc.) comprising SVH where the SVH domains contains the substitution cysteines in positions (i) 52a and 71 or (ii) 33 and 52 according to Kabat numbering, wherein said cysteines are capable of forming a disulfide bond and/or form a disulfide bond under suitable conditions.

[0288] In an embodiment of the disclosure, the SVH domain used to make a SAR comprises a substitution selected from the group consisting of 44E, 45E, 45 R, (101-1)Y and 101D according to Kabat numbering. Particularly, the SVH comprises the substitutions 44E, 45E or 45R, (101-1)Y and 101D according to Kabat numbering. In an embodiment, the SVH domain comprises a substitution selected from the group consisting of G44E, T45E, T45 R, F(101-1)Y and A101D according to Kabat numbering. In an embodiment, the SVH domain comprises the substitutions G44E, T45E, T45 R, F(101-1)Y and A101D according to Kabat numbering.

[0289] In an embodiment of the disclosure, the SAR comprises an SVH with substitution selected from the group consisting of 44E, 45E and (101-1)Y according to Kabat numbering. In an embodiment, the SAR comprises an SVH domain with the substitutions 44E, 45E, and (101-1)Y according to Kabat numbering. In an embodiment, the SVH domain comprises a substitution selected from the group consisting of G44E, T45E and F(101-1)Y according to Kabat numbering, if present in the SVH domain. In an embodiment, the SAR comprises an SVH domain comprising the substitutions G44E, T45E, and F(101-1)Y according to Kabat numbering.

[0290] In an embodiment, the SVH domain of the SAR comprises a vH framework comprising a FR1, FR2, FR3 and FR4 with at least 85% sequence identity to the amino acid sequence of SEQ ID NOs: 21411, 21412, 21413 and 21414, respectively.

[0291] In an embodiment, the SVH domain of the SAR comprises a vH framework comprising a FR1, FR2, FR3 and FR4 with at least 85% sequence identity to the amino acid sequence of SEQ ID NO: 21415, 21416, 21417, and 21418, respectively.

[0292] In an embodiment, the SVH domain of the SAR comprises a vH framework comprising a FR1, FR2, FR3 and FR4 with at least 85% sequence identity to the amino acid sequence of SEQ ID NO: 21419, 21420, 21421, and 21422, respectively.

[0293] In an embodiment of the disclosure, the SVH domain of the SAR comprises a vH framework comprising a FR1, FR2, FR3 and FR4 with at least 85% sequence identity to the amino acid sequence of SEQ ID NO: 21423, 21424, 21425, and 21426, respectively.

[0294] In an embodiment of the disclosure, the SVH domain comprises a vH framework comprising a FR1, FR2, FR3 and FR4 with at least 85% sequence identity to the amino acid sequence of SEQ ID NO: 21427, 21428, 21429, and 21430, respectively.

[0295] In an embodiment of the disclosure, the SVH domain comprises a vH framework comprising a FR1, FR2, FR3 and FR4 with at least 85% sequence identity to the amino acid sequence of SEQ ID NO: 21431, 21432, 21433, and 21434, respectively.

[0296] In an embodiment, the SVH domain comprises a vH framework comprising a FR1, FR2, FR3 and FR4 with at least 85% sequence identity to the amino acid sequence of SEQ ID NO: 21435, 21436, 21437, and 21438, respectively.

[0297] In an embodiment, the SVH domain comprises a vH framework comprising a FR1, FR2, FR3 and FR4 with at least 85% sequence identity to the amino acid sequence of SEQ ID NO: 21439, 21440, 21441, and 21442, respectively.

[0298] The SVH domain is particularly useful for construction of a SAR, as FR1-4 according to SEQ ID NOs 21411-21442 are not immunogenic in humans.

[0299] The disclosure also relates to the use of human, typically multiple human SVH domains as building blocks to make SARs. The term SVH domain as used herein refers to a single human VH domain antibody (VH sdAb). These terms are thus used interchangeably. The term SVH is also used interchangeably with independent vH domains or autonomous vH domains. An SVH is a type of AABD.

[0300] The SVH domains are small molecules of 12-14 kDa which can be combined into different formats to give multivalent or multispecific antigen binding domains of a SAR. SVH domains are robust and are characterised by high affinity and stability in serum. SVH domains are also characterised by high solubility in serum and lack of aggregation.

[0301] In some embodiments, the SAR constructs described herein include a human SVH domain (typically multiple human SVH domains) that recognizes a target protein of interest, e.g., a protein expressed on a tumor cell, such as an antigen.

[0302] In some embodiments, the SAR constructs described herein include a human SVL domain (typically multiple human SVL domains) that recognizes a target protein of interest, e.g., a protein expressed on a tumor cell, such as an antigen. The term SVL domain as used herein refers to a single human VL domain antibody (VL sdAb). These terms are thus used interchangeably. The term SVL is also used interchangeably with independent vL domains or autonomous vL domains. An SVL is a type of AABD.

[0303] In one aspect, the AABD of a SAR is a camelid vHH domain. The disclosure also relates to a SAR comprising multiple vHH domains. The disclosure also relates to a SAR comprising humanized vHH domains. Exemplary vHH domains that can be used in the construction of the SAR of the disclosure and their target antigens are presented in Table 5.

[0304] In one aspect, the AABD of a SAR is a non-immunoglobulin antigen binding scaffold, such as DARPIN, an affibody, an affilin, an adnectin, an affitin, an obodies, a repebody, a fynomer, an alphabody, an avimer, an atrimer, a centyrin, a pronectin, an anticalin, a kunitz domain, an Armadillo repeat protein, D domain, or a fragment thereof. The disclosure also relates to a SAR comprising multiple non-immunoglobulin antigen binding scaffold. Exemplary non-immunoglobulin antigen binding scaffold that can be used in the construction of the SARs of the disclosure and their target antigens are presented in Table 7-9.

[0305] In one aspect, the AABD of a SAR is an adaptor binding domain (e.g., RZIP, EZIP, E4, K4, NKG2D-AF, NKG2D-YA, or D domain etc.). The disclosure also incudes SARs that bind to multiple adaptors. In an embodiment, an adaptor binding domain is a leucine zipper domain. In one aspect, the AABD of a SAR binds to an adaptor (e.g., RZIP, EZIP, E4, K4, D domain, Streptag, FITC, Biotin, ULBP2R, ULBP2-S3 etc.). It is understood by those skilled in the art that an adaptor and an adaptor binding protein can be substituted for each other. Thus, a SAR can comprise an RZIP module that binds to a SAR adaptor comprising an EZIP module. Alternatively, the SAR may comprise an EZIP module while the SAR adaptor may comprise an RZIP module. The disclosure also incudes SARs that bind to multiple adaptors. Exemplary adaptors and adaptor binding proteins are shown in Table 10.

[0306] In one aspect, the AABD of a SAR is the extracellular ligand-binding domain of a receptor or a fragment thereof. The disclosure also incudes SARs that comprise multiple extracellular ligand binding domains of receptors. Exemplary extracellular ligand-binding domains of receptors that can be used in the construction of a SAR are provided in Table 8.

[0307] In one aspect, the AABD of a SAR is the extracellular receptor-binding domain of a ligand or a cytokine or a fragment thereof. The disclosure also incudes SARs that comprise multiple extracellular receptor binding domains of ligands or cytokines. Exemplary extracellular receptor-binding domains of ligands or cytokines that can be used in the construction of a SAR are provided in Table 9.

[0308] In one aspect, the AABD of a SAR is an autoantigen. The disclosure also incudes SARs that comprise multiple auto-antigens. An exemplary auto-antigen that can be used in the construction of a SAR is Dsg3 (SEQ ID NO: 11687) or a fragment thereof.

[0309] In one aspect, the AABD of a SAR is a single variable domain of a T cell receptor (svd-TCR). The disclosure also incudes SARs that comprise multiple single variable domains of T cell receptors. Exemplary polynucleotides comprising svd-TCR domains are provided in SEQ ID NO (DNA): 21563-21564 and in WO2021030182 which is incorporated in its entirety by reference herein.

[0310] In one aspect, the AABD of a SAR is any protein that can bind to an antigen expressed on the surface of a cell.

[0311] The multiple AABD in a SAR could be present in different combinations (e.g., two Centyrins, one Centyrin and one vHH domain, vHH domain and a SVH domain and a Centyrin etc.)

[0312] In one aspect, the AABD of a SAR is a Centyrin. The disclosure also relates to a SAR comprising multiple Centyrins. In one aspect, the AABD of a SAR is a DARPINS. The present disclosure also relates to a SAR comprising multiple DARPINs. Similarly, the present disclosure relates to SARs containing multiple non-immunoglobulin antigen binding domains such as affibodies, affilins, adnectins, affitins, obodies, repebodies, fynomers, alphabodies, avimers, atrimers, pronectins, anticalins, kunitz domains, Armadillo repeat proteins.

[0313] In some embodiments, the SAR contains multiple AABDs. In an embodiment, the first AABD is linked to a second AABD, wherein the first and second AABD specifically bind antigens. In an embodiment, the antigens recognized by the SAR are peptide antigens that are bound to MHC complex. In some embodiments, the two or more AABD of a SAR recognize the same antigen. In other embodiments, the two or more AABD of the SAR recognize different antigens.

[0314] Whilst scFv typically used in SARs, such as 2^{nd} generation CARs, have the potential for unwanted aggregation, cluster formation and immunogenicity, the use of Autonomous Antigen Binding Domains (AABD) provides a stable format with substantially reduced potential for immunogenicity, non-specific-aggregation or unfolding. This is particularly useful when designing SARs having bispecific, bivalent or biparatopic antigen binding moieties. As demonstrated by the inventors herein, multiple AABD domains can readily be used in such mutimeric format thus facilitating the generation of multispecific SARs that enable simultaneous targeting of more than one target antigen or more than one epitope of an antigen.

[0315] In an embodiment, the disclosure provides a SAR that can target one or more than 1 antigen (e.g., 1, 2, 3, 4, 5, 6 or more antigens). In an embodiment, the disclosure provides a SAR that can target one or more than 1 epitope (e.g., 1, 2, 3, 4, 5, 6 or more epitopes). In an embodiment, the disclosure provides a SAR that comprise one or more than 1 antigen binding domains (e.g., 1, 2, 3, 4, 5, 6 or more antigen-binding domains).

[0316] In an embodiment, the disclosure provides a SAR that comprises one or more than one chain with each chain comprising zero, one or more antigen binding domains operably linked to a transmembrane domain, an optional activation domain and an optioinal co-stimulatory domain. In an embodiment, the activation domain encodes for one or more ITAM motifs.

[0317] In an embodiment, the disclosure provides a single chain SAR that comprises one or more antigen binding domains operably linked to a transmembrane domain, an activation domain and an optioinal co-stimulatory domain. In an embodiment, the activation domain encodes for one or more ITAM motifs. An exemplary such a SAR is a SAR represented with the backbone of 1^{st} generation CAR, 2^{nd} generation CAR, 3^{rd} generation CAR, or εTFP, γTFP, δTFP, or ζTFP. Exemplary such SARs are represented by SEQ ID NO (DNA): 4087, 4110-4113, 4118-4120, SEQ ID NO (PRT): 14777, 14800-14803 and14808-14810.

[0318] The disclosure also provides single chain SARs based on the 2^{nd} generation CAR, K13-CAR and TFP (e.g., TFPε, TFPγ, TFPδ) backbones (Table 33 and 34). The disclosure provides single chain SARs with the modular domain structure and architecture of an exemplary SAR on the backbone of a 2^{nd} generation CAR targeting BCMA and CD19 represented by CD8SP-BCMA-FHVH-93-SG4S-CD19-FHVH-354-Myc-28z (SEQ ID NO: 17667). Another exemplary SAR on the backbone of a 2^{nd} generation CAR targeting BCMA and CD19 is CD8SP-CD19-FHVH-354-SG4S-BCMA-FHVH-93-Myc-CD8TM-BBz (SEQ ID NO: 17669). Exemplary SARs on the backbones of TFPs targeting BCMA and CD19 are CD8SP-BCMA-FHVH-93-SG4S-CD19-FHVH-354-CD3e-ECDTMCP-opt2 (SEQ ID NO: 17696), CD8SP-BCMA-FHVH-93-SG4S-CD19-FHVH-354-CD3d-ECDTMCP-opt2 (SEQ ID NO: 17697), and CD8SP-BCMA-FHVH-93-SG4S-CD19-FHVH-354-CD3g-ECDTMCP-opt2 (SEQ ID NO: 17698). The disclosure provides single chain SARs with the modular domain structure and architecture of additional exemplary SARs on the backbones of TFPs targeting BCMA and CD19 as represented by SEQ ID NO: 17700- 17703.

[0319] The disclosure provides single chain SARs with the modular domain structure and architecture of exemplary SARs on the backbone of 2^{nd} generation CARs targeting CD20 and CD22 represented by CD8SP-CD20-vHH-USCl-2HC2D6-SG4S-CD22-USCl-FHVH-160-Myc-28z and CD8SP-CD22-USC1-FHVH-160-SG4S-CD20-vHH-USC1-2HC2D6-Myc-CD8TM-BBz, which are represented by SEQ ID NO: 17813 and 17815. The disclosure provides SARs with the modular domain structure and architecture of exemplary SAR on the backbone of a 1st generation CAR co-expressing K13 and targeting CD20 and CD22 represented by CD8SP-CD20-vHH-USCl-2HC2D6-SG4S-CD22-USCl-FHVH-160-Myc-CD8TM-z-P2A-K13-FLAG-T2A-PAC (SEQ ID NO: 17816). The disclosure provides SARs with the modular domain structure and architecture of exemplary SARs on the backbone of TFPs targeting CD20 and CD22 as represented by SEQ ID NO: 17842- 17849.

[0320] Exemplary SARs on the backbone of 2^{nd} generation CARs targeting BCMA and CD38 are CD8SP-BCMA-FHVH-74-SG4S-CD38-FHVH-USC1-32184-Myc-28z and CD8SP-CD38-FHVH-USC1-32184-SG4S-BCMA-FHVH-74-Myc-CD8TM-BBz and are represented by SEQ ID NO: 17886 and 17888. An exemplary SAR on the backbone of a 1st generation CAR co-expressing K13 and targeting BCMA and CD38 is CD8SP-BCMA-FHVH-74-[hTCRb-S57C]-F-P2A-SP-CD38-FHVH-USC1-32184-[hTCRa-T48C]-F-F2A-K13-opt (SEQ ID NO: 17893). Exemplary SARs on the backbone of TFPs targeting BCMA and CD38 are represented by SEQ ID NO: 17915-17922.

[0321] Exemplary SARs on the backbone of 2^{nd} generation CARs targeting CD20 and CD19 are CD8SP-CD20-vHH-USC1-2HC2D6-SG4S-CD19-FHVH-354-Myc-28z and CD8SP-CD20-vHH-USC1-2HC2D6-SG4S-CD19-FHVH-354-Myc-CD8TM-BBz and are represented by SEQ ID NO: 17959-17960. An exemplary SAR. on the backbone of a 1st generation CAR co-expressing K13 and targeting CD20 and CD19 is CD8SP-CD20-vHH-USC1-2HC2D6-SG4S-CD19-FHVH-354-Myc-CD8TM-z-P2A-K13-FLAG-T2A-PAC (SEQ ID NO: 17962). Exemplary SARs on the backbone of TFPs targeting BCMA and CD38 are represented by SEQ ID NO: 17988- 17995.

[0322] Exemplary SARs on the backbone of 2^{nd} generation CARs targeting CD22 and CEA are CD8SP-CD22-FHVH-24-SG4S-CEA-aVH-3001-Myc-28z and CD8SP-CD22-FHVH-24-SG4S-CEA-aVH-3001-Myc-CD8TM-BBz and are represented by SEQ ID NO: 17521-17522. An exemplary 1st generation CAR co-expressing K13 and an optional PAC module and targeting CD22 and CEA is CD8SP-CD22-FHVH-24-SG4S-CEA-aVH-3001-Myc-CD8TM-z-P2A-K13-FLAG-T2A-PAC (SEQ ID NO: 17524). Exemplary SARs on the backbone of TFPs targeting CD22 and CEA are represented by SEQ ID NO: 17550-17557.

[0323] An exemplary double chain SAR on the backbone of an AABD-TCR targeting CD20 and CD22 is CD8SP-CD20-vHH-USC1-2HC2D6-IgG1-Hinge-[TCRg-6MD]-F-P2ASP-CD22-USC1-FHVH-160-IgG1-Hinge-v2-[TCRd-6MD] and is represented by SEQ ID NO: 17883. Exemplary SARs on the backbone of AABD-TCRs targeting CD20 and CD22 are CD8SP-CD20-vHH-USC1-2HC2D6-[IgCL-TCRb-wt-opt2-6MD]-F-P2A-SP-CD22-USC1-FHVH-160-[IgG1-CH1-TCRa-wt-opt2-6MD] (SEQ ID NO: 17868) and CD8SP-CD20-vHH-USC1-2HC2D6-[1gCL-TCRg-6MD]-F-P2A-SP-CD22-USC1-FHVH-160-[IgG1-CH1-TCRd-6MD](SEQ ID NO: 17877). Exemplary SARs on the backbone of AABD-TCRs targeting BCMA and CD38 are CD8SP-BCMA-FHVH-74-[IgCL-TCRg-6MD]-F-P2A-SP-CD38-FHVH-USC1-32184-[IgG1-CH1-TCRd-6MD] and CD8SP-BCMA-FHVH-74-[ICL-TCRb-wt-opt2-6MD]-F-P2A-SP-CD38-FHVH-USC1-32184-[IgG1-CH1-TCRa-wt-op2-6MD] and are represented by SEQ ID NO: 17912 and 17914. Exemplary SARs on the backbone of AABD-TCRs targeting CD20 and CD19 are CD8SP-CD20-vHH-USC1-2HC2D6-[IgCL-TCRb-wt-opt2-6MD]-F-P2A-SP-CD19-FHVH-354-[IgG1-CH1-TCRa-wt-opt2-6MD] and CD8SP-CD20-vHH-USC1-2HC2D6-[IgCL-TCRg-6MD]-F-P2A-SP-CD19-FHVH-354-[IgG1-CH1-TCRd-6MD] and are represented by SEQ ID Nos: 18016 and 18023, respectively. As SARs are modular in nature, the AABD of the above SARs can be substituted with AABD targeting different antigens to develop SARs targeting those antigens. Table 33 provides the names, module composition and SEQ ID NOs of SARs targeting CD22 and PSMA. Table 34 provides the SEQ ID Nos of SARs generated from SARS listed in Table 33 by replacing the AABD targeting CD22 (i.e., CD22-FHVH-24) and PSMA (i.e., PSMA-chVH-71v2) with AABD targeting different antigens. Otherwise, the order of the constructs in Table 34 is the same as the order of the constructs in Table 33.

[0324] In an embodiment, the disclosure provides a synthetic antigen receptor, comprising (a) one or more antigen-specific targeting regions, (b) at least one extracellular linker domain, (c) at least one transmembrane domain, (d) an optional co-stimulatory domain and (e) an optional intracellular signaling domain, wherein one antigen-specific targeting region comprises an antigen-specific single chain Fv (scFv) fragment, and a second antigen specific targeting domain comprises an AABD. In an exemplary embodiment, the AABD is a non-scFv antigen binding module (e.g., a SVH, vHH, FHVH, SVL, svd-TCR, Centyrin, DARPIN, CD16A, CD64, CD32, NKG2D, NKG2D-AF, NKG2D-YA, RZIP, EZIP, E4, K4, D domain etc.).

[0325] In an embodiment, the disclosure provides a bispecific or a multispecific synthetic antigen receptor comprising (a) at least two antigen-specific targeting regions, (b) at least one extracellular linker domain, (c) at least one transmembrane domain, (d) an optional co-stimulatory domain and (e) an optional intracellular signaling domain, wherein one antigen-specific targeting region comprises an antigen-specific single chain Fv (scFv) fragment, and a second antigen specific targeting domain comprises an AABD. In an exemplary embodiment, the AABD is a non-scFv antigen binding module (e.g., a SVH, vHH, FHVH, SVL, svd-TCR, Centyrin, DARPIN, CD16A, CD64, CD32, NKG2D, NKG2D-AF, NKG2D-YA, RZIP, EZIP, E4, K4, D domain etc.). In an embodiment, the disclosure provides a bispecific or a multispecific synthetic antigen receptor having the general formula: (AABD)n-optional linker domain-scFv-hinge domain-transmembrane domain-optional one or more costimulatory domains-an activation domain; where n = 0, 1, 2, 3, 4, 5 or more and where the activation domain may contain one or more ITAM motifs. An exemplary such SAR is represented by IgSP-Apa-CD20-vHH-2HCD25-G4Sx3v2-hu-mROO5-1-vH-Gly-Ser-Linker-vL-Myc-CD8TM-BBz and has SEQ ID NO (DNA): 4087. This SAR has one antigen binding domain represented by humanized hu-mR005-1 scFv that targets CD19 and a second antigen binding domain represented by CD20-vHH-2HCD25 that targets CD20. The two antigen binding domains are linked via a Gly-Ser (G4Sx3v2) flexible linker. This SAR construct also comprise a Myc tag, a human CD8 hinge and transmembrane domain, a 4-1BB costimulatory domain and a CD3z activation domain. Other exemplary such constructs are represented by SARs with the backbone of 1^{st} generation CAR, 2^{nd} generation CAR, 3^{rd} generation CAR, or εTFP, yTFP, δTFP, or ζTFP. Exemplary such SARs are represented by SEQ ID NO (DNA): 4087, 4110-4113, 4118-4120, SEQ ID NO (PRT): 14777, 14800-14803 and14808-14810.

[0326] In an embodiment, the disclosure provides a SAR that comprises one or more than one chain with each chain comprising zero, one, two or more antigen binding domains operably linked to a transmembrane domain but lacking an activation domain. Although such a SAR lacks an activation domain of its own, it is capable of signal transduction by recruitment of a signaling module comprising protein(s) that encode an activation domain. An exemplary such a SAR is a SAR based on the backbone of a SIR, cTCR, Ab-TCR, TCR, αβTFP or γδTFP. In an exemplary embodiment, the disclosure provides a SAR in which one or more AABD are attached to the N-terminus or near the N-terminus of one or both chains of a SIR, cTCR, Ab-TCR, TCR, αβTFP or γδTFP. In an exemplary embodiment, the disclosure provides a SAR in which one or more AABD are attached to the N-terminus or near the N-terminus of the vL or vH fragments comprising one or both chains of a SIR, cTCR, Ab-TCR, αβTFP or γδTFP. In an exemplary embodiment, the disclosure provides a SAR in which one or more AABD are attached to the N-terminus or near the N-terminus of the Va, Vb, Vg or Vd fragments comprising one or both chains of a TCR. Exemplary such SARs are represented by SEQ ID NO (DNA): 4088-4098, 4107-4109, 4166, and 3500-3510 and SEQ ID NO: (PRT): 14778-14788, 14797-14799, 14856 and 14190-14200. Additional exemplary such SARs are presented in Tables 25-32. In an exemplary embodiment, the AABD is anon-scFv antigen binding module (e.g., a SVH, vHH, FHVH, SVL, svd-TCR, Centyrin, DARPIN, CD16A, CD64, CD32, NKG2D, NKG2D-AF, NKG2D-YA, RZIP, EZIP, E4, K4, D domain etc.).

[0327] In an embodiment, the disclosure provides a single chain, one and a half chain or double chain SAR comprising at least one chain that has the general formula: (AABD)n-optional linker domain-scFv-optional linker-TCR constant chain; where n = 0, 1, 2, 3, 4, 5 or more and where TCR constant chain represents the constant chain of TCRα, TCRβ1, TCRβ2, TCRγ, TCRδ, pre-TCRα or a mutant or a variant thereof. Exemplary such SARs are represented by SEQ ID NO (DNA): 4127 and 4128 and SEQ ID NO (PRT): 14817-14818. In an embodiment, the scFv is replaced by a single chain soluble TCR comprising the Va and Vb fragments of an αβTCR joined by a flexible linker or Vg and Vd fragments derived from a γδTCR joined via a flexible linker.

[0328] In an embodiment, the disclosure provides a one and a half chain SAR or a double chain SAR comprising one chain that has the general formula: (AABD)n-optional linker domain-scFv-optional linker-TCR constant chain; and the second chain that has the general formula (AABD)n-optional linker domain-TCR constant chain where n = 0, 1, 2, 3, 4, 5 or more and where TCR constant chain represents the constant chain of TCRα (Cα), TCRβ1 (Cβ1), TCRβ2 (Cβ2), TCRγ (Cy), TCRδ (Cδ) or pre-TCRα (pre-Cα) or a mutant or a variant thereof. In an embodiment, the two chains of the SAR comprise complementary TCR constant chains; i.e., Cα and Cβ, pretc.Rα and Cβ, or Cy and Cδ. The Cβ chain could represent either Cβ1 or Cβ2. Exemplary such SARs are represented by SEQ ID NO (DNA): 4127 and 4128 and SEQ ID NO (PRT): 14817-14818. In an embodiment, the scFv is replaced by a single chain soluble TCR.

[0329] In an embodiment, the disclosure provides a one and a half chain synthetic antigen receptor comprising two TCR constant chains or fragment thereof where one of the chains comprises an AABD joined via an optional linker to an antigen-specific single chain Fv (scFv) fragment, which in turn is joined to a TCR constant chain or fragment thereof, and the second chain comprises a complementary TCR constant chain of a fragment thereof. In an exemplary embodiment, the AABD is a non-scFv antigen binding module (e.g., a SVH, vHH, FHVH, SVL, svd-TCR, Centyrin, DARPIN, CD16A, CD64, CD32, NKG2D, NKG2D-AF, NKG2D-YA, RZIP, EZIP, E4, K4, D domain etc.). An exemplary such SAR is represented by CD8SP-MYC-[hTCRa-T48C-opt1]-F-F2A-SP-CD22-FHVH-24-G4Sx3-R1-hu-mR005-1-vL-Gly-Ser-Linker-hu-mROO5-1-vH-V5-[hTCRb-S57C-opt1]-F-P2A-PAC and has SEQ ID NO (DNA): 4128 and SEQ ID NO (PRT): 14818. This SAR has the backbone of a one and a half chain SIR (see WO2018102795) and comprises one chain encoding a MYC tag joined in frame to a mutated human TCRα constant chain (hTCRa-T48C-opt1; SEQ ID NO: 11738). The second chain of this SAR comprises one antigen binding domain represented by hu-mR005-1 scFv (SEQ ID NO (DNA): 633 and SEQ ID NO (PRT): 11323) that targets CD19 and a second AABD represented by the fully-human vH domain CD22-FHVH-24 that targets CD22 (SEQ ID NO (DNA): 843 and SEQ ID NO (PRT): 11533). The two antigen binding domains are linked via a Gly-Ser (G4Sx3) flexible linker. The hu-mR005-1 scFv is joined in frame to a mutated human TCRβ constant chain carrying a S57C mutation (hTCRb-S57C-opt1; SEQ ID NO (PRT): 11749) module via a V5 tag. The two chains are encoded by a single polynucleotide and are separated by a P2A cleavable linker. The SAR also encodes for a puromycin resistance gene (PAC), which is optional. Another such exemplary SAR construct is represented by CD8SP-V5-[hTCRb-KACIAH]-F-P2A-CD8SP-CD22-FHVH-24-G4Sx3-R1-hu-mR005-1-vL-Gly-Ser-Linker-hu-mR005-1-vH-Myc-[hTCRa-CSDVP]-F-F2A-PAC and is represented by SEQ ID NO (DNA): 4127 and SEQ ID NO (PRT): 14817. This SAR also has the backbone of a one and a half chain SIR (see WO2018102795) and comprises one chain encoding a V5 tag joined in frame to a mutated human TCRβ constant chain (hTCRb-KACIAH; SEQ ID NO: 11750). The second chain of this SAR comprises one antigen binding domain represented by hu-mR005-1 scFv that targets CD19 and a second antigen binding domain represented by CD22-FHVH-24 that targets CD22. The two antigen binding domains are linked via a Gly-Ser (G4Sx3) flexible linker. The humanized hu-mR005-1 scFv is joined in frame to a mutated human TCRα constant chain (hTCRa-CSDVP; SEQ ID NO: 11734) module via a Myc epitope tag.

[0330] In an embodiment, the disclosure provides a bispecific synthetic antigen receptor, comprising (a) at least two antigen-specific targeting regions, (b) at least one extracellular linker domain, (c) at least one transmembrane domain, (d) an optional co-stimulatory domain and (e) an optional intracellular signaling domain, wherein the antigen specific targeting domains comprise AABD. In an exemplary embodiment, both AABDs are non-scFv antigen binding modules (e.g., a SVH, vHH, FHVH, SVL, svd-TCR, Centyrin, DARPIN, CD16A, CD64, CD32, NKG2D, NKG2D-AF, NKG2D-YA, RZIP, EZIP, E4, K4, and D domain etc.). An exemplary such SAR is CD8SP-CD22-FHVH-24-SG4S-PSMA-chVH-71v2-Myc-CD8TM-BBz-T2A-PAC (SEQ ID NO: 6464) and comprises a CD8 signal peptide, a CD22 targeting fully human vH domain (FVHV), a Ser-Glyx4-Ser linker, a PSMA targeting single vH domain, a Myc tag, a CD8 hinge and transmembrane region, a 4-1BB costimulatory domain and a CD3 activation domain.

[0331] In an embodiment, the disclosure provides a single chain, one and a half chain or double chain SAR comprising at least one chain that has the general formula: (AABD)n-optional linker domain-vL or vH fragment-optional linker-TCR constant chain; where n = 0, 1, 2, 3, 4, 5 or more and where TCR constant chain represents the constant chain of TCRα, TCRβ1, TCRβ2, TCRγ, TCRδ or pre-TCRα or a mutant or a variant thereof.

[0332] In an embodiment, the disclosure provides a double chain SAR comprising one chain with the general formula: (AABD)n-optional linker domain-vL fragment-optional linker-TCR constant chain; and the second chain with the general formula; (AABD)n-optional linker domain-vH fragment-optional linker-TCR constant chain where n = 0, 1, 2, 3, 4, 5 or more and where TCR constant chain represents the constant chain of TCRα (Cα), TCRβ1 (Cβ1), TCRβ2 (Cβ2), TCRy (Cy), TCRδ (Cδ) or pre-TCRα (pre-Cα) or a mutant or a variant thereof. In an embodiment, the two chains of the SAR comprise complementary TCR constant chains; i.e., Cα and Cβ, pretc.Rα and Cβ, or Cy and Cδ. The Cβ chain could represent either Cβ1 or Cβ2.

[0333] In an embodiment, the disclosure provides a double chain bispecific synthetic antigen receptor comprising two chains, each chain comprising (a) one or more antigen-specific targeting regions, (b) at least one extracellular linker domain, (c) at least one transmembrane domain, (d) an optional co-stimulatory domain and (e) an optional intracellular signaling domain, wherein one antigen-specific targeting region comprises a vL and/or a vH fragment that is capable of combining with the vH and/or vL fragment present on the second chain to create a fragment variable (Fv), and the second antigen specific targeting domain comprises an AABD (e.g., a vHH, SVH, Centyrin, affibody etc.). In one embodiment, the Fv binds an antigen. In another embodiment, the Fv does not bind an antigen. In an embodiment, the Fv serves as the scaffold for the attachment of the second antigen specific targeting domain comprising an AABD. In an embodiment, the AABD is a non-scFv antigen binding domain.

[0334] An exemplary double chain bispecific SAR comprising two chains is CD8SP-hu-mROO5-1-vL-[hTCRb-S57C]-F-P2A-IgSP-Apa-CD20-USC1-vHH-2HCD26-G4Sx3v2-hu-mR005-1-vH-[hTCRa-T48C] and is represented by SEQ ID NO (DNA): 7406 and SEQ ID NO (PRT): 18096. This SAR construct has the backbone of a SIR, which has been described in WO2018102795 and is incorporated in its entirety by reference herein. One chain of the SAR construct comprises the humanized hu-mR005-1 vL fragment fused to the constant chain of human TCRb carrying S57C mutation (hTCRb-S57C) and the other chain of the SAR comprises the humanized hu-mR005-1 vH fragment fused to the constant chain of human TCRa carrying the T48C mutation (hTCRa-T48C). The hu-mR005-1 vL and hu-mR005-1 vH fragments of the SAR together form a Fv targeting CD19. A vHH fragment targeting CD20 (CD20-USC1-vHH-2HCD26; SEQ ID NO: 841) is fused to the N-terminus of the hu-mR005-1 vH fragment via a Glycine-Serine linker. Thus, the SAR targets CD19 via the hu-mR005-1 Fv and targets CD20 via CD20-USC1-vHH-2HCD26. It is to be noted that SARs are modular in format. Therefore, it is possible to replace one module of a SAR with another module. For example, the hu-mR005-1 vL and hu-mR005-1 vH fragments can be replaced with vL/vH fragment targeting a different antigen. Table 25 provides the targeted antigens, name, nucleic acid SEQ ID NOs and amino acid SEQ ID NOs of several exemplary bispecific SARs on the SIR backbone comprising vL/vH fragments targeting different antigens and also comprising a SVH targeting CD19 (CD19-FHVH-354). In the SARs listed in Table 25, the vL fragment is operably linked to the hTCRb-S57C chain and the vH fragment is operably linked to the hTCRa-T48C chain. SARs can be constructed in which vL fragment is operably linked to the hTCRa-T48C chain hTCRb-S57C chain and the vH fragment is operably linked to the hTCRb-S57C chain. Exemplary such SAR constructs targeting different antigens are represented by SEQ ID NO (DNA): 2014-2177 and SEQ ID NO(PRT): 12704-12868. The order of vL/vH fragments of these constructs is the same as the order of the vL/vH fragments of the constructs shown in Table 25. Thus, the SAR construct with BCMA-J6M0 vL/vH fragments is the 8th construct in Table 25. Therefore, the nucleic acid and amino acid SEQ ID NO of the SAR construct CD8SP-CD19-FHVH-354-G4S3-BCMA-J6M0-vL-[hTCRa-T48C]-F-F2A-SP-BCMA-J6M0-vH-[hTCRb-S57C] with BCMA-J6M0 vL/vH fragments can be calculated to be 2021 (i.e., 2014+8) and 12711 (i.e., 12704+8), respectively. It is to be noted that since SARs are modular in format, the hTCRb-S57C chain can be replaced by a deletion mutant and/or variant as long as it retains its biological activity (e.g., ability to associate with the TCRa chain and/or the TCR/CD3 complex and/or induce antigen dependent T cell signaling). The nucleic acid and amino acid SEQ ID NOs of exemplary deletion mutants and variants of TCRb chain are listed in Table 12 (e.g., SEQ ID NO(DNA): 1056-1076 and SEQ ID NO(DNA):1114-1127). Similarly, the hTCRa-T48C chain can be replaced by a deletion mutant and/or variant as long as it retains its biological activity (e.g., ability to associate with the TCRb chain and/or the TCR/CD3 complex and/or induce antigen dependent T cell signaling). The nucleic acid and amino acid SEQ ID NOs of exemplary deletion mutants and variants of TCRa chain are listed in Table 12 (e.g., SEQ ID NO (DNA): 1042-1052 and SEQ ID NO (DNA):1103-1113).

[0335] The disclosure also describes novel deletion mutants of TCRa and TCRb chains that can be used in the construction of SIRs and bispecific/multispecific SARs. An exemplary SIR comprising the deletion mutants of TCRa and TCRb constant chain is CD8SP-hu-mROO5-1-vL-[hTCRb-S57C-opt-d17]-F-P2A-SP-hu-mROO5-1-vH-[hTCRa-T48C-opt-d17] and is represented by nucleic acid SEQ ID NO: 1331 and amino acid SEQ ID NO: 12021. The SIR/SAR constructs with deletion mutants of TCRa and TCRb chains are smaller in size and therefore have the advantage of increasing the titer of the lentiviral/retroviral vector encoding them since the titer of the lentiviral/retroviral vector is inversely proportion to the insert size.

[0336] The disclosure provides the targeted antigens, SAR name, module composition, DNA SEQ ID NOs and amino acid SEQ ID NOs of several exemplary bispecific and trispecific SARs on different backbones (i.e., having different TCR constant chains) and comprising vL/vH fragments targeting different antigens in Table 26. These SAR constructs comprise a fully human single vH domain (CD19-FHVH-354) targeting CD19 and/or a fully human single vH domain (CD22-FHVH-24) targeting CD22. The name and composition of the first construct of each series is shown in Table 26, which can be used to determine the TCR constant chain modules present in that series. For example, it can be determined from Table 26 that in the constructs represented by nucleic acid SEQ ID Nos: 2178-2343 the vL fragment is operably linked to the [hTCRbECD-CD3zECDTMCP-opt] module while the vH fragment is operably linked to the [hTCRaECD-CD3zECDTMCP-opt2] module. As the order of the different construct in this series is the same as the order of the construct of the series shown in Table 25, the vL/vH fragment of the different constructs in this series can be determined from the construct with the same vL/vH fragment in Table 25. A similar approach can be used to determine the SEQ ID NOs of other constructs carrying different vL/vH fragments of the series listed in Table 26 by referring to Table 25. Other SARs that are based on the modular architecture of the SARs described in Tables 25-26 are also within the scope of this disclosure.

[0337] The nucleic acid and amino acid SEQ IDs of exemplary bispecific and trispecific SARs based on the vL and vH fragments derived from FMC63 scFv and carrying different TCR constant chains are provided in Tables 26. The nucleic acid and amino acid SEQ IDs of exemplary bispecific and trispecific SARs based on the vL and vH fragments derived from other scFv fragments can be derived by replacing the vL and vH fragments of FMC63 scFv with the vL and vH fragments comprising the SARs listed in Table 25. The order of the SAR constructs comprising different vL/vH fragments in Table 26 is same as the order of SARs shown in Table 25 for SARs.

[0338] Another exemplary double chain bispecific SAR comprising two chains is CD8SP-hu-mROO5-1-vL-[IgCL-TCRg-6MD]-F-P2A-IgSP-Apa-CD20-vHH-2HCD25-G4Sx3v2-hu-mROO5-1-vH-[IgG1-CH1-TCRd-6MD] and represented by SEQ ID NO (DNA): 5037 and SEQ ID NO (PRT): 15727. In this SAR construct one chain of the SAR comprises the hu-mR005-1 vL fragment fused to the truncated constant chain of human TCRg (TCRg-6MD) via an IgCL linker and the other chain of the SAR comprises hu-mR005-1 vH fragment fused to the truncated constant chain of human TCRd (TCRd-6MD) via an IgG1-CH1 linker. The hu-mR005-1 vL and hu-mR005-1 vH fragments of the SAR collectively form a Fv targeting CD19. A vHH fragment targeting CD20 (CD20-vHH-2HCD25) is fused to the N-terminus of the hu-mR005-1 vH fragment via a Glycine-Serine linker. Thus, the SAR targets CD19 via the hu-mR005-1 Fv and targets CD20 via CD20-USC1-vHH-2HCD25. Table 26 provides the nucleic acid SEQ ID (2839-3003) and amino acid SEQ ID Nos (13529-13693) of several exemplary bispecific SARs in which the vL fragment is operably linked to the [IgCL-TCRg-6MD] module and vH fragment is operably linked to the [IgG1-CH1-TCRd-6MD] modules and comprising vL/vH fragments targeting different antigens. These SAR constructs also comprise a SVH targeting CD19 (CD19-FHVH-354). As the order of the different construct in this series is the same as the order of the construct of the series shown in Table 25, the vL/vH fragment of the different constructs in this series can be determined from the construct with the identical vL/vH fragment listed in Table 25. As SARs are modular in format, it is possible to replace one module with another or its variant as long as the functional activity of SAR (i.e., ability to bind to its target antigen, ability to induce T cell signaling upon antigen binding, ability to assemble into TCR/CD3 complex etc.) is retained. Thus, in an exemplary embodiment, the vL fragment of the SAR is operably linked to [IgG1-CH1-TCRd-6MD] module or its variant and the vH fragment is operably linked to [IgCL-TCRg-6MD] module or its variants. The IgCL and IgG1-CH1 linkers can be replaced with other linkers as long as the functional activity of SAR (i.e., ability to bind to its target antigen, ability to induce T cell signaling upon antigen binding, ability to assemble into TCR/CD3 complex etc.) is retained. Exemplary such linkers are provided in Table 13. In the preferred embodiment, one chain of the bispecific SAR comprises IgCL (SEQ ID NO:11832) or its variant while the complementary chain comprises the linker represented by SEQ ID NOs:11833-11847. Table 13 also lists the components of TCR constant chains that can serve as linkers in the construction of SAR. Exemplary linkers based on TCRa/TCRα constant chain are represented by SEQ ID NO: 11848-11849, 11857-11859. Exemplary linkers based on TCRb/TCRβ constant chain are represented by SEQ ID NO: 11850-11851, 11856, 11860-11861. Exemplary linkers based on TCRg/TCRγ constant chain are represented by SEQ ID NO: 11852-11853, 11862, 11863. Exemplary linkers based on TCRd/TCRδ constant chain are represented by SEQ ID NO: 11854-11855, 11862, 11864-11865. In an embodiment, one chain of a double chain SAR comprises a linker based on TCRa chain while the other chain comprises a linker based on TCRb chain. In another embodiment, one chain of a double chain SAR comprises a linker based on TCRg/TCRγ chain while the other chain comprises a linker based on TCRd/TCRδ chain. In an embodiment, one chain of a double chain SAR comprises a linker based on TCRa chain while the other chain comprises a linker based on IgCL (SEQ ID NO:11832). Other linkers based on immunoglobulin like modules are known in the art and can be used in alternate embodiment of the disclosure. Finally, in addition to the TCR chains and module, the CD20-vHH-2HCD25 fragment can be replaced with another AABD targeting a different antigen or a different epitope of CD20. Exemplary AABD are provided in Tables 5, 7-10. Additional AABD (e.g., vHH, SVH, Centyrins etc.) targeting different antigens are known in the art.

[0339] An exemplary double chain bispecific SAR comprising two chains is CD8SP-hu-mROO5-1-vL-[IgCL-TCRb-wt-opt2-6MD]-F-P2A-IgSP-Apa-CD20-vHH-2HCD25-G4Sx3v2-hu-mR005-1-vH-[IgG1-CH1-TCRa-wt-op2-6MD] and represented by DNA SEQ ID NO: 5039 and PRT SEQ ID NO: 15729. This SAR is similar to the SAR construct CD8SP-hu-mROO5-1-vL-[IgCL-TCRg-6MD]-F-P2A-IgSP-Apa-CD20-vHH-2HCD25-G4Sx3v2-hu-mROO5-1-vH-[IgG1-CH1-TCRd-6MD] represented by SEQ ID NO (DNA): 5037 and SEQ ID NO (PRT): 15727 except that TCRg-MD and TCRd-MD modules are replaced by (TCRb-wt-opt2-6MD; SEQ ID NO: 1126) and (TCRa-wt-op2-6MD; SEQ ID NO: 1112) modules, respectively. Thus, the SAR targets CD19 via the hu-mR005-1 Fv and targets CD20 via CD20-USC1-vHH-2HCD25. Table 26 provides the DNA SEQ ID (3169-3333) and amino acid SEQ ID NOs (13859-14023) of several exemplary bispecific SARs in which the vL fragment is operably linked to the [TCRb-wt-opt2-6MD] module and vH fragment is operably linked to the [TCRa-wt-op2-6MD] modules and comprising vL/vH fragments targeting different antigens. These SARs also comprise a SVH targeting CD19 (CD19-FHVH-354; SEQ ID NO: 836). As the order of the different construct in this series is the same as the order of the construct of the series shown in Table 25, the vL/vH fragment of the different constructs in this series can be determined from the construct with the same vL/vH fragment listed in Table 25. As SARs are modular in format, it is possible to replace one module with another or its variant as long as the functional activity of SAR is retained. Thus, in an exemplary embodiment, the vL fragment of the SAR is operably linked to [TCRa-wt-op2-6MD] module or its variant and the vH fragment is operably linked to [TCRb-wt-opt2-6MD] module or its variants. Similarly, the CD20-vHH-2HCD25 fragment can be replaced with another AABD targeting a different antigen or a different epitope of CD20. Exemplary AABD are provided in Tables 5, 7-10. Additional AABD (e.g., vHH, SVH, Centyrins etc.) targeting different antigens are known in the art.

[0340] Another exemplary double chain bispecific SAR comprising two chains is CD8SP-CD38-USC1-FHVH-32184-G4Sx3-R1-hu-mROO5-1-vL-[hTCRb-S57C]-F-P2A-SP-hu-mROO5-1-vH-[hTCRa-T48C] and is represented by DNA SEQ ID NO: 7405 and PRT SEQ ID NO: 18095. This SAR construct has the backbone of a SIR. The hu-mR005-1 vL and hu-mR005-1 vH fragments of the SAR dimerize to form a Fv targeting CD19. An SVH fragment targeting CD38 (CD38-USC1-FHVH-32184) is fused to the N-terminus of the hu-mR005-1 vL fragment via a Glycine-Serine linker. Thus, the SAR targets CD19 via the hu-mR005-1 Fv and targets CD38 via CD38-USC1-FHVH-32184.

[0341] Another exemplary double chain trispecific SAR comprising two chains is CD8SP-CD38-USC1-FHVH-32184-G4Sx3-R1-hu-mROO5-1-vL-[hTCRb-S57C]-F-P2A-IgSP-Apa-CD20-USC1-vHH-2HCD26-G4Sx3v2-hu-mROO5-1-vH-[hTCRa-T48C] and is represented by DNA SEQ ID NO: 7408 and PRT SEQ ID NO: 18098. This SAR construct has the backbone of a SIR. The hu-mR005-1 vL and hu-mR005-1 vH fragments of the SIR dimerize to form a Fv targeting CD19. An SVH fragment targeting CD38 (CD38-USC1-FHVH-32184) is fused to the N-terminus of the hu-mR005-1 vL fragment via a Glycine-Serine linker. A vHH fragment targeting CD20 (CD20-USC1-vHH-2HCD26) is fused to the N-terminus of the hu-mR005-1 vH fragment via a Glycine-Serine linker. Thus, the SAR targets CD19 via the hu-mR005-1 Fv and targets CD38 via CD38-USC1-FHVH-32184 and targets CD20 via CD20-USC1-vHH-2HCD26. Another exemplary trispecific SAR construct with a similar format is CD8SP-CD19-FHVH-354-G4S3-FMC63-vL-[hTCRb-S57C-opt]-F-P2A-SP-CD22-FHVH-24-FMC63-vH-[hTCRa-T48C-opt] and is represented by SEQ ID NO (DNA):2344 and SEQ ID NO (PRT): 13034, respectively. Additional SARs of this format in which the vL/vH of FMC63 are replaced by vL/vH fragments derived from other scFv and targeting different antigens are provided in Table 26 (SEQ ID NO: 2344-2508 and 13034-13198). The vL/vH fragments of these constructs can be determined from their SEQ ID Nos. by examination of Table 25 as the order of vL/vH fragments of these constructs is same as the order of the vL/vH fragments of constructs in Table 25. As discussed above, the TCR constant chains of these constructs can be replaced with other TCR constant chains described in Table 12 or their deletion mutants and functional variants as long as the functional activity of SAR (i.e., ability to bind to its target antigen, ability to induce T cell signaling upon antigen binding, ability to assemble into TCR/CD3 complex etc.) is retained. An exemplary SAR containing deletion mutants of TCRa and TCRb constant chains is CD8SP-CD38-USC1-FHVH-32184-G4Sx3-R1-hu-mROO5-1-vL-[hTCRb-S57C-opt-del17]-F-P2A-IgSP-Apa-CD20-USC1-vHH-2HCD26-G4Sx3v2-hu-mROO5-1-vH-[hTCRa-T48C-opt-del17] and is represented by nucleic acid SEQ ID NO: 1332 and amino acid SEQ ID NO: 12022. The SAR constructs with deletion mutants of TCRa and TCRb chains are smaller in size and therefore have the advantage of increasing the titer of the lentiviral/retroviral vector encoding them since the titer of the lentiviral/retroviral vector is inversely proportion to the insert size. Finally, in addition to the TCR chains and module, the CD38-USC1-FHVH-32184 and CD20-USC1-vHH-2HCD26 fragments can be replaced with other AABD targeting different antigens or epitope. Exemplary AABD are provided in Tables 5, 7-10. Additional AABD (e.g., vHH, SVH, Centyrins etc.) targeting different antigens are known in the art.

[0342] An exemplary double chain trispecific SAR comprising two chains is CD8SP-hu-mR005-1-vL-[hTCRb-S57C]-F-P2A-IgSP-CD22-USC1-FHVH-160-G4Sx2-CD20-USC1-vHH-2HCD26-G4Sx3v2-hu-mROO5-1-vH-[hTCRa-T48C] and is represented by DNA SEQ ID NO: 7407 and PRT SEQ ID NO: 18097. This SAR construct has the backbone of a SIR. The hu-mR005-1 vL and hu-mR005-1 vH fragments of the SIR dimerize to form a Fv targeting CD19. A vHH fragment targeting CD20 (CD20-USC1-vHH-2HCD26) is fused to the N-terminus of the hu-mR005-1 vH fragment via a Glycine-Serine linker. Further, an SVH fragment targeting CD22 (CD22-USC1-FHVH-160) is fused to the N-terminus of the CD20 vHH fragment via another Glycine-Serine Linker. Thus, the SAR targets CD19 via the hu-mR005-1 Fv, targets CD20 via CD22-USC1-FHVH-160 and targets CD20 via CD20-USC1-vHH-2HCD26. As SARs are modular in format, the TCR chains can be replaced by other TCR chains or their variants, AABD can be replaced by other AABDs or their variants and vL/vH fragments replaced by other vL/vH fragments or their variants.

[0343] An exemplary double chain tetra-specific SAR comprising two chains is CD8SP-BCMA-FHVH-33-G3Sx2-CD38-FHVH-309021-G4Sx3-R1-hu-mROO5-1-vL-[hTCRb-S57C]-F-P2A-IgSP-Apa-CD20-vHH-2HCD25-G4Sx3v2-hu-mROO5-1-vH-[hTCRa-T48C] and is represented by DNA SEQ ID NO: 5362 and PRT SEQ ID NO: 16052. This SAR construct has the backbone of a SIR. The hu-mR005-1 vL and hu-mR005-1 vH fragments of the SIR dimerize to form a Fv targeting CD19. A vHH fragment targeting CD20 (CD20-vHH-2HCD25; SEQ ID NO: 835) is fused to the N-terminus of the hu-mR005-1 vH fragment via a Glycine-Serine linker. An SVH fragment targeting CD38 (CD38-FHVH-309021; SEQ ID NO: 846) is fused to the N-terminus of the hu-mROO5-1-vL fragment via a Glycine-Serine Linker. A SVH targeting BCMA (BCMA-FHVH-33; SEQ ID N O: 856) is fused to the N-terminus of the CD38-FHVH-309021 fragment via another Glycine-Serine Linker. Thus, the SAR targets CD19 via the hu-mR005-1 Fv, targets CD20 via CD20-vHH-2HCD25, and targets CD38 via CD38-FHVH-309021 and targets BCMA via BCMA-FHVH-33. As SARs are modular in format, the TCR chains can be replaced by other TCR chains or their variants, AABD can be replaced by other AABDs or their variants and vL/vH fragments replaced by other vL/vH fragments or their variants.

[0344] An exemplary double chain penta-specific SAR comprising two chains is CD8SP-BCMA-FHVH-33-G3Sx2-CD38-FHVH-309021-G4Sx3-R1-hu-mROO5-1-vL-[hTCRb-S57C]-F-P2A-IgSP-CD22-FHVH-158-G4Sx2-CD20-vHH-2HCD25-G4Sx3v2-hu-mROO5-1-vH-[hTCRa-T48C] and is represented by DNA SEQ ID NO: 5437 and PRT SEQ ID NO: 16127. This SAR construct resembles the construct represented by DNA SEQ ID NO: 5362 and PRT SEQ ID NO: 16052 but has in addition an SVH fragment targeting CD22 (CD22-FHVH-158; SEQ ID NO: 848) fused to the N-terminus of the CD20-vHH-2HCD25 fragment via a Glycine-Serine Linker. Thus, the SAR targets CD19 via the hu-mR005-1 Fv, targets CD20 via CD20-vHH-2HCD25, and targets CD38 via CD38-FHVH-309021 and targets BCMA via BCMA-FHVH-33. As SARs are modular in format, the TCR chains can be replaced by other TCR chains or their variants, AABD can be replaced by other AABDs or their variants and vL/vH fragments replaced by other vL/vH fragments or their variants. The vL/vH fragments comprising the SAR can be fully-human, humanized, chimeric or non-human in origin.

[0345] In the preceding examples, the bi-specific and multispecific SAR backbone comprises of vL and vH fragments to which one or more AABDs are operably linked. The disclosure also describes SARs whose backbone are comprised of variable fragments (ValVb or Vg/Vd) derived from TCRs.

[0346] In an embodiment, the disclosure provides a single chain, one and a half chain or double chain SAR comprising at least one chain that has the general formula: (AABD)n-optional linker domain-a TCR variable fragment-optional linker-TCR constant chain; where n = 0, 1, 2, 3, 4, 5 or more and where TCR variable fragment represents Va, Vb, Vg or Vd, and where TCR constant chain represents the constant chain of TCRα, TCRβ1, TCRβ2, TCRy, TCRδ or pre-TCRα or a mutant or a variant thereof. In an exemplary embodiment, the AABD is a non-scFv antigen binding module (e.g., a SVH, vHH, FHVH, SVL, svd-TCR, Centyrin, DARPIN, CD16A, CD64, CD32, NKG2D, NKG2D-AF, NKG2D-YA, RZIP, EZIP, E4, K4, D domain etc.).

[0347] In an embodiment, the disclosure provides a double chain SAR comprising one chain with the general formula: (AABD)n-optional linker domain-Va fragment-optional linker-TCR constant chain; and the second chain with the general formula; (AABD)n-optional linker domain-Vb fragment-optional linker-TCR constant chain where n = 0, 1, 2, 3, 4, 5 or more and where TCR constant chain represents the constant chain of TCRα (Cα), TCRβ1 (Cβ1), TCRβ2 (Cβ2), TCRγ (Cγ), TCRδ (Cδ) or pre-TCRα (pre-Cα) or a mutant or a variant thereof. In an embodiment, the two chains of the SAR comprise complementary TCR constant chains; i.e., Cα and Cβ, pretc.Rα and Cβ, or Cγ and Cδ. The Cβ chain could represent either Cβ1 or Cβ2.

[0348] In an embodiment, the disclosure provides a double chain SAR comprising one chain with the general formula: (AABD)n-optional linker domain-Vg fragment-optional linker-TCR constant chain; and the second chain with the general formula; (AABD)n-optional linker domain-Vd fragment-optional linker-TCR constant chain where n = 0, 1, 2, 3, 4, 5 or more and where TCR constant chain represents the constant chain of TCRα (Cα), TCRβ1 (Cβ1), TCRβ2 (Cβ2), TCRγ (Cγ), TCRδ (Cδ) or pre-TCRα (pre-Cα) or a mutant or a variant thereof. In an embodiment, the two chains of the SAR comprise complementary TCR constant chains; i.e., Cα and Cβ, pretc.Rα and Cβ, or Cγ and Cδ. The Cβ chain could represent either Cβ1 or Cβ2.

[0349] An exemplary SAR in which the AABD is operably linked to the Va and/or Vb chain is CD8SP-MC7G5-Vb-[hTCRb-S57C]-F-P2A-IgSP-Apa-CD20-vHH-2HCD25-G4Sx3v2-MC7G5-Va-[hTCRa-T48C]-F-F2A-PAC and is represented by nucleic acid SEQ ID NO: 3502 and amino acid SEQ ID NO: 14192. This SAR construct has the MC7G5-Vb fragment fused to the constant chain of human TCRb carrying S57C mutation (hTCRb-S57C) and the MC7G5-Va fragment fused to the constant chain of human TCRa carrying the T48C mutation (hTCRa-T48C). The MC7G5-Va and MC7G5-Vb fragments of the SAR bind to MR1. A vHH fragment targeting CD20 (CD20-vHH-2HCD25) is fused to the N-terminus of the MC7G5-Va fragment via a Glycine-Serine linker (G4Sx3v2). Thus, the SAR targets MR1 via the MC7G5 Va/Vb fragments and targets CD20 via CD20-vHH-2HCD25.

[0350] An exemplary SAR based on the backbone of a γδ TCR is CD8SP-BCMA-FHVH-93-G4S-TCR-Vg9-F-P2A-IgHSP-CD20-vHH2-HCD25-G4S-TCR-Vd2-F-F2A-PAC (SEQ ID NO: 22201). This SAR has the backbone of a Vγ9/Vδ2 TCR. The Vγ9/Vδ2 T cells represent a minor and unconventional constituent of the leukocyte population in peripheral blood (0.5-5%), yet they are assumed to play an early and essential role in sensing ‘danger’ by invading pathogens. They recognize the same small microbial compound (E)-4-hydroxy-3-methyl-but-2-enyl pyrophosphate (HMB-PP), a natural intermediate of the non-mevalonate pathway of isopentenyl pyrophosphate (IPP) biosynthesis. The above SAR on Vγ9/Vδ2 backbone can also recognize BCMA through a BCMA-FHVH-93 that is attached to the N-terminus of Vg9 variable domain via a G4S linker and recognize CD20 through CD20-vHH2-HCD25 that is attached to the N-terminus of Vd2 variable domain. Additional SAR based on Vγ9/Vδ2 can be constructed by substituting the BCMA-FHVH-93 and CD20-vHH2-HCD25 with antigen binding domains (e.g., AABD) binding other antigens. Exemplary SAR based on Vγ9/Vδ2 can be also constructed by replacing the MC.7.G5 (MC7G5) Va and Vb domains of SARs with SEQ ID NO: 3500-3595 with Vγ9/Vδ2 variable domains.

[0351] The disclosure also describes SARs in which the vL and/or vH fragments of the SARs described in the preceding section are replaced with the Va and/or Vb fragments derived from T cell receptors (TCR). Several exemplary bispecific and trispecific SARs based on Va and Vb fragments of a TCR (MC7G5) directed against MIR1, a monomorphic MHC class I-related protein (MR1), as the backbone and carrying AABD targeting CD19 and/or CD20 are provided in Table 27. The composition of these SARs can be determined from their name. Additional SARs based on TCRs are listed in Table 28. Other SARs that are based on the modular architecture of the SARs described in Tables 27-28 are also within the scope of this disclosure.

[0352] The disclosure also provides exemplary SARs in which one or more AABDs are operably linked to the N-terminus or near the N-terminus of the variable fragment (e.g., Va, Vb, Vg or Vd) derived from a TCR. An exemplary such SAR construct is CD8SP-Sph-CD19-vHH-048-G4Sx3-R1-MC7G5-Vb-[hTCRb-S57C]-F-P2A-SP-MC7G5-Va-[hTCRa-T48C] and is represented by nucleic acid SEQ ID NO: 3535 and amino acid SEQ ID NO: 14225. An exemplary trispecific SAR based on MC7G5 backbone is CD8SP-Sph-CD19-vHH-048-G4Sx3-R1-MC7G5-Vb-[hTCRb-S57C]-F-P2A-IgSP-Apa-CD20-vHH-2HCD25-G4Sx3v2-MC7G5-Va-[hTCRa-T48C] and is represented by nucleic acid SEQ ID NO: 3578 and amino acid SEQ ID NO: 14268.

[0353] Several exemplary bispecific and trispecific SARs based on Va and Vb fragments of a TCR (MC7G5) directed against MIR1, a monomorphic MHC class I-related protein (MR1), as the backbone and carrying AABD targeting CD19 and/or CD20 are provided in Table 27. The compositions of these SARs can be determined from their name. It is possible to replace one module of these SARs with another module. The modules that can be replaced include the Va/Vb fragments, the TCR constant chains (i.e., hTCRb-S57C and hTCRa-T48C) as well as the AABD (i.e., CD20-vHH-2HCD25). Additional SARs based on different TCR variable domains, TCR constant chains and AABD are listed in Table 28. The SARs in which the Va/Vb fragment of the MC7G5-based SARs listed in Table 27 are replaced by ValVb derived from a TCR targeting CMV-pp65-derived peptide (SEQ ID NO: 21452) in complex with HLA-A2 are represented by nucleic acid SEQ ID NO: 3891-3988 and amino acid SEQ ID NO: 14581-14678, respectively (Table 28). Similarly, the exemplary SARs in which the Va/Vb fragment of the MC7G5-based SARs listed in Table 27 are replaced by Va/Vb derived from a TCR targeting NYESO-1-derived peptide (SEQ ID NO: 21461) in complex with HLA-A2 are represented by nucleic acid SEQ ID NO: 3989-4086 and amino acid SEQ ID NO: 14679-14776, respectively (Table 28). The order of these constructs is similar to the order of the MC7G5 based constructs listed in Table 27.

[0354] The disclosur also provides SARs encoding SAR polypeptides in which one chain comprises a variable fragment derived from an antibody (e.g., vL or a vH) and the second chain comprises a variable fragment derived from a TCR (e.g., Va, Vb, Vg or a Vd). Exemplary such SAR polypeptides are represented by SEQ ID NO (PRT): 23020 and 23021. The variable fragments derived from antibodies and TCRs in such a SAR may serve as scaffold for the attachment of one or more AABDs.

[0355] In an embodiment, the disclosure provides a single chain, one and a half chain or double chain SAR comprising at least one chain that has the general formula: (AABD)n-optional -linker-TCR constant chain; where n = 0, 1, 2, 3, 4, 5 or more and where TCR constant chain represents the constant chain of TCRα, TCRβ1, TCRβ2, TCRγ, TCRδ or pre-TCRα or a mutant or a variant thereof. In an embodiment, the linker is an Ig linker domain (e.g., IgCL, IgG1-CH1 etc.). Exemplary Ig (or Ig like) linker domains are presented in Table 13. In an exemplary embodiment, the AABD is a non-scFv antigen binding module (e.g., a SVH, vHH, FHVH, SVL, svd-TCR, Centyrin, DARPIN, CD16A, CD64, CD32, NKG2D, NKG2D-AF, NKG2D-YA, RZIP, EZIP, E4, K4, D domain etc.). In an exemplary embodiment, the AABD is an adaptor binding domain.

[0356] In an embodiment, the disclosure provides a double chain SAR comprising one chain with the general formula: (AABD)n-Ig linker domain-TCR constant chain; and the second chain with the general formula; (AABD)n-Ig linker domains -TCR constant chain where n = 0, 1, 2, 3, 4, 5 or more and where TCR constant chain represents the constant chain of TCRα (Cα), TCRβ1 (Cβ1), TCRβ2 (Cβ2), TCRγ (Cγ), TCRδ (Cδ) or pre-TCRα (pre-Cα) or a mutant or a variant thereof. In an embodiment, the two chains of the SAR comprise complementary TCR constant chains; e.g., Cα and Cβ, pretc.Rα and Cβ, or Cγ and Cδ. The Cβ chain could represent either Cβ1 or Cβ2. In an embodiment, the two chains of the SAR comprise complementary Ig linker domains; e.g., IgCL and IgG1-CH1, IgCL and IgG2-0C-CH1, or IgCL (SEQ ID NO: 11832) and IgG4-CH1 (SEQ ID NO: 11842) etc. In an embodiment, one chain fo the SAR comprises IgCL linker domain (SEQ ID NO (DNA): 1142 and SEQ ID NO (PRT): 11832) and the second chain of the SAR comprises the IgG1-CH1 linker domain (SEQ ID NO (DNA): 1143 and SEQ ID NO (PRT): 11833). Additional Ig linker domains are presented in SEQ ID NO (DNA): 1149-1157 and SEQ ID NO (PRT): 11839-11847 (Table 13) and can substitute for IgG1-CHI linker domain. Finally, other Ig or Ig like linker domains are known in the art and can be used in alternate embodiments of the disclosure. In an exemplary embodiment, the AABD is a non-scFv antigen binding module (e.g., a SVH, vHH, FHVH, SVL, svd-TCR, Centyrin, DARPIN, CD16A, CD64, CD32, NKG2D, NKG2D-AF, NKG2D-YA, RZIP, EZIP, E4, K4, D domain etc.). In an exemplary embodiment, the AABD is an adaptor binding domain.

[0357] An exemplary SAR on the MC7G5 backbone in which the CD20-vHH-2HCD25 domain is replaced by the ligand binding domain of NKG2D (NKG2D-G4Sx3-NKG2D) is represented by CD8SP-MC7G5-Vb-[hTCRb-S57C]-F-P2A-IgSP-NKG2D-G4Sx3-NKG2D-G4Sx3v2-MC7G5-Va-[hTCRa-T48C] and has nucleic acid SEQ ID NO:3601 and amino acid SEQ ID NO: 14291. Other exemplary SARs in which the CD20-vHH-2HCD25 domain of SARs listed in Table 27 is replaced by the ligand binding domain of NKG2D are represented by nucleic acid SEQ ID NO: 3597-3694 and amino acid SEQ ID NO: 14287-14384 (Table 28). The order of these constructs is similar to the order of the CD20-vHH-2HCD25 containing constructs listed in Table 27. The SAR constructs comprising the ligand binding domain of NKG2D are able to bind to and respond to cells expressing NKG2D ligands, such as MICA and MICB.

[0358] Described herein are methods and compositions that provide improved safety and efficacy of SAR cells (e.g., SAR-T, SAR-NK, SAR-monocyte/macrophage cells etc.) by providing a universal approach for combinatorial, temporal, and logical control of multiple cell signaling pathways.

[0359] In one embodiment, specificity is enhanced by using SARs that can detect two or more antigens. The ability to sense more than two antigens can further improve tumor specificity. In addition, even when SAR T cells are on target, adverse side effects can still occur when over-activation of T cells leads to cytokine release syndrome. The disclosure provides useful designs and configuration for constructing SARs expressing Kill and ON switches to mitigate some of these side effects. Still, these switches serve mostly as master switches and consequentially lack fine control. Since control of natural immune cell activation is achieved through a balance of multiple co-stimulatory and co-inhibitory signaling pathways, strategies that provide tunable and temporal control over such signaling pathways are important for optimizing SAR-expressing cell (or SAR cell) performance. These challenges illustrate the need for intelligent controls of SAR cell response.

[0360] Universal CAR constructs comprising single chain chimeric receptors (e.g., 2^{nd} generation CAR) have been described that do not directly recognize the target antigen, but instead make contact to adaptor molecules (CAR-adaptors), that in turn bind to the target antigen. Such universal CAR or modular-CARs have been proposed as a potential solution to the problems facing the conventional CARs, such as tumor heterogeneity and antigen escape, toxicity, tonic signaling leading to exhaustion, and immunogenicity. Thus, the activity of a universal CAR-T cells is strictly dependent on the presence of the CAR-adaptors enabling the formation of an immunological synapse. Consequently, the formation of the synapse depends on the respective characteristics of the CAR-adaptors; the affinity of the CAR-adaptors for the tumor antigens, the affinity towards the chosen extracellular domain (ECD) of the universal CAR, the level of expression of the CAR, its half-life as well as its bio-distribution, are all important. As the next generation CAR constructs (e.g., SIR, cTCR, Ab-TCR, TFP and/or TCR etc.) differ from the 2^{nd} generation CARs in their level of expression and affinity for the target, the appropriate composition and configuration for the incorporation of adaptors into next generation CAR constructs is not known at the present. Similarly, the appropriate composition and configuration for incorporation of adaptors into multichain constructs (e.g., double chain SIR, cTCR, Ab-TCR, αβTFP, γδTFP or TCR) is not known. Finally, the appropriate composition and configuration for the incorporation of adaptors into next generation CAR constructs (e.g., SIR, cTCR, Ab-TCR, αβTFP, γδTFP or TCR etc.) with bispecific, biparatopic, multispecific and multi-paratopic properties is not known at the present.

[0361] Described herein are novel compositions, designs and configurations of universal SAR platforms with the ability to (a) serve as an ON/OFF switch, (b) sense multiple antigens and perform logic computations, and (c) independently regulate multiple signaling pathways, that will provide the necessary control for optimizing SAR cell therapy. The split, universal, programmable and reconfigurable UNI-SAR platforms described herein are used for this purpose. Importantly the UNI-SAR platforms can accommodate new targets without further manipulation to patients’ immune cells. In an embodiment, the UNI-SAR platform is a two-component receptor system composed of a universal receptor expressed on the immune cells (e.g., T cell, NK cells, NKT cells, monocytes etc.) and a tumor-targeting antigen binding adaptor (SAR-Adaptor). In an embodiment, the universal receptor is generated from the fusion of an AABD, scFv or Fv, comprising an adaptor binding domain to a signaling chain that is either capable of initiating a cell signal or recruits one or more signaling chains that are capable of initiating a cell signal. The SAR-adaptor molecule is generated from the fusion of an adaptor (e.g., leucine zipper domain, e.g., RZIP, EZIP etc.) to an antigen binding moiety (e.g., scFv, vHH, FHVH, Centyrin etc.). The antigen binding moiety of the SAR adaptor binds to the antigen and the adaptor (e.g., leucine zipper domain, e.g., RZIP) binds and activates the UNI-SAR on the immune cells. This system also functions as a tunable switch with the SAR adaptor as a titratable inducer. However, unlike other existing split CAR systems, described herein are orthogonal UNI-SAR/SAR adaptor pairs, which permit control of multiple signaling pathways independently and performance of logic operations.

[0362] One limitation of the split and universal CARs described in the art is the need for repeated and/or continuous administration of the SAR adaptor to activate the CAR expressing cells, which leads to inconvenience, increased cost, infectious and allergic complications. Therefore, in some situations, it would be desirable to have a SAR construct that can bind to and target cells with its built-in constitutive unispecific, bispecific and/or multispecific targeting modules but has the added flexibility of targeting additional antigens (i.e., universal targeting capability) when used in combination with appropriate SAR adaptors comprising antigen binding domain(s) for those antigens.

[0363] The disclosure provides novel compositions, configurations and designs for a SAR, designated a UNICON-SAR, that has constitutive (or built-in) unispecific, bispecific and multi-specific targeting modules but in addition has one or more adaptor binding domains that also confer universal targeting properties when used in conjunction with an appropriate SAR-adaptor. In an exemplary embodiment, is provided a SAR that can constitutively bind and target cells expressing CD19, CD19 and CD20, CD19, CD20 and BCMA, or CD19, CD20 and PSMA but also comprises one or more adaptor binding domains that allows it to be redirected to Her2-expressing cell in the presence of a Her2 antibody (e.g., Herceptin) or another SAR adaptor comprising a Her2 binding domain. In another exemplary embodiment, is provided a SAR that can constitutively bind and target cells expressing CD19, CD19 and CD22, CD19, CD22 and BCMA, or CD19, CD22 and Her2 but also comprises one or more adaptor binding domains that allows it to be redirected to CD20-expressing cell in the presence of a CD20 antibody (e.g., Rituximab) or another SAR adaptor comprising a CD20 binding domain. Exemplary such SARs are provided in SEQ ID NO: 22173 and 22176. The advantage of such UNICON-SAR expressing cells is that they are active against their target antigen expressing cells (e.g., cancer cells) constitutively through their built-in targeting modules but also have the flexibility of being redirected to additional antigens with the use of SAR adaptors, if and when needed. Thus UNICON-SAR design offers improved efficacy, multi-targeting, precision, flexibility, safety, convenience and economy. The UNISAR and UNICON-SAR platforms can be based on any of the adaptors described in this disclosure, including but not limited to leucine zippers (e.g., RZIP and EZIP), E4, K4, D domains, non-natural NKG2D based receptor-ligand pairs (e.g., NKG2D-YA) and Fc binding modules.

[0364] In one embodiment, the UNI-SAR platform uses leucine zipper as the extracellular portion of the SAR and various signaling chains. The cognate leucine zipper is fused to an antigen binding moiety (e.g., a specific scFv). The administration of the antibody/zipper fusion activates the T cells, and thus serves as an ON switch in a dose-dependent manner. Leucine zippers are a class of protein domain that can form heteromeric structures through charge interactions. Leucine zippers are beneficial for the UNI-SAR platform because many orthogonal pairs of leucine zippers are available, thus providing a large pool of candidates for design efforts. Leucine zipper domains can also be engineered to compete with each other for the same binding partner, thus allowing inhibition and “NOT” functionality. Moreover, we can utilize different affinities between leucine zipper pairs to engineer complex functions described in the art, such as OR, NEVIPLY, AND and XOR.

[0365] Each individual SAR can be readily paired to scFvs that target different antigens, thus allowing combinatorial and logical antigen sensing. In vitro characterization can map UNI-SAR and UNICON-SAR platforms responses (e.g., cytotoxicity, cytokine production, and memory T cell formation) to design parameters (e.g., zipSAR expression level, zipFv concentration, scFv affinity, and zipper affinity). The functionalities described herein can also be tested in vivo in mouse xenograft tumor models.

[0366] Current CAR designs have limited control and computing capabilities. These deficiencies render current CARs susceptible to dangerous over-activation and reduce CARs′ ability to distinguish tumor cells from healthy tissues. Described herein are compositions and designs to address the control and computing capability by using, e.g., the UNI-SAR and UNICON-SAR platforms to independently regulate multiple signaling pathways in T cells, which imparts logic and signaling mixer functions.

[0367] The methods and compositions provide advantages e.g., they provide the first function-rich, universal SAR platform featuring an ON/OFF switch, logical detection and integration, processing of >2 antigens, and independent regulation of different signaling pathways. These features have never been demonstrated together in a single system, and in particular, in the context of next generation CAR designs, such as SIR, Ab-TCR, and TFP. Further, such features have not been described for double chain next generation CARs, such as double chain SIR, double chain cTCR, double chain TCR, double chain Ab-TCR, double chain TCR and double chain AABD-TCR etc. In particular, provided herein is the first independent tuning of multiple signal pathways in T cells using SARs. The different parameters can affect a split, universal SAR system, which will be useful for designing titratable ON/OFF SAR switches. The UNISAR and UNICON-SAR designs described here can be used for the generation of the two-input Boolean logic gates with SARs, including OR, NDVIPLY, AND and XOR logic gates.

[0368] As used herein, “multi-component SAR” refers to a SAR comprising at least two separate polypeptides. In some embodiments, a multi-component SAR can comprise two, three, four, five, or more separate polypeptides. In some embodiments, the at least two separate polypeptides of a multi-component SAR each comprise a protein interaction domain that permits interaction, e.g., binding of the separate polypeptides. In some embodiments, at least one of the polypeptides of a multi-component SAR is an extracellular polypeptide, also known as SAR adaptor, having an antigen-binding domain but lacking a transmembrane domain and at least one of the polypeptides is a transmembrane polypeptide capable of transmitting a signal. In an embodiment, at least one of the transmembrane polypepides of a multi-component SAR either possesses an intracellular signaling domain or is capable of recruiting one or more proteins that possess an intracellular signaling domain. The transmembrane polypeptide of a multi-component SAR may have one or more antigen recognition domains at least one of which binds to the extracellular SAR adaptor that has an antigen-binding domain but lacking the transmembrane domain.

[0369] In one aspect of the embodiments, described herein is a multi-component chimeric antigen receptor (SAR); the multi-component SAR comprising: a) a first recognition polypeptide (or SAR adaptor) comprising 1) an antibody reagent specific for a first target antigen and 2) a protein interaction domain; and b) at least one signaling polypeptide comprising 1) an extracellular protein interaction domain that can bind specifically with the protein interaction domain of the first recognition polypeptide or the SAR adaptor and 2) at least one chain that either comprise an intracellular signaling domain or is capable of recruiting one or more proteins that comprise an intracellular signaling domain. In an embodiment, the intracellular signaling domain is an activation domain.

[0370] As used herein, “recognition polypeptide” or “SAR adaptor” or “adaptor” refers to an extracellular polypeptide having an antigen-binding domain. In some embodiments, the antigen-binding domain can be an antibody reagent (e.g., monoclonal antibody, scFv, camelid vHH domain, single domain antibody etc.) or a non-immunoglobulin antibody binding scaffold. In some embodiments, the recognition polypeptide can further comprise a protein interaction domain or an adaptor. Non-limiting examples of adaptors include RZIP, EZIP, E4, K4, D domains, NKG2D-YA, NKG2D-AF etc. In an embodiment, an antibody (e.g., Rituximab) can serve as a SAR adaptor when used in combination with a SAR expressing an Fc binding domain (e.g., CD16A, CD16-V158, CD32 or CD64 etc.).

[0371] As used herein, “signaling polypeptide” refers to a transmembrane polypeptide that either comprise an intracellular signaling domain or is capable of recruiting one or more proteins with an intracellular signaling domain. In some embodiments, the signaling polypeptide can further comprise a protein interaction domain. In some embodiments, the signaling polypeptide can further comprise an extracellular protein interaction domain (or an adaptor binding domain) that binds to the SAR adaptor.

[0372] As used herein, “protein interaction domain” refers to a domain that permits specific binding of two separate polypeptides to each other. A number of exemplary protein interaction domains, as well as pairs of protein interaction domains are provided elsewhere herein. In some embodiments, the protein interaction domains of the polypeptides of a multi-component SAR can bind specifically, e.g., one of the protein interaction domains can bind specifically to a second protein interaction domain of the multi-component SAR. In some embodiments, specific binding can occur when two separate protein interaction domains are present. In some embodiments, specific binding can occur when three or more separate protein interaction domains are present. Exemplary protein interaction domains are known in the art and can be used in embodiments of the aspects described herein.

[0373] In some embodiments of any of the aspects described herein, the protein interaction domains can be leucine zipper domains. Leucine zipper domains are a type of protein-protein interaction domain commonly found in transcription factors characterized by leucine residues evenly spaced through a a-helix. Leucine zippers may form heterodimers or homodimers. A number of leucine zipper domains, as well as their ability to bind each other, are known in the art and discussed further, e.g., in Reinke et al. JACS 2010 132:6025-31, Thomposon et al. ACS Synth Biol 2012 1: 118-129 and WO2017091546A1; each of which is incorporated by reference herein in its entirety. In some embodiments, one leucine zipper domain is RZIP and the second leucine zipper domain is EZIP.

[0374] In some embodiments, the protein interaction domain present on the extracellular protein is referred to as adaptor while the protein interaction domain present on the SAR is referred as adaptor binding domain. However, the two domains can be switched. Thus, in some embodiments, the extracellular polypeptide (i.e, SAR adaptor) may comprise an EZIP domain that interacts with the RZIP domain (i.e., adaptor binding domain) present on the transmembrane domain comprising signaling chain of the SAR. In other embodiments, the extracellular polypeptide (i.e, SAR adaptor) may comprise a RZIP domain that interacts with the EZIP domain (i.e., adaptor binding domain) present on the transmembrane domain comprising signaling chain of the SAR.

[0375] Further exemplary leucine zipper domains are described in Reinke et al. JACS 2010 132:6025-31; which is incorporated by reference herein in its entirety. For example, suitable leucine zipper domains can include SYNZIP 1 to SYNZIP 48, andBATF, FOS, ATF4, ATF3, BACH1, JUND, NFE2L3, and HEPTAD. Binding affinities of various combinations of these domains are described, e.g., at FIG. 1 of Reinke et al. In some embodiments, a suitable pair of leucine zipper domains has a dissociation constant (Kd) of 1000 nM or less. In some embodiments, a suitable pair of leucine zipper domains has a dissociation constant (Kd) of 100 nM or less. In some embodiments, a suitable pair of leucine zipper domains has a dissociation constant (Kd) of 10 nM or less. In some embodiments, a suitable pair of leucine zipper domains has a dissociation constant (Kd) of 1 nM or less.

[0376] Further exemplary pairs of protein interaction domains can include a) PSD95-Dlgl-zo-1 (PDZ) domains; b) a streptavidin domain and a streptavidin binding protein (SBP) domain; and c) a PYL domain and an ABI domain.

[0377] In some embodiments of any of the aspects described herein, the protein interaction domains can be chemically-induced protein interaction domains, e.g., domains that will only bind specifically in the presence of a third molecule, e.g., a small molecule or drug. Exemplary pairs of chemically-induced protein interaction domains can include: FKBP-binding domain of mTOR (FRB) and FK506 binding protein (FKBP) (binding of which is activated by tacrolimus, everolimus, or a rapalog); cyclophilin-Fas fusion protein (CyP-Fas) and FK506 binding protein (FKBP) (binding of which is activated by FKCsA); calcineurinA (CNA) and FK506 binding protein (FKBP) (binding of which is activated by FK506); gibberellin insensitive (GIA) and gibberellin insensitive dwarf1 (GID1) (binding of which is activated by gibberellin); Snap-tag and Halo tag (binding of which is activated by HaXS); and T14-3-3-cdeltaC and C-Terminal peptides of PMA2 (CT52) (binding of which is activated by fusicoccin). Further description of chemically-induced protein interaction domains can be found in the art, e.g., Miyamoto et al. Nat Chem Biol. 2012 Mar 25; 8(5): 465-470 and Belshaw et al. PNAS 1996 93 :4604-4607; each of which is incorporated herein by reference in its entirety.

[0378] In some embodiments of any of the aspects described herein, the protein interaction domains can comprise at least one nucleotide tag and at least one zinc finger domain. Zinc finger domains are characterized by the coordination of a zinc ion in order to stabilize their tertirary structure. The particular folds that appear in zinc fingers can vary. In some embodiments, a zinc finger domain can be a nucleotide-binding zinc finger domain. In some embodiments, a zinc finger domain can be a DNA-binding zinc finger domain. In some embodiments, the protein interaction domain of the recognition polypeptide is a nucleotide tag and the extracellular protein interaction domain of the signaling polypeptide is a zinc finger domain. In some embodiments, a nucleotide tag can be a DNA tag. In some embodiments, a nucleotide tag can be a dsDNA tag comprising the entire recognition sequence for the zinc finger domain being used. Exemplary zinc finger domains and their cognate nucleotide tags are described in the art, e.g., Mali et al. Nature Methods 2013 10:403-406; which is incorporated by reference herein in its entirety. In some embodiments, a zinc finger domain can be sZF15 as described in Mali et al. Nature Methods 2013 10:403-406.

[0379] In some aspects, the SAR of the disclosure includes an adaptor binding domain (e.g., a leucine zipper domain, e.g., RZIP or EZIP etc.) that allows it to bind to an extracellular polypeptide or SAR adaptor. The immune cells expressing such SAR constructs can be redirected to different target cells via the use of different SAR adaptors (i.e., different antigen binding domains (e.g., antibodies, antibody fragments, vHH, FHVH etc.) fused to the adaptors). Exemplary adaptors and adaptor binding domains are provided in Table 10. In an exemplary embodiment, a RZIP encoding SAR can be used in conjunction with an EZIP encoding polypeptide containing an antigen binding domain targeting CD19 to target a CD19-expressing cell.

[0380] Similarly, a SAR comprising an antigen binding domain targeting Streptag (SEQ ID NO: 1192) or FITC (e.g., SEQ ID NO: 1978-1979) can be used in combination with a Streptag-labelled or FITC-labelled antibody/antibody fragment to target an antigen bound by those antibodies/antibodies fragments. Other adaptors are known in the art (e.g., WO2019099440, WO2016154621, WO2016168766, WO2016168773, WO2018075807 and Diana Darowski et al, MABS, 2019, 11, 4, 621-631) and can be used in alternate embodiment of the disclosure.

[0381] The disclosure provides useful configuration and location for incorporation of adaptors comprising leucine zipper domains (e.g., RZIP, EZIP etc.) in a SAR. The disclosure provides useful configurations and locations for incorporation of multiple adaptors. The disclosure provides SAR constructs comprising 1, 2, 3 or more adaptors, e.g., adaptors comprising leucine zipper domains or other protein interaction domains described herein. In an embodiment, the SARs comprise two or more adaptors of the same type (e.g., 2 RZIP domains or 2 E4 domains). In other embodiments, the SARs comprise two or more adaptors of different types (e.g., 1 RZIP and 1 E4, or 1 EZIP and 1 D domain etc.).

[0382] The disclosure provides several configurations and architectures for construction of SARs with AABDs comprising one or more adaptor binding domain. A number of these configurations have been described in the preceding sections in the description of useful configurations for designing SARs incorporating different AABD. In an embodiment, the disclosure provides that a useful location for attachment of an adaptor binding domain (e.g., RZIP, EZIP, K4, E4, NKG2D-YA, NKG2D-AF, D domain etc.) to a SAR is at or near the N-terminus of one or more fragments comprising its antigen binding domain (e.g., vL, vH, scFv, AABD, vHH, FHVH, SVH, SVL, non-immunolgobulin antigen binding scaffold, Va, Vb, Vg, Vd, svd-TCR etc.) via an optional linker. In an embodiment, the SAR is a single chain SAR. In another embodiment, the SAR is a multi-chain SAR. In an embodiment, an optional linker is present between the adaptor binding domain of the SAR and one or more fragments comprising its antigen binding domain. In an embodiment, the disclosure provides that a useful location for attachment of an adaptor binding domain (e.g., RZIP, EZIP, K4, E4, NKG2D-YA, NKG2D-AF, D domain etc.) to a SAR is at the N-terminus or near the N-terminus of an Ig linker, an Ig like linker or a long linker (e.g. linker more than 25 amino acids in length) which, in turn, is attached to a signaling chain (e.g., connecting peptide of a TCRα, TCRβ, TCRγ, TCRδ etc.). The disclosure provides useful configuration and location for incorporation of adaptors comprising leucine zipper domains (e.g., RZIP, EZIP etc.) in a SAR. The disclosure also provides useful configurations and locations for incorporation of multiple adaptors binding domains. The disclosure provides SAR constructs comprising 1, 2, 3 or more adaptor binding domains, e.g., adaptor binding domains comprising leucine zipper domains, D domains or other protein interaction domains described herein. In an embodiment, the SARs comprise two or more adaptor binding domains of the same type (e.g., 2 RZIP domains or 2 E4 domains). In other embodiments, the SARs comprise two or more adaptor binding domains of different types (e.g., 1 RZIP and 1 E4, or 1 EZIP and 1 D domain etc.). In an embodiment, the two or more adaptor binding domains are located on the same polypeptide chain of the SAR. In an embodiment, the two or more adaptor binding domains are located on the same polypeptide chain of the SAR and are separated from each other by linkers. In exemplary embodiments, the linker can be a flexible linker (e.g., SEQ ID NO: 1024-1028) or protease cleavable linker (see Table 19). In an embodiment, the two or more adaptor binding domains are located on different polypeptide chains of a multi-chain SAR (e.g., a double chain SIR).

[0383] Exemplary SARs targeting EZIP and CD19 are represented by SEQ ID NO (DNA): 4341-4367. Exemplary SARs targeting EZIP, CD22 and CD19 are represented by SEQ ID NO (DNA): 4417-4463. These SAR constructs bind to EZIP domain via a RZIP domain (SEQ ID NO (DNA): 1014 and SEQ ID NO (PRT): 11704). The immune cells expressing these SARs can be used to target CD19 and/or CD22 expressing cells but can be redirected to target other antigens in combination with suitable antibody, antibody fragments and AABD (e.g., non-immunoglobulin antigen binding scaffolds) comprising a EZIP domain.

[0384] SARs can also be constructed by replacing the RZIP domain (SEQ ID NO (DNA): 1014 and SEQ ID NO (PRT): 11704) of the SARs in SEQ ID NO: 4341-4367 or 4417-4463 with an EZIP domain (SEQ ID NO (DNA): 1015 and SEQ ID NO (PRT): 11705). The immune cells expressing these SARs can be used to target CD19 and/or CD22 expressing cells but can be redirected to target other antigens in combination with suitable antibody, antibody fragments and AABD (e.g., non-immunoglobulin antigen binding scaffolds) comprising a RZIP domain.

[0385] An exemplary SAR on the MC7G5 backbone in which the CD20-vHH-2HCD25 domain is replaced by the adaptor-binding module RZIP is represented by CD8SP-MC7G5-Vb-[hTCRb-S57C]-F-P2A-IgSP-RZIP-G4Sx3v2-MC7G5-Va-[hTCRa-T48C] and has nucleic acid SEQ ID NO: 3699 and amino acid SEQ ID NO:14389. Other exemplary SARs in which the CD20-vHH-2HCD25 domain of SARs listed in Table 27 is replaced by a RZIP are represented by nucleic acid SEQ ID NO: 3695-3792 and amino acid SEQ ID NO:14385-14482 (Table 28). The order of these constructs is similar to the order of the CD20-vHH-2HCD25 containing constructs listed in Table 27. The RZIP containing constructs can be used as universal SARs to target different antigens when combined with antigen binding domains (e.g., scFv, FHVH, vHH, centyrins etc.) comprising EZIP modules that can bind to the RZIP module present on the SARs. Exemplary scFVs-EZIP fusion proteins targeting different antigens are represented by nucleic acid SEQ ID NO:1333-1521 and amino acid SEQ ID NO: 12023- 12111. These exemplary scFv-EZIP fusion proteins are based on scFv fragments presented by nucleic acid SEQ ID NO: 530-766 and amino acid SEQ ID NO: 11220-11456 (Table 3) and their target antigen can be determined from the target antigens of their scFvs as shown in Table 3. In an exemplary embodiment, the T cells expressing the SAR CD8SP-MC7G5-Vb-[hTCRb-S57C]-F-P2A-IgSP-Apa-RZIP-G4Sx3v2-MC7G5-Va-[hTCRa-T48C] can be directed to BCMA expressing myeloma cells by administering to the subject BCMA-J6M0-scFv-G4S-EZIP fusion protein represented by nucleic acid SEQ ID NO: 1336 and amino acid SEQ ID NO:12026. On the other hand, the T cells expressing the SAR CD8SP-MC7G5-Vb-[hTCRb-S57C]-F-P2A-IgSP-Apa-RZIP-G4Sx3v2-MC7G5-Va-[hTCRa-T48C] can be directed to CD19 expressing lymphoma cells by administering to the subject FMC63-scFv-G4S-EZIP fusion protein represented by nucleic acid SEQ ID NO: 1341 and amino acid SEQ ID NO:12031. Thus, T cells expressing SAR construct containing the RZIP module can serve as universal SAR-T cells that can be directed to different target antigens when combined with different scFv-EZIP fusion proteins targeting those antigens.

[0386] The RZIP containing SARs can be also used in combination with non-scFv based EZip fusion proteins. Exemplary non-scFv based EZip fusion proteins targeting different antigens are provided in nucleic acid SEQ ID NO:1522-1590 and amino acid SEQ ID NO:12212-12280. The antigen binding domains (e.g., VHH, SVH, Centyrins etc.) of these EZip fusion proteins is based on the antigen binding domains represented by SEQ ID NO; 834-902 and amino acid SEQ ID NO:11524 -11592 as shown in Table 5. Additional EZIP comprising fusion proteins and their method of use to redirect immune cells expresing RZIP comprising constructs is described in Cho et al, Cell 173, 1426-1438, 2018, which is incorporated in its entirety by reference herein.

[0387] A number of additional adaptor and adaptor binding modules are known in the art. Exemplary adaptors and adaptor binding modules are listed in Table 10. The disclosure provides that SAR constructs can be constructed by replacing the RZIP modules of the SARs described in the preceding examples with E4 (SEQ ID NO: 1016), NKG2D-AF (SEQ ID NO:1018), NKG2D-YA (SEQ ID NO:1019), NKG2D-AF-G4Sx3-NKG2D-AF (SEQ ID NO:1020), NKG2D-YA-G4Sx3-or NKG2D-YA (SEQ ID NO:1021). Similarly, the EZIP modules in the EZip fusion proteins described in the preceding examples can be replaced by K4 (SEQ ID NO: 1017), ULBP2R (SEQ ID NO: 1022) and ULBP2-S3 (SEQ ID NO: 1023).

[0388] In an exemplary embodiment, the SAR constructs comprising E4 modules can be used in combination with K4 containing SAR adaptors to target cells expressing the antigen targeted by the antigen binding domain (e.g., scFv, vHH, FHVH etc.) of the SAR adaptors. Exemplary SARs comprising E4 modules are presented in SEQ ID NO: 4468-4490 and 4544-4590. Exemplary SAR adaptors comprising scFv and vHH/FHVH attached to a K4 domain are presented in SEQ ID NO (PRT): 12281-12469 and 12470-12538, respectively and their target antigens can be determined from the target antigens of their scFvs and vHH/FHVH as shown in Table 3 and Table 5, respectively.

[0389] The location of the RZIP and EZIP modules can be switched so that the adaptor binding domain of the SAR may comprise an EZIP domain while the SAR adaptors may comprise a RZIP. Similarly, the location of the K4 and E4 domains can be switched between the SAR and the SAR adaptor.

[0390] The application WO2020159941, which is incorporated in its entirety by reference herein, describes modified, non-natural α1-α2 domains of NKG2D ligands (e.g., ULBP2R and ULBP2-S3) with attached polypeptides having specific target-binding properties, for example, antibodies or fragments of antibodies, that can be selectively delivered to CAR comprised of modified, non-natural NKG2D receptors (e.g., NKG2D-AF and NKG2D-YA) on engineered mammalian cells. However, the appropriate composition and configuration for the incorporation of non-natural NKG2D receptors into next generation CAR constructs (e.g., SIR, cTCR, Ab-TCR, TFP and/or TCR etc.) is not known.

[0391] In an embodiment, the disclosure provides a useful composition and configuration for SARs incorporating non-natural NKG2D receptors (e.g., NKG2D-AF and NKG2D-YA etc.). In an exemplary embodiment, the disclosure provides that the appropriate location for incorporation of a non-natural NKG2D receptor in a SAR is at or near the N-terminus of one or more fragments comprising its antigen binding domain (e.g., vL, vH, scFv, vHH, FHVH, SVH, SVL, non-immunolgobulin antigen binding scaffold, Va, Vb, Vg, Vd, svd-TCR etc.) via an optional linker. In an embodiment, the SAR has a single chain or more than one chain. In an embodiment, the disclosure provides that a useful location for the incorporation of a non-natural NKG2D receptor (NKG2D-YA, NKG2D-AF etc.) in a SAR is at the N-terminus or near the N-terminus of an Ig linker, an Ig like linker or a long linker (e.g., linker more than 25 amino acids in length) that in turn is attached to a signaling chain (e.g., connecting peptide of a TCRα, TCRβ, TCRγ, TCRδ etc.). The disclosure also provides useful configurations and locations for incorporation of multiple non-natural NKG2D receptors. The disclosure provides SAR constructs comprising 1, 2, 3 or more non-natural NKG2D receptor. In an embodiment, the SARs comprise two or more non-natural NKG2D receptor of the same type (e.g., 2 NKG2D-YA domains or 2 NKG2D-AF domains). In other embodiments, the SARs comprise two or more non-natural NKG2D receptors of different types (e.g., 1 NKG2D-AF and 1 NKG2D-AF etc.). In an embodiment, the two or more non-natural NKG2D receptor are located on the same polypeptide chain of the SAR. In an embodiment, the two or more non-natural NKG2D receptor are located on the same polypeptide chain of the SAR and are separated by linkers. In exemplary embodiments, the linkers can be flexible linkers (e.g., SEQ ID NO: 1024-1028) and/or protease cleavable linkers (see Table 19). In an embodiment, the two or more non-natural NKG2D receptor are located on different polypeptide chains of a multi-chain SAR (e.g., a double chain SIR).

[0392] In an exemplary embodiment, the SAR constructs comprising NKG2D-AF or NKG2D-AF-G4Sx3-NKG2D-AF modules can be used in conjunction with ULBP2R fusion proteins to target cells expressing the antigen targeted by the antigen binding domain (e.g., scFv, vHH, FHVH etc.) of the latter. An exemplary ULBP2R fusion protein targeting CD8SP-BCMA-FHVH93-GS-ULBP2R is represented by SEQ ID NO (DNA): 1013 and SEQ ID NO (PRT): 11703 and can be used to redirect a SAR comprising a NKG2D-AF or a NKG2D-AF-G4Sx3-NKG2D-AF module to BCMA expressing cells.

[0393] In another exemplary embodiment, the SAR constructs comprising NKG2D-YA or NKG2D-YA-G4Sx3-NKG2D-YA modules can be used in conjunction with ULBP2-S3 fusion proteins to target cells expressing the antigen targeted by the antigen binding domain (e.g., scFv, vHH, FHVH etc.) of the latter. An exemplary ULBP2-S3 fusion protein targeting CD8SP-BCMA-FHVH93-GS-ULBP2-S3 is represented by SEQ ID NO (DNA): 1041 and SEQ ID NO (PRT): 11731 and can be used to redirect a SAR comprising a NKG2D-YA or a NKG2D-YA-G4Sx3-NKG2D-YA module to BCMA expressing cells. In another exemplary embodiment, a SAR comprising NKG2D-YA is CD8SP-BCMA-FHVH93-G4S-EcoR1-humROO5-vL-IgCL-TCRb-ws2-opt-6MD-F-P2A-IgH-SP-NKG2D-YA-G4Sx3-NKG2D-YA-G4S-CD19-hu-mROO5-l-vH-IgGl-CHl-TCRa-wt2-opt-6MD-F-F2A-PAC (SEQ ID NO: 23102). The T cells expressing this SAR target BCMA and CD19 but can be directed to target PSMA expressing cells by exposure to the supernatant from cells expressing the construct CD8SP-PSMA-USC76-chVH-G4S-ULBP2-S3-G2S2-streptagII-F-P3A-EcoR1-hGlul-nonopt-T2A-eGFPter (SEQ ID NO: 23114) which comprises a PSMA targeting single chain vH in fusion with ULBP2. In an alternate embodiment, the disclosure provides a NK-G2D-YA-Cj4Sx3-NKG2D-YA encoding SAR (e.g., SEQ ID NO: 23102) that can be used in combination with a ULBP2-S3 encoding polypeptide (e.g., CD8SP-BCMA-FHVH93-GS-ULBP2-S3, SEQ ID NO: 11731) to target BCMA expressing cells. Methods to use NKG2D-AF, NKG2D-YA and other non-natural variants of NKG2D in combination with non-natutral NKG2D ligands (e.g., ULBP2R and ULBP2-S3) operably linked to heterologous proteins are described in WO20J 9191243 and WO2020159941, which are incorporated in their entirety by reference herein.

[0394] In an embodiment, the disclosure provides a useful composition and configuration for SAR incorporating D domains, which are derived from de novo-designed a-helical bundle, α3D. D domains are relatively small (approximately ⅓ the size of scFv), single-domain structures that lack disulfide bonds and N-linked glycosylation and can be engineered to minimize immunogenicity (Qin et al. Molecular Therapy 27, 7, 2019). In an embodiment, the disclosure provides that a useful location for attachment of a D domain to a SAR is at or near the N-terminus of one or more vL, vH, scFv, vHH, AABD, FHVH, SVH, SVL, non-immunolgobulin antigen binding scaffold, Va, Vb, Vg, Vd, svd-TCR fragments comprising the SAR via an optional linker. In an exemplary embodiment, the disclosure provides that the appropriate location for incorporation of a D domain in a SAR is at or near the N-terminus of one or more fragments comprising its antigen binding domain (e.g., vL, vH, scFv, vHH, FHVH, SVH, SVL, non-immunolgobulin antigen binding scaffold, Va, Vb, Vg, Vd, svd-TCR etc.) via an optional linker. In an embodiment, the SAR has a single chain or more than one chain. In an embodiment, the disclosure provides that a useful location for the attachment of a D domain followed by an optional linker in a SAR is at the N-terminus or near the N-terminus of an Ig linker, an Ig like linker or a long linker (e.g., linker more than 25 amino acids in length), which in turn is attached to a signaling chain (e.g., connecting peptide of a TCRα, TCRβ, TCRγ, TCRδ etc.). The disclosure also provides useful configurations and locations for incorporation of multiple D domains. The disclosure provides SAR constructs comprising 1, 2, 3 or more D domains. In an embodiment, the SARs comprise two or more adaptor binding domains comprising of D domains. In other embodiments, the SARs comprise two or more adaptor binding domains of different types (e.g., 1 D domain and 1 RZIP etc.). In an embodiment, the two or more D domains are located on the same polypeptide chain of the SAR. In an embodiment, the two or more D domains are located on the same polypeptide chain of the SAR and are separated by linkers. In exemplary embodiments, the linkers can be flexible linkers (e.g., SEQ ID NO: 1024-1028) and/or protease cleavable linkers (see Table 19). In an embodiment, the two or more D domains are located on different polypeptide chains of a multi-chain SAR (e.g., a double chain SIR).

[0395] In an exemplary embodiment, SAR comprising a D domain targeting p26 protein is CD8SP-Af03-G4S-EcoRI-hu-mROO5-vL-[hTCRb-S57C]-F-P2A-SP-CD19-hu-mROO5-1-vH-[hTCRa-T48C-opt]-F-F2A-PAC (SEQ ID NO: 23107). T cells expressing this SAR can be directed by target CD123 expressing cells by exposure to the SAR adaptor CD8SP-bc40-p26-CD123-cg06-GGS-Nluc-FlagX4-Streptag-GGS-8XHis-T2A-PAC (SEQ ID NO: 23120), which expresses p26 in fusion with a D domain targeting CD 123. Methods of using D domain containing proteins to target conventional CAR-T cells have been described in WO2019099440, which is incorporated in its entirety by reference herein.

[0396] Other SARs that are based on the modular architecture of the SARs comprising the adaptor binding domains described in the preceding sections are also within the scope of this disclosure.

[0397] In an alternate embodiment, the adaptor binding domain of a SAR may comprise of vL and vH fragments that combine to form an Fv. In an exemplary embodiment, a SAR targeting Streptag is represented by CD8SP-CD19-FHVH-354-G4S3-Streptag-vL-[hTCRb-S57C-opt]-F-112A-SP-Streptag-vH-IhTCRa-T48C-opt] (SEQ ID NO (DNA: 1992 and SEQ ID NO: (PRT): 12682). This SAR construct has the backbone of a SIR and comprises a vL and vH fragments targeting Streptag attached to [hTCRb-S57C-opt] and [hTCRa-T48C-opt] modules, respectively. This SAR construct also comprises an AABD (CD19-FHVH-354) targeting CD19 that is attached to the N-terminus of Streptag vL fragment via a G4S3 flexible linker. Thus, this SAR can target CD19 via the CD19-FHVH-354 domain but, in addition, can be redirected to a different antigen when used in combination with a SAR adaptor comprising an antigen binding moiety (e.g., antibody, antibody fragment, vHH, FHVH, non-immunoglobulin antigen binding scaffold etc.) tarageting the said antigen and comprising a Streptag. Exemplary SAR adaptors (e.g., scFv, vHH, etc.) targeting different antigens and comprising a Streptag are provided in Tables 21 and 22. In an exemplary embodiment, this SAR construct can also target BCMA expressing target cells in combination with a SAR adaptor targeting BCMA and carrying one or more Streptags. For example, a SAR adaptor targeting BCMA can be expressed in mammalian cells by the expression of constructs represented by SEQ ID NO: 1247, 1248, 1276 or 1277 and purified from the supernatant.

[0398] Exemplary SARs targeting FITC and CD19 are represented by SEQ ID NO: 1978-1979 (Table 25). The immune cells expressing these SARs can be used to target CD19 expressing cells but can, in addition, be directed to target other antigens by appropriate FITC-labelled antibodies, antibody fragments and AABDs (e.g., non-immunoglobulin antigen binding scaffolds).

[0399] SAR constructs can be constructed targeting GCN4 using vL, vH and scFv fragments targeting this protein as described in WO2018075807. Exemplary SAR constructs are provided in SEQ ID NO: 22603-22614. The immune cells expressing these SARs can be directed to target other antigens in combination with suitable antibodies or antibody fragments carrying GCN4 tags. Exemplary GCN4 tags are provided in SEQ ID NO (PRT): 21467-21470. Exemplary SAR adaptors comprising antigen binding moieties (e.g., scFv, vHH, FHVH etc.) comprising N-terminal GCN4 tags that can be used in conjunction with GCN4-targeted SARs to direct the SAR-expressing cells towards BCMA, PSMA, CD19, MUC16, IL13Ra2, CD19, CD123, MSLN, CD22, MPL (TPO-R), CD30, FLT3, CD33 and Her2 are provided in SEQ ID NO (PRT): 21471-21484, respectively. Additional exemplary antigen binding moieties comprising GCN4 tags and methods of their use are provided in WO2018075807, which is incorporated in its entirety by reference herein.

[0400] Other SARs that target Streptag, FITC, GCN4 or any other tag or label and are based on the modular architecture of the SARs described in the preceding section are also within the scope of this disclosure.

[0401] The disclosure also provides compositions and useful configurations for SAR that comprise an Fc binding module that is capable of binding to antibodies. An exemplary SAR on the MC7G5 backbone in which the CD20-vHH-2HCD25 domain is replaced by the Fc binding region of low affinity Fc receptor (CD16A-F158V or CD16A-V158) is represented by CD8SP-MC7G5-Vb-[hTCRb-S57C]-F-P2A-IgSP-Apa-CD16-V158-v2-G4Sx3v2 -MC7G5-Va-[hTCRa-T48C] and has nucleic acid SEQ ID NO:3797 and amino acid SEQ ID NO:14487. Other exemplary SARs in which the CD20-vHH-2HCD25 domain of SARs listed in Table 27 is replaced by the Fc binding portion of CD16A or its mutant (e.g., CD16-V158-v2) are represented by nucleic acid SEQ ID NO: 3793-3890 and amino acid SEQ ID NO: 14483-14580 (Table 28). The order of these constructs is similar to the order of the CD20-vHH-2HCD25 containing constructs listed in Table 27. The CD16A or CD16A-F158V (CD16A-V158) containing constructs can be used as universal SARs to target different antigens when combined with antigen binding domains (e.g., antibodies, antibody fragments, bispecific antibodies etc.) comprising Fc modules that can bind to the CD16-V158 module present on the SARs. Thus, the T cells expressing the SAR CD8SP-MC7G5-Vb-[hTCRb-S57C]-F-P2A-IgSP-Apa-CD16-V158-v2-G4Sx3v2-MC7G5-Va-[hTCRa-T48C] can be directed to CD20 expressing lymphoma cells by administering to the subject the CD20 monoclonal antibody Rituximab. On the other hand, the T cells expressing the SAR CD8SP-MC7G5-Vb-[hTCRb-S57C]-F-P2A-IgSP-Apa-CD16-V158-v2-G4Sx3v2-MC7G5-Va-[hTCRa-T48C] can be directed to Her2 expressing cancer cells by administering to the subject Herceptin. Thus, T cells expressing SAR construct containing the CD16-V158 module can serve as universal SAR-T cells that can be directed to different target antigens when combined with Fc module containing different antibodies or antibody fragments targeting those antigens. In an embodiment, a SAR may comprise one or two Fc binding modules, e.g., one or two Fc binding domains of CD16. In an embodiment, each chain of a double chain SAR comprises a CD16-V158 module. Other SARs that comprise Fc binding domain of CD16 and are based on the modular architecture of the SARs described in the preceding sections are also within the scope of this disclosure.

[0402] The disclosure also provides SARs that comprise one or more extracellular Fc binding domains derived from CD32 and CD64. Thus, the CD16A module of the construct with SEQ ID NO: SEQ ID NO:3797 can be replaced by the Fc binding module derived from CD32 to generate SARs that can bind to Fc domain of antibodies, antibody fragments, including bispecific and multispecific antibodies. Other SARs that comprise Fc binding domain of CD32 or CD64 and are based on the modular architecture of the SARs described in the preceding sections are also within the scope of this disclosure.

[0403] In an embodiment, the disclosure provides single chain, one-and a half chain, and double chain SARs with the backbone of an AABD-TCR comprising one or more adaptor binding domains that are operably attached to TCR constant chains via intervening Ig linkers. An exemplary such construct is CD8SP-RZIP-[IgCL-TCRb-wt-opt2-6MD]-F-P2A-SP-PSMA-chVH-71v2-[IgGl-CHl-TCRa-wt-opt2-6MD] (SEQ ID NO: 21609) that comprises a RZIP domain operably attached to truncated TCRb chain via an IgCL linker and a PSMA-targeted single vH domain (PSMA-chVH-71v2) operably attached to a truncated TCRa chainvia an IgG1-CH1 linker. In an exemplary embodiment, the T cells expressing this SAR construct can target PSMA expressing cells through PSMA-chVH-71v2 but can be redirected to also target BCMA expressing cells when exposed to BCMA-J6M0-scFv-G4S-EZIP fusion protein represented by nucleic acid SEQ ID NO: 1336 and amino acid SEQ ID NO:12026. In the construct CD8SP-RZIP-[IgCL-TCRb-wt-opt2-6MD]-F-P2A-SP-RZIP-[IgGl-CHl-TCRa-vvt-opt2-6MD] (SEQ ID NO: 21610), the PSMA-chVH-71v2 module is replaced by a second RZIP module. The constructs with SEQ ID NO: 21611 and 21622 are similar to the constructs with SEQ ID NO: 21609 and 21610 except that the RZIP module(s) are replaced by E4 module(s). The T cells expressing these SAR constructs can be redirected to different antigens upon exposure to K4 fusion polypeptide comprising different antigen binding domains. Similarly, the constructs with SEQ ID NO: 21613 and 21614 are similar to constructs with with SEQ ID NO: 21609 and 21610 except that the RZIP module(s) are replaced by NKG2D-AF, modules. The constructs with SEQ ID NO: 21615 and 21616 are similar to constructs with with SEQ ID NO: 21609 and 21610 except that the RZIP module(s) are replaced by CD16-V158 modules. The SAR constructs with SEQ ID NO: 21609 to 21616 are similar to the SAR constructs with SEQ ID NO: 21617 to 21624 except that the [IgCL-TCRb-wt-opt2-6MD] and [IgG1-CH1-TCRa-wt-opt2-6MD] modules are replaced by [IgCL-TCRg-6MD] and [IgCL-TCRd-6MD] modules. Other SARs that are based on the modular architecture of the AABD-TCR described in the preceding sections are also within the scope of this disclosure.

[0404] In an embodiment, the disclosure provides a double chain bispecific synthetic antigen receptor, comprising two chains each comprising (a) at least two antigen-specific targeting regions, (b) at least one extracellular linker domain, (c) at least one transmembrane domain, (d) an optional co-stimulatory domain and (e) an optional intracellular signaling domain, wherein one antigen-specific targeting region comprises a Va and/or a Vb fragment derived from a T cell receptor that is capable of dimerizing with the Vb and/or Va fragment present on the second chain, and the second antigen specific targeting domain comprises a AABD. In an embodiment, the AABD is a non-scFv antigen binding domain.

[0405] In an embodiment, the disclosure provides a double chain bispecific synthetic antigen receptor, comprising two chains each comprising (a) at least two antigen-specific targeting regions, (b) at least one extracellular linker domain, (c) at least one transmembrane domain, (d) an optional co-stimulatory domain and (e) an optional intracellular signaling domain, wherein one antigen-specific targeting region comprises a Vg and/or a Vd fragment derived from a T cell receptor that is capable of dimerizing with the Vg and/or Vd fragment present on the second chain, and the second antigen specific targeting domain comprises a AABD. In an embodiment, the AABD is a non-scFv antigen binding domain.

[0406] The disclosure also provides a useful configuration for making a SAR (e.g., a bispecific or multispecific SIR). In an embodiment, the disclosure provides a SAR (e.g., a bispecific or a multispecific SAR) comprising an AABD that is operably linked to the N-terminus or near the N-terminus of the vL and/or vH domains. In an embodiment, the disclosure provides a a SAR (e.g., a bispecific or a multispecific SAR) comprising an AABD that is operably linked to the N-terminus or near the N-terminus of the Va and/or Vb domains. In an embodiment, the disclosure provides a SAR (e.g., a bispecific or a multispecific SAR) comprising an AABD that is operably linked to the N-terminus or near the N-terminus of the Vg and/or Vd domains. In an embodiment, the disclosure provides a SAR (e.g., a bispecific or a multispecific SAR) comprising an AABD that is operably linked to the N-terminus or near the N-terminus of the vL, vH, Va, Vb, Vd, Vg fragments comprising a CAR (e.g., a 2nd-generation CAR, e.g., a BBz CAR), a SIR, a cTCR, an Ab-TCR, an αβTFP, a γδ TFP or a TCR via an optional linker.

[0407] The disclosure describes that a useful configuration for making a bispecific or multispecific CAR involves attachment of one or more AABDs (e.g., non-scFV based antigen binding domains) to the N-terminus or near the N-terminus of the vL and/or vH domains comprising the scFv of such a CAR via an optional linker. An exemplary bispecific SAR based on CAR backbone is CD8SP-CD19-vHH-048-G4Sx3-Rl-hu-mROO5-l-vL-Gly-Ser-Linker-hu-niRO05-1-vH-Myc-28z (SEQ ID NO: 4976).

[0408] The disclosure describes that a useful configuration for making a bispecific or multispecific SIR involves attachment of one or more AABDs (e.g., non-scFV based antigen binding domains) to the N-terminus or near the N-terminus of the vL and/or vH domains comprising the Fv of such a SIR via an optional linker. An exemplary bispecific SAR based on SIR backbone is CD8SP-CD19-vHH-048-G4Sx3-R1-hu-mROO5-1-vL-[hTCRb-S57C]-F-P2A-SP-hu-mROO5-1-vH-[hTCRa-T48C] (SEQ ID NO: 4981).

[0409] The disclosure describes that a useful configuration for making a bispecific or multispecific cTCR involves attachment of one or more AABDs (e.g., non-scFV based antigen binding domains) to the N-terminus or near the N-terminus of the vL and/or vH domains comprising the Fv of such a cTCR via an optional linker.

[0410] The disclosure describes that a useful configuration for making a bispecific or multispecific Ab-TCR involves attachment of one or more AABDs (e.g., non-scFV based antigen binding domains) to the N-terminus or near the N-terminus of the vL and/or vH domains comprising the Fv of such an Ab-TCR via an optional linker.

[0411] The disclosure describes that a useful configuration for making a bispecific or multispecific TFPε/TFPγ/TFPδ/TFPζ involves attachment of one or more AABDs (e.g., non-scFV based antigen binding domains) to the N-terminus or near the N-terminus of the vL and/or vH domains of such an TFP via an optional linker.

[0412] The disclosure also provides a useful configuration for making a SAR (e.g., a bispecific or multispecific SAR) comprising more than one (e.g., 2, 3, 4, 5 or more) AABDs. In an embodiment, the disclosure provides a SAR (e.g., a bispecific or a multispecific SAR) comprising an AABD that is operably linked to the N-terminus or near the N-terminus of another AABD via an optional linker.

[0413] In an embodiment, the disclosure provides a useful configuration for making bispecific and multispecific SARs that have a single chain (e.g., 1^{st} generation CAR, 2^{nd} generation CAR, vFLIP-CAR, TFPε, TFPy, TFPδ or TFPζ etc.), double chains (e.g., double chain SIR, double chain cTCR, double chain zSIR, double chain Ab-TCR, double chain TFP, double chain TCR etc.) or one and half chains (e.g., one and half chain cTCR or one and a half chain SIR). The names and SEQ ID NOs of exemplary bispecific and multispecific SARs on various backbones and comprising hu-mROO5-1 vL and vH fragments, BCMA-FHVH-33, CD22-FHVH-158, and/or CD19-vHH-048 are provided in Table 31. Exemplary SAR constructs in which the BCMA-FHVH-33, CD22-FHVH-158, and/or CD19-vHH-048 modules of constructs in Table 31 are replaced by other AABD modules are provided in Table 32. The order of the backbones used in constructs in Table 32 is same as the order of the backbones used in constructs in Table 31. In an embodiment, the SAR has the backbone of a CAR, e.g., a second generation CAR. An exemplary such single chain SAR with the backbone of a 2^{nd} generation CAR is CD8SP-BCMA-FHVH-33-G3Sx2-CD19-vHH-048-G4Sx3-R1-hu-mROO5-1-vL-Gly-Ser-Linker-hu-mROO5-1-vH-Myc-28z (SEQ ID NO: 5070). In an embodiment, the SAR has the backbone of a SIR, e.g., a double chain SIR or a a one and half chain chain. An exemplary such SAR with the backbone of a double chain SIR is represented by CD8SP-BCMA-FHVH-33-G3Sx2-CD19-vHH-048-G4Sx3-R1-hu-mR005-1-vL-[hTCRa-T48C]-F-P2A-SP-hu-mR005-1-vH-[hTCRb-S57C] (SEQ ID NO: 5077). An exemplary such SAR on the backbone of a one and a half chain SIR is CD8SP-V5-[hTCRb-KACIAH]-F-P2A-CD8 SP-BCMA-FHVH-33-G3 Sx2-CD 19-vHH-048-G4Sx3-Rl-hu-mROO5-1-vL-Gly-Ser-Linker-hu-mROO5-1-vH-Myc-[h TCRa-CSDVP|-F-F2A-PAC (SEQ ID NO: 5079). In an embodiment, the SAR has the backbone of a cTCR. In an embodiment, the SAR has the backbone of an Ab-TCR. Exemplary such SARs with the backbone of an Ab-TCR are CD8SP-BCMA-FHVH-33-G3Sx2-CD19-vHH-048-G4Sx3-R1-hu-mR005-1-vL-[IgCL- TCRg-6MD]-F -P2A-SP-hu-mR005-1-vH-[IgG l-CH1- TCRd-6MD] (SEQ ID NO: 5095) and CD8SP-BCMA-FHVH-33-G3Sx2-CD19-vHH-048-G4Sx3-R1-hu-mROO5-1-vL-[IgCL-TCRg-6MD]-F-P2A-SP-hu-mROO5-1-vH-[IgG1-CH1-TCRd-6MD] (SEQ ID NO: 5097). In an embodiment, the SAR has the backbone of a TFP. Exemplary SARs with the backbone of a TFP are represented by CD8SP-BCMA-FHVH-33-G3Sx2-CD19-vHH-048-G4Sx3-R1-hu-mROO5-1-(vL-vH)-CD3e-ECDTMCP-opt2 (SEQ ID NO: 5098), CD8SP-BCMA-FHVH-33-G3Sx2-CD19-vHH-048-G4Sx3-R1-hu-mROO5-1-(vL-vH)-CD3d-ECDTMCP-opt2 (SEQ ID NO: 5099), and CD8SP-BCMA-FHVH-33-G3Sx2-CD19-vHH-048-G4Sx3-R1-hu-mROO5-1-(vL-vH)-CD3g-ECDTMCP-opt2 (SEQ ID NO: 5100). In an embodiment, the AABD is a non-scFV based antigen binding domain. In an exemplary embodiment, the optional linker is a protease cleavable linker. Exemplary protease cleavable linkers are provided in Table 19. Exemplary AABD include but are not limited to a SVH domain, a vHH domain, and non-immunoglobulin antigen binding scaffold such as a DARPIN, an affibody, a ZIP domain (e.g., RZIP, EZIP, E4, R4 etc.), an affilin, an adnectin, an affitin, an obodies, a repebody, a fynomer, an alphabody, an avimer, an atrimer, a centyrin, a pronectin, an anticalin, a kunitz domain, an Armadillo repeat protein or a fragment thereof; a receptor (e.g., CD16-V158A, NKG2D), a ligand (e.g., APRIL, Thrombopoietin) and the like. In an exemplary embodiment, the AABD for incorporation into a SIR is a soluble domain, i.e., does not aggregate on expression in mammalian cells. In an exemplary embodiment, the AABD for incorporation into a SIR is efficiently secreted in the supernatant when expressed in mammalian cells with an N-terminal signal peptide.

[0414] The disclosure describes that a useful configuration for making a bispecific or multispecific zSIR (see WO2019232503, incorporated herein by reference) involves attachment of AABD to the N-terminus or near the N-terminus of the vL and/or vH domain of such a zSIR via an optional linker. In an embodiment, the AABD is a non-scFV based antigen binding domain. An exemplary SAR based on a zSIR backbone is CD8SP-hu-mROO5-l-vL-IgCL-CD3zECDTMCP-opt-F-P2A-Spe-IgSP-Apa-CD20-vHH-2HCD25-G4Sx3v2-hu-mR005-1-vH-IgGl-CH1-CD3zECDTMCP-opt2-F-F2A-PAC and is represented by nucleic acid SEQ ID NO: 5029 and amino acid SEQ ID NO: 15719. An exemplary multi-specific SAR based on zSIR backbone is CD8SP-BCMA-FHVH-33-G3Sx2-CD19-vHH-048-G4Sx3-R1-hu-mROO5-1-vL-IgCL-CD3zECDTMCP-opt-F-P2A-Spe-IgSP-Apa-CD20-vHH-2HCD25-G4Sx3v2-hu-mR005-1-vH-IgGl-CH1-CD3zECDTMCP-opt2-F-F2A-PAC and targets BCMA, CD19 and CD20. This SAR is represented by nucleic acid SEQ ID NO: 5122 and amino acid SEQ ID NO: 15812. As SARs are modular in nature, the different modules of this SAR can be replaced to target other antigen(s). Thus, SARs based on zSIR backbone and containing different vL/vH fragments targeting various antigens can be constructed. Similarly, SARs based on zSIR backbone in which the CD20-vHH-2HCD25 module is replaced by other AABD can be constructed to target different antigens. Finally, the linker domains (i.e., IgCL and IgG1-CH1) are optional and can be replaced with different linkers listed in Table 13 as long as the resulting SAR retains its functional properties (i.e., antigen binding, T cell signaling etc.).

[0415] The disclosure describes that a useful configuration for making a bispecific or multispecific cTCR involves attachment of AABD (e.g., non-scFV based antigen binding domains) to the N-terminus or near the N-terminus of the vL and/or vH domain of such a cTCR via an optional linker. In an exemplary embodiment, the optional linker is a protease cleavable linker.

[0416] The disclosure describes that a useful configuration for making a bispecific or multispecific Ab-TCR involves attachment of AABD (e.g., non-scFV based antigen binding domains) to the N-terminus or near the N-terminus of the vL and/or vH domain of such Ab-TCR via an optional linker. In an exemplary embodiment, the optional linker is a protease cleavable linker.

[0417] The disclosure describes that a useful configuration for making a bispecific or multispecific αβTFP or γδ-TFP involves attachment of an AABD (e.g., non-scFV based antigen binding domains) to the N-terminus or near the N-terminus of the vL and/or vH domain of such a αβTFP or γδ-TFP via an optional linker.

[0418] The disclosure describes that a useful configuration for making a bispecific or multispecific single chain SAR (e.g., 1st generation CAR, 2nd generation CAR, TAC, ζTFP, εTFP, δTFP, γTFP, single chain SIR, single chain cTCR, or a single chain cTCR etc.) involves attachment of AABD (e.g., non-scFV based antigen binding domains) to the N-terminus or near the N-terminus of the vL and/or vH domain of such a single chain CAR via an optional linker.

[0419] The disclosure describes that a useful configuration for making a bispecific or multispecific rTCR (RECOMBINANT TCR) involves attachment of an AABD to the N-terminus or near the N-terminus of the Va and/or Vb domain of such a rTCR via an optional linker. In an exemplary embodiment, the optional linker is a protease cleavable linker.

[0420] The disclosure also provides exemplary bispecific and multispecific SARs based on MC.7.G5 (or MC7G5), a monomorphic MHC class I-related protein (MR1)-restricted TCR.

[0421] The disclosure also provides exemplary bispecific and multispecific SARs based on IG4, a NY-ESO-1 restricted TCR that targets the NY-ESO1 peptide SLLMWITQC (SEQ ID NO: 21461) in complex with HLA-A2.

[0422] The disclosure also provides exemplary bispecific and multispecific SARs based on a CMV pp65-restricted TCR that targets the CMV pp65 peptide NLVPMVATV (SEQ ID NO: 21452) in complex with HLA-A2.

[0423] The exemplary SARs described in the preceding examples comprised of an AABD that is operably linked to the N-terminus or near the N-terminus of a vL, vH, Va, Vb, Vg or Vd chain comprising a SIR, cTCR, Ab-TCR, zSIR, αβTFP, γδTFP or TCR. The present disclosure also provides a novel platform of SAR, designated AABD-TCR, in which one or more AABDs are operably linked in frame to a TCR module without the presence of an intervening vL, vH, Va, Vb, Vg and/or Vd chain. In an exemplary AABD-TCR, one AABD module is operably linked to the connecting peptide of a first TCR module via a first intervening linker domain and the second AABD is operably linked to the connecting peptide of a second TCR module via a second intervening linker. In various embodiment, the linker is a flexible linker (e.g., Gly-Ser linker). In a preferred embodiment, the linker comprises an immunoglobulin (Ig) domain. In particular, the IgCL (SEQ ID NO (DNA): 1142 and SEQ ID NO (PRT): 3536) and IgCH domains (SEQ ID NO (DNA): 1143-1157 and SEQ ID NO (PRT): 3537-3551) derived from antibodies serve as useful linkers between the AABD and the TCR chain. Additional Ig-domains and/or Ig-like domains are known in the art (e.g., Table 13; SEQ ID NO (DNA):1168- 1175 and SEQ ID NO (PRT):3562-3569) and can serve as useful linkers in alternate embodiment of the disclosure. The disclosure also provides novel deletion mutants of the extracellular Ig domains of the TCR constant chains (e.g., Cα, Cβ, Cγ, Cδ) that can serve as linker in the construction of SARs (SEQ ID NO: 11848-11865) (Table 13). The extracellular Ig domains of the TCR constant chains (e.g., Ca, Cβ, Cγ or Cδ) can serve as linkers between the antigen binding domain (e.g., vL, vH, vHH, DARPIN, FHVH etc.) and TCR connecting peptides (SEQ ID NO: 11867-11875) (Table 14) of the TCR modules in the construction of SARs with the backbone of AABD-TCR, SIR or cTCR. In an embodiment, the exemplary TCR module are represented by TCRa-wt2-opt-6MD (SEQ ID NOs: 1112), TCRb-wt2-opt-6MD (SEQ ID NO: 1126), TCRg-6MD (SEQ ID NO: 1132) and TCRd-6MD (SEQ ID NO: 1139) or functional variants thereof (Table 12). In an embodiment, the TCR modules are capable of recruiting at least one TCR signaling module.

[0424] In an embodiment, the disclosure provides a double chain bispecific synthetic antigen receptor where at least one chain comprises (a) one or more antigen-specific targeting domains, (b) at least one linker domain selected from SEQ ID NO: 11832-11865 or domains with at least 70% homology to SEQ ID NO: 11832-11865 (Table 13) or deletion mutants and functional variants thereof, (c) an optional hinge domain selected from SEQ ID NO:11888-11894 or domains with at least 70% homology to SEQ ID NO: 11832-11865 (Table 13) or deletion mutants and functional variants thereof; d) at least one connecting peptide selected from SEQ ID NO: 11867-11875 (Table 14) or domains with at least 70% homology to SEQ ID NO: 11867-11875 or deletion mutants and functional variants thereof, (e) at least one transmembrane domain selected from SEQ ID NO: 11877-11881 or domains with at least 70% homology to SEQ ID NO: 11867-11875 or deletion mutants and functional variants thereof, (f) an optional intracellular signaling domain selected from SEQ ID NO: 11883-11886, wherein the antigen-specific targeting region comprises an AABD. In an exemplary embodiment, the AABD is a non-scFv antigen binding module (e.g., a SVH, vHH, Centyrin, svd-TCR etc.)

[0425] In an embodiment, the disclosure provides a double chain bispecific synthetic antigen receptor where each chain comprises (a) one or more antigen-specific targeting domain, (b) at least one linker domain selected from SEQ ID NO: 11832-11865 or domains with at least 70% homology to SEQ ID NO: 11832-11865 (Table 13) or deletion mutants and functional variants thereof, (c) an optional hinge domain selected from SEQ ID NO:11888-11894 or domains with at least 70% homology to SEQ ID NO: 11832-11865 (Table 13) or deletion mutants and functional variants thereof; d) at least one connecting peptide selected from SEQ ID NO: 11867-11875 (Table 14) or domains with at least 70% homology to SEQ ID NO: 11867-11875 or deletion mutants and functional variants thereof, (e) at least one transmembrane domain selected from SEQ ID NO: 11877-11881 or domains with at least 70% homology to SEQ ID NO: 11867-11875 or deletion mutants and functional variants thereof, (f) an optional intracellular signaling domain selected from SEQ ID NO: 11883-11886, wherein the antigen-specific targeting region comprises an AABD. In an exemplary embodiment, the AABD is a non-scFv antigen binding module (e.g., a SVH, vHH, Centyrin etc.).

[0426] An exemplary double chain bispecific SAR targeting CD22 and PSMA is CD8SP-CD22-FHVH-24-[IgCL-TCRg-6MD]-F-P2A-SP-PSMA-chVH-71v2-[IgG1-CH1-TCRd-6MD] and is represented by nucleic acid SEQ ID NO:6492 and amino acid SEQ ID NO: 17182. One of the chains of this construct comprises a SVH targeting CD22 (CD22-FHVH-24) that is fused via an IgCL linker (11832) to a TCRg-6MD module (SEQ ID NO: 11822) comprising the connecting peptide, transmembrane and cytosolic domain of human TCRg/TCRγ. The second chain of this construct comprises an SVH targeting PSMA (PSMA-chVH-71v2) that is fused via an IgG1-CH1 linker (11833) to a TCRd-6MD module (SEQ ID NO: 11829) comprising the connecting peptide, transmembrane and cytosolic domain of human TCRd/TCRd. The two chains of this SAR are separted via a Furine site (SEQ ID NO:11931) and P2A (SEQ ID NO (DNA):1236 and SEQ ID NO (PRT): 11926) self-cleavable linker.

[0427] Another exemplary double chain bispecific SAR targeting CD22 and PSMA is CD8SP-CD22-FHVH-24-[IgCL-TCRb-wt-opt2-6MD]-F-P2A-SP-PSMA-chVH-71v2-[IgG1-CHl-TCRa-wt-op2-6MD] (SEQ ID NO: 6521). This SAR resembles the SAR described in the preceding section except that the TCRg-6MD module is replaced by TCRb-wt-opt2-6MD module (SEQ ID NO (DNA): 1126 and SEQ ID NO (PRT): 11816) and the TCRd-6MD is replaced by TCRa-wt-opt2-6MD module (SEQ ID NO (DNA): 1112 and SEQ ID NO (PRT): 11802).

[0428] An exemplary double chain SAR on the backbone of an AABD-TCR targeting CD20 and CD22 is CD8SP-CD20-vfflI-USCl-2HC2D6-IgGl-Hinge-[TCRg-6MD]-F-P2ASP-CD22-USCI-FHVH-160-IgGl-Hinge-v2-[TCRd-6MD] and is represented by SEQ ID NO: 17883. Exemplary SARs on the backbone of AABD-TCRs targeting CD20 and CD22 are CD8SP-CD20-vHH-USCl-2HC2D6-[IgCL-TCRb-wt-opt2-6MD]-F-P2A-SP-CD22-USCI-FHVH-I60-[TgGI-CHI-TCRa-wt-opt2-6MD] (SEQ ID NO: 17868) and CD8SP-CD20-vHH-USC1-2HC2D6-[IgCL-TCRg-6MD]-F-P2A-SP-CD22-USC1-FHVH-160-[IgGl-CI-1-1_-TCRd-6MD](SEQ ID NO: 17877). Exemplary SARs on the backbone of AABD-TCRs targeting BCMA and CD38 are CD8SP-BCMA-FHVH-74-[IgCL-TCRg-6MD]-F-P2A-SP-CD38-FHVH-USC1-32184-[IgG1-CH1-TCRd-6MD] and CD8SP-BCMA-FHVH-74-[lgCL-TCRb-wt-opt2-6MD]-F-P2A-SP-CD38-FHVH-USC1-32184-[IgG1-CH1-TCRa-wt-op2-6MD] and are represented by SEQ ID NO: 17912 and 17914. Exemplary SARs on the backbone of AABD-TCRs targeting CD20 and CD19 are CD8SP-CD20-vHH-USC1-2HC2D6-[IgCL-TCRb-wt-opt2-6MD]-F-P2A-SP-CD19-FHVH-354-[IgG1-CH1-TCRa-wt-opt2-6MD] and CD8SP-CD20-vHH-USC1-2HC2D6-[IgCL-TCRg-6MD]-F-P2A-SP-CD19-FHVH-354-[IgG1-CH1-TCRd-6MD] and are represented by SEQ ID Nos: 18016 and 18023, respectively. As SARs are modular in nature, the AABD of the above SARs can be substituted with AABD targeting different antigens to develop SARs targeting those antigens. Exemplary AABDs are provided in Tables 5, 7-10. Similarly, the IgCL and IgGl-CH1 linkers in AABD-TCRs can be replaced by other linkers. Exemplary Ig-like linkers are provided in Table 13. Additoinal Ig like linker domains are known in the art and can be used in alternate embodiment of the disclosure. Finally, the TCRa-wt-op2-6MD, TCRb-wt-op2-6MD, TCRg-6MD, and TCRd-6MD modules can be replaced by their functional variants, including mutants and protein domains with at least 70% homology to the sequences of TCRa-wt-op2-6MD, TCRb-wt-op2-6MD, TCRg-6MD, and TCRd-6MD at the amino acid level.

[0429] Table 33 provides the names and SEQ ID NOs of several single and double chain bispecific SAR constructs on the AABD-TCR backbone targeting CD22 and/or PSMA. Table 34 provides the names and SEQ ID NOs of several single and double chain bispecific SAR constructs targeting different antigens which are derived by replacing the SVH targeting CD22 and/or PSMA from the construct listed in Table 13 with SVH targeting different antigens. The backbone (i.e., framework minus the antigen binding domain) of the constructs in Table 34 is the same as the backbones of the constructs listed in Table 33. Therefore, the SEQ ID of a construct with a particular backbone listed in Table 34 can be determined by reference to Table 33.

[0430] In one aspect, the present disclosure describes a useful configuration of a SAR for targeting two or more antigens. In one aspect, the present disclosure describes a useful configuration of a SAR for targeting two or more epitopes of one or more antigens.

[0431] In some embodiments, a SAR may comprise or consist of a single antigen binding domain joined to a single T cell receptor constant chain. The single chain SAR may pair with a complementary endogenous TCR chain to assemble a TCR/CD3 complex which is capable of binding an antigen targeted by the antigen binding domain of the SAR and transducing a T cell signal. In some embodiments, a SAR may comprise or consist of more than one antigen binding fragments (e.g., SVH, vHH, Centyrin etc.) that are joined via a linker and are in turn joined to a single T cell receptor constant chain. In another embodiments, a SAR comprises or consists of two antigen binding domains that are each joined in frame to a separate T cell receptor constant chain. For example, antigen binding domain 1 is joined to the constant chain of TCRα (Ca) to constitute functional unit 1 and antigen binding domain 2 is joined to the constant chain of TCRβ (Cβ) to constitute functional unit 2. The two functional units of such SAR are coexpressed in the same cell to become functionally active. In some embodiments, the two functional units of the SAR are coexpressed using a single vector, while in other embodiments the two functional units are coexpressed in the same cells using different vectors. In some embodiments, the two functional units of the SAR are coexpressed by transfection of a single mRNA sequence that encodes for both functional units, while in other embodiments the two functional units are coexpressed by transfection of two different mRNA sequences, each encoding for one functional unit.

[0432] In yet another embodiment, a SAR comprises or consists of an antigen binding domain that is joined to one T cell receptor constant chain (functional unit 1) but is coexpressed with a second T cell receptor constant chain. The purpose of the second T cell receptor constant chain in such a SAR is to facilitate the cell surface expression of the functional unit 1 (e.g., antigen binding domain 1 joined to a T cell receptor constant chain). As such, the second T cell receptor constant chain may be expressed by itself or expressed as a fusion protein carrying an epitope tag (e.g., MYC, V5, AcV5, G4Sx2, StrepTagII etc.) or expressed as a fusion protein carrying any irrelevant protein fragment (e.g., vL or vH fragment) that does not interfere with the assembly and function of the functional unit 1. As an example, a SAR may comprise or consist of antigen binding domain 1 joined to Cα (constant chain of TCRα) and an empty (i.e., lacking an antigen binding domain) Cβ (constant chain of TCRβ). The two functional units of such SAR are coexpressed in the same cell to become functionally active. In some embodiments, the two functional units of the SAR are coexpressed using a single vector, while in other embodiments the two functional units are coexpressed in the same cells using different vectors. In some embodiments, the two functional units of the SAR are coexpressed by transfection of a single mRNA sequence that encodes for both functional units, while in other embodiments the two functional units are coexpressed by transfection of two different mRNA sequences, each encoding for one functional unit.

[0433] In addition to AABD, the antigen binding domain(s) of single chain SARs (e.g., 1st, 2nd and 3rd generation chimeric antigen receptors, ε/γ/δ/TFPs, TAC and the like) and multiple chain SARs (e.g., SIR, zSIR, cTCR, ab-TCRs, apTFP, orydTFP etc.) can comprise of antibody or antibody fragments (vL, vH, Fv, Fab, or scFv etc.). In some SARs (e.g., SIR, zSIR, cTCR, Ab-TCR etc.), the vL and vH fragments are joined to different TCR constant chains or fragments thereof at their C-termini via optional linkers but join together to form Fv that retains the antigen binding specificity of the parent antibody from which the vi, and vH fragments are derived. In the case of bispecific and multispecific SARs, one or more AABD are operably linked at or near the N-termini of the vL and/or vH fragments.

[0434] In one embodiment, the antigen binding domain(s) of a SAR of the disclosure comprises a Fv (e.g., a vL fragment and a vH fragment that are operably linked to different TCR constant chains and are not present in a single chain fragment variable format or an scFv format) and at least one AABD (e.g., SVH, VHH, Centyrin etc.) that is specific for the same antigen as bound by the Fv, thus providing a bivalent binding molecule. In one embodiment, the antigen binding domain comprises a Fv and at least one AABD (e.g., SVH, VHH, Centyrin etc.) that is specific for the same antigen as the Fv but bind to different epitopes on said antigen. In other words, the antigen binding domain comprises a Fv that binds to a first epitope and a second AABD (e.g., SVH, VHH, Centyrin etc.) that binds to a second epitope. The epitopes may be overlapping. Thus, the antigen binding domain is biparatopic and the scope of the disclosure includes a biparatopic SAR. In yet another embodiment, the antigen binding domain comprises a Fv and at least one AABD (e.g., SVH, VHH, Centyrin etc.) that are specific for the same antigen and bind to the same epitopes on said antigen. In yet another embodiment, the antigen binding domain comprises a Fv and at least one AABD (e.g., SVH, VHH, Centyrin etc.) where the Fv fragment does not bind to any specific antigen with significant affinity or binds with insignificant affinity and merely serves as a scaffold for the attachment of the one or more AABD.

[0435] In addition to vIol and SVH, the AABD comprising the antigen binding domain of SAR may comprise other domains, such as but not limited to a. vHH domain, and non-immunoglobulin antigen binding scaffold such as a DARPIN, an affibody, a ZIP domain (e.g., RZIP, EZIP, E4, R4 etc.), an affilin, an adnectin, an affitin, an obodies, arepebody, a fynomer, an alphabody, an avimer, an atrimer, a centyrin, a pronectin, an anticalin, a kunitz domain, an Armadillo repeat protein or a fragment thereof; a receptor (e.g., CD16-V158A, NKG2D), a ligand (e.g., APRIL, Thrombopoietin) and the like.

[0436] Exemplary configurations of SARs are schematically presented in FIGS. 1-2 and Tables A1-A7.

[0437] In some aspects, the SAR comprises a vL and vH domain that combine to form a Fv targeting a specific antigen and one or more AABD.

[0438] In some aspects, the SAR of the disclosure thus comprises one, typically more than one V_{H} domain, i.e. one or more V_{H} single domain antibody, and is devoid of light chains. In a preferred embodiment, the AABD comprises at least two V_{H} single domain (SVH) antibodies.

[0439] In some aspects, the SAR of the disclosure thus comprises one, typically more than one VHH domain, i.e. one or more VHH single domain antibody, and is devoid of light chains. In a preferred embodiment, the AABD comprises at least two VHH single domains.

[0440] In some aspects, the SAR of the disclosure thus comprises one, typically more than one non-immunoglobulin antigen binding scaffold, i.e. one or more domains selected from a DARPIN, a affibody, a ZIP domain (e.g., RZIP, EZIP, E4, R4 etc.), a affilin, an adnectin, an affitin, an obodies, a repebody, a fynomer, an alphabody, an avimer, an atrimer, a centyrin, a pronectin, an anticalin, a kunitz domain, an Armadillo repeat protein or a fragment thereof. In an embodiment, the SAR comprises two AABD. In an embodiment, the SAR comprises a Fv (i.e. vL/vH fragment that combine to form a Fv) and at least one AABD.

[0441] In some embodiments, a SAR of the disclosure comprises at least two AABD (e.g., two SVH domains or two VHH domains or one SVH and one VHH domain etc.) which target one or more antigen.

[0442] In some embodiments, the SAR of the disclosure typically comprises at least two antigen binding domains which target one or more antigen.

[0443] In one embodiment, the antigen binding domains of a SAR of the disclosure comprises two or at least two AABD (e.g., SVH, VHH, Centyrin etc.) that are specific for the same antigen, thus providing a bivalent binding molecule. In one embodiment, the antigen binding domain comprises two or at least two AABDs (e.g., SVH, VHH, Centyrin etc.) that are specific for the same antigen but bind to different epitopes on said antigen. In other words, the antigen binding domain comprises a first AABD (e.g., SVH, VHH, Centyrin etc.) that binds to a first epitope and a second AABD (e.g., SVH, VHH, Centyrin etc.) that binds to a second epitope. The epitopes may be overlapping. Thus, the antigen binding domain is biparatopic and the scope of the disclosure includes a biparatopic SAR. In yet another embodiment, the antigen binding domain comprises two AABD (e.g., SVH, VHH, Centyrin etc.) that are specific for the same antigen and bind to the same epitopes on said antigen.

[0444] In one embodiment, the antigen binding domains of a SAR of the disclosure comprises a TCR Fv (e.g., a Va/Vb fragment or Vg/Vd fragments that are operably linked to different TCR constant chains and are not present in a single chain TCR format or an scTCR format) and at least one AABD (e.g., SVH, VHH, Centyrin etc.) that is specific for the same antigen as bound by the TCR Fv, thus providing a bivalent binding molecule. In one embodiment, the antigen binding domain comprises a TCR Fv (e.g., Va/Vb or Vg/Vd) and at least one AABD (e.g., SVH, VHH, Centyrin etc.) that is specific for the same antigen as the TCR Fv but bind to different epitopes on said antigen. In other words, the antigen binding domain comprises a TCR Fv that binds to a first epitope and a second AABD (e.g., SVH, VHH, Centyrin etc.) that binds to a second epitope. The epitopes may be overlapping. Thus, the antigen binding domain is biparatopic and the scope of the disclosure includes a biparatopic SAR. In yet another embodiment, the antigen binding domain comprises a TCR Fv and at least one AABD (e.g., SVH, VHH, Centyrin etc.) that are specific for the same antigen and bind to the same epitopes on said antigen. In yet another embodiment, the antigen binding domain comprises a TCR Fv and at least one AABD (e.g., SVH, VHH, Centyrin etc.) where the TCR Fv fragment does not bind to any specific antigen with significant affinity or binds with insignificant affinity and merely serves as a scaffold for the attachment of the one or more AABD. In an embodiment, the variable fragments (i.e., Va, Vb, Vd/Vg) are derived from an HLA-independent TCR, i.e., a TCR that can bind to an antigen independent of an HLA molecule. An exemplary HLA-independent TCR comprises variable fragments that can bind to protein antigens that are expressed on cell surface (e.g., CD19, CD20, CD22, PSMA, Her2, Mesothelin, etc.).

[0445] In another embodiment, the antigen binding domain comprises two AABD (e.g., SVH, VHH, Centyrin etc.) that are specific for two different antigens, thus providing a bispecific antigen binding domain. In other words, the antigen binding domain comprises a first AABD (e.g., SVH, VHH, Centyrin etc.) that binds to a first target and a second AABD (e.g., SVH, VHH, Centyrin etc.) that binds to a second target. Thus, in certain embodiments, the disclosure relates to bispecific SARs.

[0446] As used herein, the term “bispecific SAR” or “bispecifc antigen binding domain” thus refers to a polypeptide that comprises a binding molecule as described herein which has a binding site that has binding specificity for a first target antigen, and a second polypeptide domain which has a binding site that has binding specificity for a second antigen target, i.e., the bispecific binding molecule has specificity for two targets. The first target and the second target are not the same, i.e. are different targets, e.g., proteins; both may be present on a cell surface. Accordingly, a bispecific binding molecule as described herein can selectively and specifically bind to a cell that expresses (or displays on its cell surface) the first target and the second target. In another embodiment, the binding molecule comprises more than two antigen-binding domains providing a multispecific binding molecule. A multispecific antigen-binding domain as described herein can in addition to binding a first target bind one or more additional targets, i.e., a multispecific polypeptide can bind at least two, at least three, at least four, at least five, at least six, or more targets, wherein the multispecific polypeptide agent has at least two, at least, at least three, at least four, at least five, at least six, or more target binding sites respectively.

[0447] Antigen binding domains that comprise three or more AABD (e.g., SVH, VHH, Centyrin etc.) are therefore also within the scope of the invention.

[0448] Two or more AABD (e.g., SVH, VHH, Centyrin etc.) may be connected by a linker, for example a polypeptide linker. A linker may be also present between the vL and/or vH domain comprising the Fv and the AABD. Suitable linkers, for example comprising linker include GS residues such as (Gly₄Ser)ₙ, where n=from 1 to 10, e.g., 1 , 2, 3, 4, 5, 6, 7, 8, 9 or 10. Exemplary linkers are provided in SEQ ID NO (DNA): 1025-1028 and SEQ ID NO (PRT): 11715-11718 (Table 8).

[0449] A linker may be also present between the vL and vH domain comprising the Fv of a SAR and the TCR constant chain connecting peptide to which the vL and vH domains are operably linked. Exemplary such linkers are provided in Table 13. In a preferred embodiment, the vL fragment of the SAR is operably linked to the linker IgCL (SEQ ID NO: 11832) and the vH fragment is operably linked to the linker IgGl-CHl. An exemplary such SAR is CD8SP-CD19-FHVH-354-G4S3-CD19-hu-inROO5-1-vL-[IgCL-TCRL,-6MD]-F-P2A-SP-CD22-FHVH-24-CD19-hu-inROO5-1-VH[IgG1-CH1-TCRd-6MD] and is represented by SEQ ID NO: 18093 (Table 35). In another preferred embodiment, the vL fragment of the SAR is operably linked to the linker TCRa-wt-opt-6ECD (SEQ ID NO:11848) or the linker TCRa-Ig-Like-C1-Domain (SEQ ID NO: 11859) or their deletion mutant or variant and the complementary vH fragment is operably linked to the linker TCRb-wt-opt-6ECD (SEQ ID NO:11850) or the linker TCRb-Ig-Like-C1-Domain (SEQ ID NO: 11861) or their deletion mutant or variant. An exemplary such SAR is CD8SP-CD19-FHVH-354-G4S3-CD19-hu-mROO5-1-vL-[hTCRa-T48C]-F-F2A-SP-CD22-FHVH-24-CD19-hu-mROO5-1-vH-[hTCRb-S57C] and is represented by SEQ ID NO: 18091. In another preferred embodiment, the vL fragment of the SAR is operably linked to the linker TCRg-opt-6ECD ((SEQ ID NO: 11852) or TCRg-Ig-Like-C1-Domain (SEQ ID NO: 11863) or their deletion mutant or variant and the complementary vH fragment is operably linked to the linker TCRd-opt-6ECD (SEQ ID NO: 11854) or TCRd-Ig-Like-C1-Domain (SEQ ID NO: 11864) or their deletion mutant or variant. An exemplary such SAR is CD8SP-hu-mROO5-1-vL-[hTCRd-opt]-F-P2A-IgSP-Apa-CD20-vHH-2HCD25-G4Sx3v2-hu-mROO5-1-vH-[hTCRg1-opt] and is represented by SEQ ID NO: 14788. In some embodiments, potentially any domain can serve as a linker between the vL/vH fragments and the TCR constant chains that does not interfere with the ability of the vL/vH fragments to combine to form a Fv.

[0450] It is to be noted that the term TCR constant chain as used herein comprises the TCRb-wt-opt-6ECD or the TCR Ig like C1 domain, the TCR connecting peptide, the TCR transmembrane domain and the TCR cytosolic domain. The different TCR constant chains and their deletion and point mutants are presented in Table 12. Thus, the TCRb-wt-opt-6ECD and the TCRb-Ig-like-C1 domain represent the N-terminal portion of the TCRb constant chain. Similarly, TCRa-wt-opt-6ECD (SEQ ID NO:11848) or the linker TCRa-Ig-Like-C1-Domain (SEQ ID NO: 11859) domains represent the N-terminal portion of the TCRa constant chains. Therefore, stated in another way, in some SAR (e.g., a double chain SIR and bispecific SAR incorporating such a SIR) the vL fragment is operably linked to the TCRb constant chain while the vH fragment is operably linked to the TCRa constant chain. Alternatively, in some SAR (e.g., a double chain SIR or a bispecific SAR incorporating such as SIR) the vL fragment is operably linked to the TCRa constant chain while the vH fragment is operably linked to the TCRb constant chain. Similarly, in some SAR (e.g., double chain SIR or a bispecific SAR incorporating such as SIR), the vL fragment is operably linked to the TCRγ constant chain while the vH fragment is operably linked to the TCRδ constant chain. Finally, in some SAR, (e.g., double chain SIR or a bispecific SAR incorporating such as SIR), the vL fragment is operably linked to the TCRδ constant chain while the vH fragment is operably linked to the TCRγ constant chain.

[0451] In some embodiments, the one or more AABD comprising the antigen binding domain of the SAR are operably linked to the TCR constant chain connecting peptide (e.g., SEQ ID NO (DNA): 1177-1185; Table 14) without the intervening vL/vH, Va/Vb or Vg/Vd fragments. In such SAR constructs, designated AABD-TCR, a linker is optionally and typically present between the AABD of the SAR and the TCR constant chain connecting peptide to which the AABD are operably linked. Exemplary such linkers are provided in Table 13. In a preferred embodiment, one of the AABDs of a double chain SAR is operably linked to the linker IgCL (SEQ ID NO: 11832) and the other AABD is operably linked to the linker IgG1-CH1 (SEQ ID NO: 11833). An exemplary such SAR with the backbone of an AABD-TCR is CD8SP-CD22-FHVH-24-[IgCL-TCRb-wt-opt2-6MD]-F-P2A-SP-PSMA-chVH-71v2-[IgG1-CH1-TCRa-wt-opt2-6MD] (SEQ ID NO: 6521). Another exemplary such SAR with the backbone of an AABD-TCR is CD8SP-CD22-FHVH-24-[IgCL-TCRg-6MD]-F-P2A-SP-PSMA-cHVH-71v2-[IgG1-CH1-TCRd-6MD] (SEQ ID NO: 6530). Alternative Ig-CH1 linker are provided in SEQ ID NO: 11839-11847 (Table 13) and can be used in alternative embodiment of the disclosure.

[0452] The one or more AABD (e.g., SVH, VHH, Centyrin etc.) which forms the antigen binding unit of the SAR of the invention, “binds” or is “capable of binding” an antigen of interest, i. e., targets, antigen with sufficient affinity such the SAR is useful in therapy in targeting a cell or tissue expressing the antigen.

[0453] As used herein, the term “target” refers to a biological molecule (e.g., antigen, peptide, polypeptide, protein, lipid, carbohydrate) to which a polypeptide domain which has a binding site can selectively bind. The target can be, for example, an intracellular target (such as an intracellular protein target) or a cell-surface target (such as a membrane protein, e.g., a receptor protein). Preferably, a target is a cell-surface target, such as a cell-surface protein,

[0454] In one embodiment, the target of the antigen binding domain of the SAR is a tumor antigen. In one embodiment, the tumor antigen is associated with a hematologic malignancy. In another embodiment, the tumor antigen is associated with a solid tumor. In yet another embodiment, the one or more antigens targeted by the SAR is/are selected from the antigens listed in antigen Table B. However, a skilled person would understand that other tumor antigens are also targets within the scope of the invention.

[0455] In some embodiments, the antigen binding domain of the SAR polypeptide molecule binds to an antigen in association with HLA-A2. Non-limiting examples of antigens that are recognized in association with HLA-A2 include TARP, WT1, hTERT, gp100, Tyrosinase, MART1, NY-ESO1, CMV pp65, EBV EBNA3c, HIV1 gag, HTLV1-Tax, PR1, CMV pp65, EBV-EBNA3c, Ras G12V mutant, and GAD.

[0456] In some embodiments, the antigen binding domain of the SAR polypeptide molecule comprises of an autoantigen or a fragment thereof that binds to an autoantibody. Non-limiting exampls of autoantigen include Dsg1 and Dsg3.

[0457] In some embodiments, the antigen binding domain of the SAR polypeptide molecule is derived from or comprises wild-type or non-wild-type sequence of an antibody, an antibody fragment, an scFv, a Fv, a Fab, a (Fab′)2, a single domain antibody (SDAB), a vH or vL domain, a camelid VHH domain, or a non-immunoglobulin scaffold such as a DARPIN, an affibody, an affilin, an adnectin, an affitin, an obodies, a repebody, a fynomer, an alphabody, an avimer, an atrimer, a centyrin, a pronectin, an anticalin, a kunitz domain, an Armadillo repeat protein, an autoantigen, a receptor or a ligand. In some embodiments, the encoded SAR polypeptide contains more than one antigen binding domains. In embodiments, the antigen binding domain is operably linked directly or via an optional linker to the NH2-terminal end of a TCR domain (i.e., constant chains of TCR-alpha, TCR-beta1, TCR-beta2, pretc. R-alpha, pre-TCR-alpha-Del48, TCR-gamma, or TCR-delta). The nucleic acid and amino acid sequences of several exemplary linkers are provided in Tables 11 and 13.

[0458] In some embodiments, the antigen binding domain of a SAR polypeptide molecule is derived from or comprises of vL and vH domains of an antibody that are separately operably linked to the NH2-terminus of two constant chains of a T cell receptor (i.e. constant chains of TCR-alpha, TCR-beta1, TCR-beta2, pretc.R-alpha, pre-TCR-alpha-Del48, TCR-gamma, or TCR-delta, or mutants or variant thereof as described herein) to jointly constitute a Fragment variable (Fv) that binds to a specific antigen. An exemplary such SAR which targets CD19 is provided in CD8SP-hu-mROO5-1-vL-[hTCRb-S57C]-F-P2A-SP-hu-mROO5-1-vH-[hTCRa-T48C] (DNA SEQ ID NO:7348 and amino acid SEQ ID NO: 18038). In this SAR, the vL fragment derived from humanized mROO5-1, a CD19 monoclonal antibody, is operably linked to constant region of a mutant human TCRb chain [hTCRb-S57C] while the vH fragment derived from the humanized mROO5-1 monoclonal antibody is operably linked to the constant region of a mutant human TCRα chain [hTCRa-T48C]. This SAR which has the backbone of a SIR can be used to make bispecific and multispecific SARs by attaching the different AABDs to the or near the N-termini of the vL and/or vH fragments. Table 29 includes the SEQ ID Nos of several exemplary bispecific and trispecific SARs based on the CD8SP-hu-mROO5-1-vL-[hTCRb-S57C]-F-P2A-SP-hu-mROO5-1-vH-[hTCRa-T48C] (DNA SEQ ID NO:7348 and amino acid SEQ ID NO:18038).

[0459] In some embodiments, the SAR polypeptide has an antigen binding domain that is expressed as single chain variable fragments (scFv) and is joined to the NH2-terminus of one of the constant chains of a T cell receptor (i.e., constant chains of TCR-alpha, TCR-beta1, TCR-beta2, pretc.R-alpha, pre-TCR-alpha-Del48, TCR-gamma, or TCR-delta, variants or mutants thereof). An exemplary such SAR (SIR) is CD8SP-V5-[hTCRb-KACIAH]-F-P2A-CD8SP-hu-mROO5-1-vL-Gly-Ser-Linker-hu-mROO5-1-vH-Myc-[hTCRa-CSDVP]-F-F2A-PAC (DNA SEQ ID NO: 7352 and PRT SEQ ID NO: 18042). This SAR which has the backbone of a SIR can be used to make bispecific and multispecific SARs by attaching the different AABDs to the or near the N-terminus of the scFv. Table 29 includes the SEQ ID Nos of several exemplary bispecific and trispecific SARs based on the SAR CD8SP-V5-[hTCRb-KACIAH]-F-P2A-CD8SP-hu-mROO5-1-vL-Gly-Ser-Linker-hu-mROO5-1-vH-Myc-[hTCRa-CSDVP]-F-F2A-PAC (DNA SEQ ID NO: 7352 and PRT SEQ ID NO: 18042). An exemplary such bispecific SAR that targets CD19 and CD22 is CD8SP-V5-[hTCRb-KACIAH]-F-P2A-CD8SP-CD22-FHVH-24-G4Sx3-R1-hu-mROO5-1-vL-Gly-Ser-Linker-hu-mROO5-1-vH-Myc-[hTCRa-CSDVP]-F-F2A-PAC (DNA SEQ ID NO: 4127 and amino acid SEQ ID NO: 14817).

[0460] In certain embodiments, the AABD of the two polypeptide chains of a double chain SARs are similar in structure (e.g., both AABD are SVH or camelid VHH domain or affibodies or Centyrins). In one embodiment, the AABD of the two polypeptide chains of a double chain SARs are not similar in structure (e.g., the first antigen binding domain is a SVH and the second antigen binding domain is a camelid VHH).

[0461] In some embodiments, the antigen binding domain of the encoded SAR polypeptides is encoded by a codon optimized nucleotide sequence of the corresponding wild-type sequence or a non-wild-type sequence antibody, single domain antibodies (SDAB ), VH domains, VL domain, camelid VHH domains, or a non-immunoglobulin scaffolds such as DARPINs, affibodies, affilins, adnectins, affitins, obodies, repebodies, fynomers, alphabodies, avimers, atrimers, centyrins, pronectins, anticalins, kunitz domains, Armadillo repeat proteins, autoantigen, receptors or ligands.

[0462] In some embodiments, the encoded one or more antigen binding domains of the SAR polypeptide comprise any one or more of light chain variable domain (vL or VL) amino acid sequences of SEQ ID NO 10736 to 10972 wherein up to 20 amino acid residues but no more than 21 amino acids are replaced by any other amino acid residues, or sequences with 70-99.9% identity to amino acid sequences of SEQ ID NO 10736 to 10972, or sequences with 70-100% identity to the complementarity determining regions (CDR’s) of SEQ ID NO: 10736 to 10972, or sequences with up to 3 amino acid substitution in each of the three complementarity determining regions of 10736 to 10972. Table 3 shows the target antigens, names, SEQ ID NO (DNA), SEQ ID NO (PRT), SEQ ID NO (PRT) of scFv of the exemplary vL domains used in this disclosure. In an embodiment, the vL domains can be fully human, humanized, chimeric or non-human in origin.

[0463] In some embodiments, the encoded one or more antigen binding domains of the SAR polypeptide comprise any one or more of heavy chain variable domain (vH or VH) amino acid sequences of SEQ ID NO: 10978 to 11214 wherein up to 20 amino acid residues but no more than 21 amino acids are replaced by any other amino acid residues, or sequences with 70-99.9% identity to amino acid sequences of SEQ ID NO In some embodiments, the encoded one or more antigen binding domains of the SAR polypeptide comprise any one or more of heavy chain variable domain (vH or VH) amino acid sequences of SEQ ID NO: 10978 to 11214 wherein up to 20 amino acid residues but no more than 21 amino acids are replaced by any other amino acid residues, or sequences with 70-99.9% identity to amino acid sequences of SEQ ID NO: 10978 to 11214, or sequences with 70-100% identity to the complementarity determining regions (CDR’s) of SEQ ID NO: 10978 to 11214, or sequences with up to 3 amino acid substitution in any of the three complementarity determining regions of SEQ ID NO: 10978 to 11214. Table 3 shows the target antigens, names, SEQ ID NO (DNA), SEQ ID NO (PRT), SEQ ID NO (PRT) of scFv of the exemplary vH domains used in this disclosure. In an embodiment, the vH domains can be fully human, humanized, chimeric or non-human in origin.

[0464] In some embodiments, the encoded one or more antigen binding domains of the SAR polypeptide comprise any one or more of camelid single domain antibody (vHH or VHH) amino acid sequences of SEQ ID NO: 11517-11592 wherein up to 20 amino acid residues but no more than 21 amino acids are replaced by any other amino acid residues, or sequences with 70-99.9% identity to amino acid sequences of SEQ ID NO 11517-11592, or sequences with up to 3 amino acid substitution in any of the three complementarity determining regions (CDR’s) of SEQ I11517-11592. Table 5 shows the target antigens, names, SEQ ID NO (DNA) and SEQ ID NO (PRT) of the Exemplary vHH domains used in this disclosure. In an exemplary embodiment, the vHH domains can be humanized, chimeric or non-human.

[0465] In some embodiments, the encoded one or more antigen binding domains of the SAR polypeptide comprise any one or more of non immunoglobulin antigen binding scaffold amino acid sequences of SEQ ID NO: 11662-11673 wherein up to 20 amino acid residues but no more than 21 amino acids are replaced by any other amino acid residues, or sequences with 70-99% identity to amino acid sequences of SEQ ID NO: 11662-11673. Table 7 shows the target antigens, names, SEQ ID NO (DNA), SEQ ID NO (PRT), names of the exemplary non immunoglobulin antigen binding scaffold used in this disclosure.

[0466] In some embodiments, the encoded one or more antigen binding domains of the SAR polypeptide comprise any one or more of receptor amino acid sequences of SEQ ID NO 11674-11691 wherein up to 20 amino acids but no more than 21 amino acids are replaced by any other amino acid residues, or sequences with 70-99.9% identity to amino acid sequences of SEQ ID NO: 11674-11691. Table 8 shows the SEQ ID NO (DNA), SEQ ID NO (PRT), and names of receptors that can be used in the construction of SARs.

[0467] In some embodiments, the encoded one or more antigen binding domains of the SAR polypeptide comprise an autoantigen amino acid sequences of SEQ ID NO: 11687 wherein up to 19 amino acid residues but no more than 20 amino acids are replaced by any other amino acid residues, or sequences with 70-100% identity to amino acid sequences of SEQ ID NO 11687. Table 8 shows the SEQ ID NO (DNA), SEQ ID NO (PRT), and name of an exemplary autoantigen.

[0468] In some embodiments, the encoded one or more antigen binding domains of the SAR molecule comprise any one or more of ligand amino acid sequences of SEQ ID NO:11692 to 11702 wherein up to 20 amino acid residues but no more than 21 amino acids are replaced by any other amino acid residues or sequences with 70-100% identity to amino acid sequences of SEQ ID NO: 11692 to 11702. Table 9 shows the SEQ ID NO (DNA), SEQ ID NO (PRT), and names of different exemplary ligands.

[0469] In some embodiments, the encoded one or more antigen binding domains of the SAR polypeptide comprise any one or more of scFv amino acid sequences of SEQ ID NO:11220-11456 wherein up to 40 amino acid residues but no more than 41 amino acids are replaced by any other amino acid residues, or sequences with 70-100% identity to amino acid sequences of SEQ ID NO 11220-11456 or sequences with 70-100% identity in the six complementarity determining regions (CDR’s) in each of SEQ ID NO 11220-11456 or sequences with up to 3 substitution in any of the six complementarity determining regions (CDR’s) in each of SEQ ID NO11220-11456. Table 3 shows the target antigens, SEQ ID NO (DNA), SEQ ID NO (PRT), names and amino acid sequences of the exemplary scFVs used in this disclosure. In an embodiment, the scFv can be fully human, humanized, chimeric or non-human in origin.

[0470] In some embodiments, the encoded one or more antigen binding domains of the SAR polypeptide comprise any one or more of an antigen binding portion, e.g., CDRs, of vL and vH fragments targeting this antigen or domains with up to 3 amino acid substitutions in any of the CDRs of the vL and vH fragments listed in Table 3. The sequences of the CDR1-3 of the vL and vH fragments listed in Table 3 can be determined by methods known in the art.

[0471] In some embodiments, the encoded one or more antigen binding domains of the SAR polypeptide comprise any one or more of an antigen binding portion, e.g., CDRs, of vHH fragments targeting this antigen. The SEQ ID NO of the vHH fragments targeting different antigens are listed in Table 5 and the sequences of their corresponding CDR1-3 can be determined by methods known in the art.

[0472] In one embodiment, an antigen binding domain of a SAR is an antigen binding portion of a receptor known to bind this target antigen.

[0473] In some embodiments, the encoded one or more antigen binding domains of the SAR polypeptide comprise any one or more of an antigen binding region of the receptor comprising the SAR polypeptide.

[0474] In some embodiments, the encoded one or more antigen binding domains of the SAR polypeptide comprise any one or more of an antigen binding region of the ligand comprising the SAR polypeptide.

[0475] In some embodiments, the encoded one or more antigen binding domains of the SAR polypeptide comprise any one or more of an antigen binding region of the nonimmunoglobulin scaffold comprising the SAR polypeptide.

[0476] In another embodiment, the disclosure provides SARs that bind to the same epitope on the different targets described in Tables 25-36 as any of the SARs of the disclosure (i.e., SARs that have the ability to cross-compete for binding to the different targets with any of the SARs of the disclosure). In some embodiments, the antigen specific domains of these SARs could be determined from vL fragments, vH fragments and/or scFv fragments of the antibodies that were used as the component of the SAR. In some embodiments, the reference antibodies for cross-competition studies to determine the target-epitope recognized by a SAR of the disclosure described in Tables 25-36 are vL, vH, scFvs, SVH, vHH, non-immunoglobulin antigen binding domains having SEQ ID Nos. as shown in Tables 3-9. In an exemplary embodiment, the reference scFv hu-mROO5-1 represented by SEQ ID NO:11323 can be used in cross-competition studies to determine the target-epitope recognized by hu-mROO5-1-based SARs of the disclosure described in Tables 25-36. In some embodiments, the reference AABD fragments for cross-competition studies to determine the target-epitope recognized by a SAR of the disclosure described in Tables 25-36 are AABD fragments having SEQ ID NOs as shown in Table 5. In some embodiments, the reference non-immunoglobulin antigen binding scaffolds for cross-competition studies for cross-competition studies to determine the target-epitope recognized by a SAR of the disclosure described in Tables 25-36 are non-immunoglobulin antigen binding scaffolds-based AABD having sequences as shown in Table 7. In some embodiments, the reference ligands for cross-competition studies to determine the target-epitope recognized by a SAR of the disclosure described in Tables 25-36 are ligands having SEQ ID Nos listed in Table 9. In some embodiments, the reference SARs for cross-competition studies against SARs targeting different targets are SARs having SEQ ID Nos listed in Tables 25-36.

[0477] The SARs described herein may be encoded by a single polynucleotide chain and translated into a single polypeptide chain, which is subsequently cleaved into different proteins. The nucleic acid molecule encoding a SAR can comprises one or more leader sequences (also known as a signal peptide). In one embodiment, each functional unit (e.g., an antigen binding domain joined to a T cell receptor constant chain plus Furine-SGSG-cleavable linker or a T cell receptor constant chain plus Furine-SGSG-cleavable linker) of a SAR can be preceded by a leader sequence encoding a signal peptide which directs the SAR to the cell surface as a type I transmembrane protein. In one embodiment, the antigen-binding domain of SAR is extracellular-facing. In some embodiments, short nucleic acid sequences (3-9 nucleic acids) comprising restriction enzyme sites are located between the different subunits of a SAR, e.g., between a signal sequence and the antigen binding domain of the SAR or between the antigen binding and the TCR chain.

[0478] In an embodiment, SARs can be generated with different TCR constant chains. The TCR constant chains may be encoded by their wild-type sequences, non-wild-type sequences or codon optimized sequences. In addition, the TCR constant chains may carry specific mutations (e.g., TCRβ constant chain with one or more mutation to enhance their cell surface expression and/or pairing with each other and to reduce pairing with endogenous TCR chains. Exemplary TCR chains that can be used in the construction of the SARs are provided in Table 12. The mutations in the TCR domain of a SAR modify the binding affinity and/or expression of the SAR to a target or cell, respectively. For example, the disclosure contemplates a diverse population of SARs against a particular antigen target that can be designed and screened based upon the nucleic acid sequence codon optimization and/or the mutation in the TCR chain to promote pairing or expression and/or the use of a linker between the binding domain and the TCR domain. In some embodiments, an immune effector cell expressing a SAR from the pool shows more than 2 fold, more than 5-fold, more than 10-fold, and even more than 100-fold difference in one or more of the characteristics selected from the group of antigen binding affinity, cell surface expression, cell signaling , NFAT reporter activity, cytotoxicity, cytokine secretion, proliferation, in vivo persistence, expression of exhaustion markers, and in vivo activity as compared to a comparable immune effector cell expressing another SAR from the pool containing the same binding domain, (e.g., a binding domain derived from the same scFv as is present in the test SAR) when assayed under similar conditions. The disclosure contemplates a library of X-SAR molecules wherein X is the antigen binding domain target such that library or “pool” provides SARs with varied binding affinity, expression levels and functional characteristics (e.g., cytotoxicity, cytokine production and long-term persistence). In some embodiments, the a SAR in the pool have more than 2 fold, typically more than 5-fold, even more preferebaly more than 10-fold, and even more typically more than 100-fold difference in one or more of the characteristics selected from the group of antigen binding affinity, cell surface expression, cytotoxicity, cytokine secretion, T cell proliferation, T cell persistence, T cell exhaustion, and in vivo activity when expressed in an immune effector cell as compared to another SAR in the pool containing the same binding domain, (e.g., a binding domain derived from the same scFv as is present in the test SAR) when assayed under similar conditions. The different SARs in the pool may be tagged with different DNA barcodes to allow their identification by next-genreation sequencing or other techniques known in the art. Exemplary barcodes are presented by SEQ ID NO: 25 to 30. The barcodes may be inserted in the vector encoding the SAR at a convenient location so that they do not interfere with the expression of the SAR. In an exemplary embodiment, the barcodes are inserted immediately downstream of the stop codon of the SAR. One of skill in the art can screen such pools to identify X-SIRs with a desired binding affinity, expression level or functional characteristics using any one or more of the assays described herein. Different SARs or different pools of SARs may be suitable for different diseases and disease conditions and may be combined to generate a diverse and polyclonal immune response. Thus, T cell expressing a SAR with higher affinity for the target may be more effective in killing a tumor cell in the short term but may exhaust quickly and/or have short term persistence in vivo. Such T cells expressing a high affinity SAR may be combined with T cells expressing a low affinity SAR that may not be as effective in killing a tumor cell in the short term but may not exhaust quickly and/or persist longer in vivo. The SARs of the disclosure, including the different pools of SARs, may be also combined with other genetically engineered T cells, such as SAR-NK cells, to generate a diverse immune response. Accordingy, the disclosure provides a library of X-SARs.

[0479] In an embodiment, one of the embodiments, the extracellular and transmembrane domain of one polypeptide chain comprises of the constant chain of TCRα or a fragment thereof while the extracellular and transmembrane domain of other polypeptide chain comprises of constant chain of TCRβ or a fragment thereof. In an embodiment, one of the embodiments, the extracellular and transmembrane domain of one polypeptide chain comprises of the constant chain of TCRγ or a fragment thereof while the extracellular and transmembrane domain of other polypeptide chain comprises of constant chain of TCRδ or a fragment thereof. In an embodiment, the extracellular and transmembrane domain of one polypeptide chain comprises of the constant chain of pretc. Rα while the extracellular and transmembrane domain of other polypeptide chain comprises of constant chain of TCRβ. In an embodiment, the linker domain of one of the polypeptides comprises of the linker listed with SEQ ID NOS: 11832 and the linker domain of the second polypeptide comprises of one of the linkers selected from SEQ ID NO: 11833-11847.

[0480] In some embodiments, the SAR of the disclosure comprises two polypeptide chains, one of the chains having a general formula:
[0481] AABD (n)-optional linker 1-vL-optional linker2-extracellular domain-transmembrane domain- optional Intracellular signaling domain(n)
[0482] wherein n is 1 or more; and the second chain having the general formula:
[0483] AABD (n)-optional linker3-vH-optional linker4-extracellular domain-transmembrane domain- optional Intracellular signaling domain(n) wherein n is 0 or more; In one embodiment, n is at least 1, for example 1, 2, 3, 4 or 5. In an embodiment, the vL of one polypeptide combines with vH of the other polypeptide to form a fragment variable (Fv) that binds to an antigen. In an embodiment, the vL of one polypeptide combines with vH of the other polypeptide to form a fragment variable (Fv) that does not bind to an antigen and serves only as the backbone or a scaffold for attachment of AABD. The AABD also forms the antigen binding domain and is located at the extracellular side when expressed in a cell. In an embodiment, the extracellular and transmembrane domain of one polypeptide chain comprises of the constant chain of TCRα or a fragment thereof while the extracellular and transmembrane domain of other polypeptide chain comprises of constant chain of TCRβ or a fragment thereof. In an embodiment, the extracellular and transmembrane domain of one polypeptide chain comprises of the constant chain of TCRγ or a fragment thereof while the extracellular and transmembrane domain of other polypeptide chain comprises of constant chain of TCRδ or a fragment thereof. In an embodiment, the extracellular and transmembrane domain of one polypeptide chain comprises of the constant chain of pretc. Rα while the extracellular and transmembrane domain of other polypeptide chain comprises of constant chain of TCRβ. In an embodiment, the linker2 domain of one of the polypeptides comprises of the linker listed with SEQ ID NOS: 11832 and the linker4 domain of the second polypeptide comprises of one of the linkers selected from SEQ ID NO: 11833-11847. In an embodiment the linker2 and linker4 are optional. In an embodiment, the linker1 and linker3 comprise of linkers with SEQ ID NO: 11715-11717. In an embodiment, the linker1 and linker3 are optional. Exemplary SARs are schematically presented in FIGS. 1-2 and Tables A1-A7.

[0484] In some embodiments, the SAR of the disclosure comprises two polypeptide chains, one of the chains having a general formula:
[0485] AABD (n)-optional linker1-extracellular domain-transmembrane domain- optional Intracellular signaling domain(n) wherein n is 1 or more; and the second chain having the general formula
[0486] AABD (n)-optional linker3-scFv-optional linker4-extracellular domain-transmembrane domain- optional Intracellular signaling domain(n) wherein n is 0 or more; In one embodiment, n is at least 1, for example 1, 2, 3, 4 or 5. In an embodiment, the scFv binds to an antigen. The AABD also forms the antigen binding domain and is located at the extracellular side when expressed in a cell. In an embodiment, the extracellular and transmembrane domain of one polypeptide chain comprises of the constant chain of TCRα or a fragment thereof while the extracellular and transmembrane domain of other polypeptide chain comprises of constant chain of TCRβ or a fragment thereof. In an embodiment, the extracellular and transmembrane domain of one polypeptide chain comprises of the constant chain of TCRγ or a fragment thereof while the extracellular and transmembrane domain of other polypeptide chain comprises of constant chain of TCRδ or a fragment thereof. In an embodiment, the extracellular and transmembrane domain of one polypeptide chain comprises of the constant chain of pretc. Rα while the extracellular and transmembrane domain of other polypeptide chain comprises of constant chain of TCRβ. In an embodiment, the linker2 domain of one of the polypeptide comprises of the linker listed with SEQ ID NOS: 11832 and the linker4 domain of the second polypeptide comprises of one of the linkers selected from SEQ ID NO: 11833-11847. In an embodiment the linker2 and linker4 are optional. In an embodiment, the linker1 and linker3 comprise of linkers with SEQ ID NO: 11715-11717. In an embodiment, the linker1 and linker3 are optional.

[0487] Exemplary SARs are schematically presented in Tables A1-A7 and FIGS. 1-2.

[0488] In some embodiments, the SAR of the disclosure comprises two polypeptide chains, one of the chains having a general formula: AABD (n)-optional linker1-Va-optional linker2-extracellular domain-transmembrane domain- optional Intracellular signaling domain(n) wherein n is 1 or more; and the second chain having the general formula AABD (n)-optional linker3-Vb-optional linker4-extracellular domain-transmembrane domain- optional Intracellular signaling domain(n) wherein n is 0 or more; In one embodiment, n is at least 1, for example 1, 2, 3, 4 or 5. In an embodiment, the Va of one polypeptide combines with Vb of the other polypeptide to form a TCR fragment variable (TCR-Fv) that binds to an antigen. The AABD also forms the antigen binding domain and is located at the extracellular side when expressed in a cell. In an embodiment, the extracellular and transmembrane domain of one polypeptide chain comprises of the constant chain of TCRα or a fragment thereof while the extracellular and transmembrane domain of other polypeptide chain comprises of constant chain of TCRβ or a fragment thereof.

[0489] In some embodiments, the SAR of the disclosure comprises two polypeptide chains, one of the chains having a general formula: AABD (n)—optional linker 1-Vg-optional linker2-extracellular domain-transmembrane domain- optional Intracellular signaling domain(n) wherein n is 1 or more; and the second chain having the general formula AABD (n)-optional linker3-Vd-optional linker4-extracellular domain-transmembrane domain- optional Intracellular signaling domain(n) wherein n is 0 or more; In one embodiment, n is at least 1, for example 1, 2, 3, 4 or 5. In an embodiment, the Vg of one polypeptide combines with Vd of the other polypeptide to form a TCR fragment variable (TCR-Fv) that binds to an antigen. The AABD also forms the antigen binding domain and is located at the extracellular side when expressed in a cell. In an embodiment, the extracellular and transmembrane domain of one polypeptide chain comprises of the constant chain of TCRγ or a fragment thereof while the extracellular and transmembrane domain of other polypeptide chain comprises of constant chain of TCRδ or a fragment thereof.

[0490] In some embodiments, the SAR polynucleotide and polypeptides of the disclosure have the backbone of a double chain SIR, a one and half chain SIR a double chain cTCR, a one and a half chain cTCR, a double chain ab-TCR, a one and a half chain ab-TCR, an AABD-TCR, a single chain TFP, a double chain TFP, a, 1st generation CAR, a 2^{nd} generation CAR, a 3rd generation CAR, a TAC, a TCR and the like.

[0491] Bispecific and multispecific single chain chimeric antigen receptor (CAR) with the backbone of 2^{nd} generation CAR or 3^{rd} generation CARs have been described in the art. These CAR constructs generally comprise of two or more scFvs that are attached in tandem to a hinge, transmembrane, costimulatory and activation domain. A major problem with such bispecific and multispecific constructs is non-specific aggregatiton of the scFv domains, which results in poor expression, diminished binding to one or more target antigens, reduced signaling, reduced effector function, tonic signaing, early exhaustion and diminished in vivo efficacy. Thus, it was recently reported that a bispecific 2^{nd} generation CAR construct targeting both CD19 and CD20 showed lower efficacy was compared to a unispecific CD19 CAR construct in a clinical trial. Bispecific and multispecific constructs on the backbone of SIR have been described in WO2018102795. These bispecific and multispecific double chain SIR constructs comprised of two scFv or two vHH fragments targeting that were attached to two different TCR constant chains. Alternate configuration, such as one scFv attached to the first TCR constant chain and a non-scFV antigen binding domain (e.g., vHH or DARPIN or affibody) attached to the second TCR constant chain have been also described. However, similar to the single chain bispecific/multispecific CAR constructs, these bispecific and multispecific SIR constructs suffered from poor expression, diminished binding to one or more target antigens, reduced signaling and reduced effector function. The disclosure provides a solution to the long-standing problem of generating bispecific and multispecific constructs by providing novel compositions of binding domains, optimal linkers between the different domains and novel configurations. The disclosure provides optimized unispecific, bispecific and multispecific SARs that have superior expression, binding activity, signaling, persistence, effector functions (e.g., cell activation, proliferation, cytokine production and cytotoxicity etc.) and in vitro and in vitro properties as compared to the constructs described in the art.

[0492] In an embodiment described herein, the bispecific or multispecific SAR of the disclosure shows at least 30% (e.g., 40%, 50%, 60%, 70%, 80%, 90%, or 95%, 99% etc.) affinity for each of the target antigens as compared to the affinity of the each of the corresponding unispecific SARs when expressed in an effector cell and compared under similar conditions. The binding affinity can be measured using assays known in the art such as the Topanga Assay.

[0493] In other embodiments described herein, the bispecific SAR of the disclosure shows at least 30% (e.g., 40%, 50%, 60%, 70%, 80%, 90%, or 95%, 99% etc.) signaling activity against each of the target antigen expressing cell as compared to the signaling activity of each of the corresponding unispecific SARs when expressed in an effector cell and compared under similar conditions. The signaling activity can be measured using methods known in the art, such as the Jurkat-NFAT-GFP cell assay.

[0494] In other embodiments described herein, the bispecific SAR of the disclosure shows at least 30% (e.g., 40%, 50%, 60%, 70%, 80%, 90%, or 95%, 99% etc.) cytokine (e.g., TNFα, IFNγ, IL-2 etc.) production against each of the target antigen expressing cell as compared to the cytokine production of each of the corresponding unispecific SARs when expressed in an effector cell and compared under similar conditions. The cytokine production (e.g., TNFα, IFNγ, IL-2 etc.) can be measured using methods known in the art, such as ELISA.

[0495] In other embodiments described herein, the bispecific SAR of the disclosure shows at least 30% (e.g., 40%, 50%, 60%, 70%, 80%, 90%, or 95%, 99% etc.) of the cytotoxic activity against each of the target antigen expressing cell as compared to the cytotoxic activity of each of the corresponding unispecific SARs when expressed in an effector cell and compared under similar conditions. The cytotoxic activity can be measured using methods known in the art, such as the Matador or radioactive chromium release assay.

[0496] In other embodiments described herein, the bispecific SAR of the disclosure shows at least 30% (e.g., 40%, 50%, 60%, 70%, 80%, 90%, or 95%, 99% etc.) of the in vivo activity against each of the target antigen expressing cell as compared to the in vivo activity of each of the corresponding unispecific SARs when expressed in an effector cell and compared under similar conditions. In an embodiment, the in vivo activity is measured using xenograft model in immunodeficient mice.

[0497] In an embodiment described herein, the multi-specific SAR of the disclosure shows at least 30% (e.g., 40%, 50%, 60%, 70%, 80%, 90%, or 95%, 99% etc.) affinity for one or more of the target antigens as compared to the affinity of the each of the corresponding unispecific SARs when expressed in an effector cell and compared under similar conditions. In an embodiment described herein, the multi-specific SAR of the disclosure shows at least 10% greater affinity (e.g., 20%, 30%, 40%, 50%, 60%, 70%, 80%, 90%, 100%, 150% or 200% greater affinity etc.) for one or more of the target antigens as compared to the affinity of a corresponding construct comprising two or more scFv based antigen binding domains when expressed in an effector cell and compared under similar conditions. In an embodiment, the multispecific SAR of the disclosure shows superior binding affinity against more than one antigen as compared to a unispecific SAR. The binding affinity can be measured using assays known in the art such as the Topanga Assay. For example, T cells expressing the SAR CD8SP-CD22-FHVH-24-G4Sx3-R1-hu-mROO5-1-vL-[hTCRa-CSDVP]-F-F2A-IgSP-Apa-CD20-vHH-2HCD25-G4Sx3v2-hu-mROO5-1-vH-[hTCRb-KACIAH]-F-P2A-PAC (SEQ ID NO: 4163) or CD8SP-hu-mROO5-1-vL-[hTCRa-CSDVP]-F-F2A-IgSP-Apa-CD16-V158-v2-G4Sx3v2-hu-mROO5-1-vH-[hTCRb-KACIAH]-F-P2A-PAC (SEQ ID NO: 4723) show at least 30% binding affinity for CD19 as T cells expressing the unispecific SAR CD8SP-hu-mROO5-1-vL-[hTCRa-CSDVP]-F-F2A-SP-hu-mROO5-1-vH-[hTCRb-KACIAH]-F-P2A-PAC (SEQ ID NO: 7346) as measured by Topanga Assay using CD19-ECD-GGS-NLuc reagent (SEQ ID NO: 11971). Furthermore, T cells expressing the multispecific CD19xCD22xCD20 SAR with SEQ ID NO: 4163 show greater binding to CD22 and CD20 as compared with T cells expressing the unispecific CD19 SAR with SEQ ID NO: 7346. In another exemplary embodiment, T cells expressing the multispecific CD19xCD22xCD20 SAR with SEQ ID NO: 4163 show greater binding to CD22 and CD20 as compared with T cells expressing the CD22xCD20 bispecific construct CD8SP-CD22-FHVH-24-[hTCRa-CSDVP]-F-F2A-IgSP-Apa-CD20-vHH-2HCD25-[hTCRb-KACIAH]-F-P2A-PAC (SEQ ID NO: 21626) in which the CD22-FHVH-24 binding domain is directly attached to the TCRα chain (hTCRa-CSDVP) without an intervening vL region or Ig linker and CD20-vHH-2HCD25 binding domain is directly attached to TCRb chain (hTCRb-KACIAH) without an intervening vH or Ig linker.

[0498] In an embodiment described herein, the bispecific and/or multi-specific SAR of the disclosure shows at least 10% greater affinity (e.g., 20%, 30%, 40%, 50%, 60%, 70%, 80%, 90%, 100%, 150% or 200% greater affinity etc.) for one or more of the target antigens as compared to the affinity of a corresponding bispecific/multispecific constructs comprising two or more scFv based antigen binding domains when expressed in an effector cell and compared under similar conditions. For example, T cells expressing the bispecific CD19xCD20 SAR CD8SP-hu-mROO5-1-vL-[hTCRa-CSDVP]-F-F2A-IgSP-Apa-CD20-vHH-2HCD25-G4Sx3v2-hu-mROO5-1-vH-[hTCRb-KACIAH]-F-P2A-PAC with SEQ ID NO: 4088 show at least 10% greater binding affinity to CD19 and/or CD20 as compared with T cells expressing the construct CD8SP-CD19-hu-mROO5-1-scFv-[hTCRa-CSDVP]-F-F2A-IgSP-CD20-7D8-scFv-[hTCRb-KACIAH]-F-P2A-PAC (SEQ ID NO: 21627).

[0499] In other embodiments described herein, the multi-specific SAR of the disclosure shows at least 30% (e.g., 40%, 50%, 60%, 70%, 80%, 90%, or 95%, 99% etc.) of the signaling activity against one or more of the target antigen expressing cell as compared to the signaling activity of each of the corresponding unispecific SARs when expressed in an effector cell and compared under similar conditions. In an embodiment, the multispecific SAR of the disclosure shows superior signaling activity against more than one antigen-expressing cells as compared to a unispecific SAR. The signaling activity can be measured using methods known in the art, such as the Jurkat-NFAT-GFP (JNG) cell assay. In an exemplary embodiment, JNG cells expressing the SAR with SEQ ID NO: 4163 or SEQ ID NO: 4723 show at least 30% GFP induction as observed with JNG cells expressing the SAR with SEQ ID NO: 7346 when cultured under similar conditions with RAJI cells expressing the CD19 antigen. In another embodiment, JNG cells expressing the multispecific CD19xCD22xCD20 SAR with SEQ ID NO: 4163 show greater GFP induction when co-cultured with CD19-null (e.g., CD19-KO) but CD22⁺ and CD20⁺ RAJI cells as compared with JNG cells expressing the CD19 unispecific SAR with SEQ ID NO: 7346. In another exemplary embodiment, JNG cells expressing the multispecific CD19xCD22xCD20 SAR with SEQ ID NO: 4163 show greater binding to CD22 and CD20 as compared with JNG cells expressing the CD22xCD20 bispecific construct.

[0500] In an embodiment described herein, the bispecific and/or multi-specific SAR of the disclosure shows at least 10% greater signalign activity (e.g., 20%, 30%, 40%, 50%, 60%, 70%, 80%, 90%, 100%, 150% or 200% greater affinity etc.) against one or more of the target antigens expressing cells as compared to the signaling activity of the corresponding bispecific/multispecific constructs comprising two or more scFv based antigen binding domains when expressed in an effector cell and compared under similar conditions. For example, JNG cells expressing the bispecific CD19xCD20 SAR with SEQ ID NO: 4088 show at least 10% greater GFP induction when co-cultured for 24 hours with RAJI (CD19⁺/CD20⁺) and/or RAJI-CD19-KO (CD19⁻/CD20⁺) cells as compared with JNG cells expressing the construct CD8SP-CD19-hu-mROO5-1-scFv-[hTCRa-CSDVP]-F-F2A-IgSP-CD20-7D8-scFv-[hTCRb-KACIAH]-F-P2A-PAC (SEQ ID NO: 21627).

[0501] In other embodiments described herein, the multi-specific SAR of the disclosure shows at least 30% (e.g., 40%, 50%, 60%, 70%, 80%, 90%, or 95%, 99% etc.) of the cytotoxic activity against each of the target antigen expressing cell as compared to the cytotoxic activity of each of the corresponding unispecific SARs when expressed in an effector cell and compared under similar conditions. The cytotoxic activity can be measured using methods known in the art, such as the Matador or radioactive chromium release assay. For example, T cells expressing the SAR with SEQ ID NO: 4163 or SEQ ID NO: 4723 show at least 30% cytotoxicity towards RAJI cells as observed with T cells expressing the SAR with SEQ ID NO: 7346 when assayed under similar conditions. In another embodiment, T cells expressing the multispecific CD19xCD22xCD20 SAR with SEQ ID NO: 4163 show greater cytotoxicity when co-cultured with CD19-null (e.g., CD19-KO) but CD22⁺ and CD20⁺ RAJI cells as compared with T cells expressing the CD19 unispecific SAR with SEQ ID NO: 7346. In another exemplary embodiment, T cells expressing the multispecific CD19xCD22xCD20 SAR with SEQ ID NO: 4163 show greater cytotoxicity to CD19⁻ /CD22⁺/CD20⁺ as compared with T cells expressing the CD22xCD20 bispecific construct with SEQ ID NO: 21626.

[0502] In an embodiment described herein, the bispecific and/or multi-specific SAR of the disclosure shows at least 10% greater cytotoxicity (e.g., 20%, 30%, 40%, 50%, 60%, 70%, 80%, 90%, 100%, 150% or 200% greater affinity etc.) against one or more of the target antigens expressing cells as compared to the cytotoxicity of the corresponding bispecific/multispecific constructs comprising two or more scFv based antigen binding domains when expressed in an effector cell and compared under similar conditions. For example, T cells expressing the bispecific CD19xCD20 SAR with SEQ ID NO: 4088 show at least 10% greater cytotoxicity when co-cultured for 24 hours with RAJI (CD19⁺/CD20⁺) and/or RAJI-CD19-KO (CD19⁻/CD20⁺) cells as compared with T cells expressing the construct CD8SP-CD19-hu-mROO5-1-scFv-[hTCRa-CSDVP]-F-F2A-IgSP-CD20-7D8-scFv-[hTCRb-KACIAH]-F-P2A-PAC.

[0503] In an embodiment described herein, the bispecific and/or multi-specific SAR of the disclosure comprising an adaptor binding domain attached to the N-terminus or near the N-terminus of a vL/vH fragment shows at least 10% greater cytotoxicity (e.g., 20%, 30%, 40%, 50%, 60%, 70%, 80%, 90%, 100%, 150% or 200% greater affinity etc.) against one or more of the target antigens expressing cells as compared to the cytotoxicity of the corresponding bispecific/multispecific constructs comprising one scFv and one adaptor binding domain that are individually attached to separate TCR constant chains when expressed in an effector cell and compared under similar conditions. For example, T cells expressing the SAR CD8SP-hu-mROO5-1-vL-[hTCRa-CSDVP]-F-F2A-IgSP-Apa-RZip-G4Sx3v2-hu-mROO5-1-vH-[hTCRb-KACIAH]-F-P2A-PAC with SEQ ID NO: 4342 show at least 10% greater cytotoxicity when co-cultured for 24 hours with SKOV3 cells (Her2+/CD19-) in the presence of EZip-tagged Herceptin or Her2-huMab4D5-D98W-scFv-G4S-EZIP (SEQ ID NO: 12182) as compared with T cells expressing the construct CD8SP-CD19-hu-mROO5-1-scFv-[hTCRa-CSDVP]-F-F2A-IgSP-RZIP-[hTCRb-KACIAH]-F-P2A-PAC (SEQ ID NO: 21628).

[0504] In other embodiments described herein, the multispecific SAR of the disclosure shows at least 30% (e.g., more than 40%, 50%, 60%, 70%, 80%, 90%, or 95%, 99%, 100% etc.) cytokine (e.g., TNFα, IFNγ, IL-2 etc.) production against each of the target antigen expressing cell as compared to the cytokine production of each of the corresponding unispecific SARs when expressed in an effector cell and compared under similar conditions. The cytokine production (e.g., TNFα, IFNγ, IL-2 etc.) can be measured using methods known in the art, such as ELISA. For example, T cells expressing the SAR with SEQ ID NO: 4163 or SEQ ID NO: 4723 show at least 30% TNFα, IFNγ and/or IL2 production as observed with T cells expressing the SAR with SEQ ID NO: 7346 when co-cultured with RAJI cells under similar conditions. In another exemplary embodiment, T cells expressing the multispecific CD19xCD22xCD20 SAR with SEQ ID NO: 4163 show greater TNFα, IFNγ and IL2 production when co-cultured with CD19-null (e.g., CD19-KO) but CD22⁺ and CD20⁺ RAJI cells as compared with T cells expressing the CD19 unispecific SAR with SEQ ID NO: 7346. In another exemplary embodiment, T cells expressing the multispecific CD19xCD22xCD20 SAR with SEQ ID NO: 4163 show greater TNFα, IFNγ and IL2 produciton when co-cultured with CD19⁻/CD22⁺/CD20⁺ as compared with T cells expressing the CD22xCD20 bispecific construct with SEQ ID NO: 21626.

[0505] In an embodiment described herein, the bispecific and/or multi-specific SAR of the disclosure shows at least 10% greater cytokine production (e.g., 20%, 30%, 40%, 50%, 60%, 70%, 80%, 90%, 100%, 150% or 200% greater affinity etc.) against one or more of the target antigens expressing cells as compared to the cytokine production of the corresponding bispecific/multispecific constructs comprising two or more scFv based antigen binding domains when expressed in an effector cell and compared under similar conditions.

[0506] In other embodiments described herein, the multi-specific SAR of the disclosure shows at least 30% (e.g., 40%, 50%, 60%, 70%, 80%, 90%, or 95%, 99% etc.) of the in vivo activity against each of the target antigen expressing cell as compared to the in vivo activity of each of the corresponding unispecific SARs when expressed in an effector cell and compared under similar conditions. In an embodiment, the in vivo activity is measured using xenograft model in immunodeficient mice. For example, T cells expressing the SAR with SEQ ID NO: 4163 or SEQ ID NO: 4723 show at least 30% tumor reduction as observed with T cells expressing the SAR with SEQ ID NO: 7346 when assayed using RAJI xenograft model in NSG immunodeficient mice. In another exemplary embodiment, T cells expressing the multispecific CD19xCD22xCD20 SAR with SEQ ID NO: 4163 show greater in vivo activity against with CD19-null (e.g., CD19-KO) but CD22⁺ and CD20⁺ RAJI cells as compared with T cells expressing the CD19 unispecific SAR with SEQ ID NO: 7346. In another exemplary embodiment, T cells expressing the multispecific CD19xCD22xCD20 SAR with SEQ ID NO: 4163 show greater in vivo activity against CD19⁻/CD22⁺/CD20⁺ RAJI cells as compared with T cells expressing the CD22xCD20 bispecific construct with SEQ ID NO: 21626.

[0507] In an embodiment described herein, the bispecific and/or multi-specific SAR of the disclosure shows at least 10% greater in vivo anti-tumor activity (e.g., 20%, 30%, 40%, 50%, 60%, 70%, 80%, 90%, 100%, 150% or 200% greater affinity etc.) against one or more of the target antigens expressing cells as compared to the in vivo anti-tumor activity of the corresponding bispecific/multispecific constructs comprising two or more scFv based antigen binding domains when expressed in an effector cell and compared under similar conditions.

[0508] In some embodiments, when expressed on the surface of a cell, binding of the antigen binding domain comprised by the Fv (i.e., vL/vH fragments) of a bispecific SAR to its cognate antigen is not substantially reduced by one or more AABDs that are operably linked to the N-terminus region of the vL and/or vH fragment of the said SAR. In some embodiments, when expressed on the surface of a cell, binding of the antigen binding domain comprised by the Fv (i.e., vL/vH fragments) of a bispecific/multispecific SAR comprising one or more AABDs that are operably linked to the N-terminus region of the vL and/or vH fragment of the said SAR to its cognate antigen is at least 30% (e.g., 40%, 50%, 60%, 70%, 80%, 90%, or 95%, 99% etc.) of the binding affinity of a corresponding unispecific SAR lacking the AABD. In an embodiment, the SAR is a single chain SAR (e.g., a 2^{nd} generation CAR or a single chain TFP or TAC). In an embodiment, the SAR is a double chain SAR (e.g., a double chain SIR, a double chain cTCR, a double chain Ab-TCR, a double chain TFP, a double chain zSIR etc.). In an exemplary embodiment, the AABD is a SVH, SVL, FHVH, vHH, non-immunoglobulin antigen binding domain, adaptor binding domain, epitope tag, mimotope, auto-antigen, ligand binding domain of a receptor or receptor binding domain of a ligand, an Fc binding receptor etc.

[0509] In some embodiments, when present on the surface of a cell, the antigen binding affinity of the antigen binding domain comprised by the Fv (i.e. vL/vH fragments) of a bispecific SAR comprising one or more AABDs that are operably linked to the N-terminus region of the vL and/or vH fragment of the said SAR is at least 70%, 80%, 85%, 90%, 95%, 96%, 97%, 98% or 99% of antigen binding affinity of the antigen binding domain of a corresponding unispecific SAR in which one or more AABDs are not operably linked to the N-terminus region of the vL and/or vH fragment.

[0510] In some embodiments, binding of the antigen binding domain of said first chain of SAR to its cognate antigen in the presence of said second chain of SAR (or a CAR) is 70%, 80%, 85%, 90%, 95%, 96%, 97%, 98% or 99% of binding of the antigen binding domain of said first chain of SAR to its cognate antigen in the absence of said second chain of SAR (or a CAR) to its cognate antigen. For example, if a cell expresses a double chain SAR in which the first chain comprises of an scFV targeting CD19 joined to TCRα and the second chain comprises of a camelid vHH fragment targeting CD123 joined to TCRβ2, then the binding of the antigen binding domain of said first chain of SAR to its cognate antigen (i.e. CD19) in the presence of said second chain of SAR is 70%, 80%, 85%, 90%, 95%, 96%, 97%, 98% or 99% of binding of the antigen binding domain of said first chain of SAR to its cognate antigen (i.e. CD19) in the absence of said second chain of SAR to its cognate antigen (i.e. CD123). In another example, if a cell expresses a double chain SAR in which the first chain comprises of a vL fragment of FMC63 antibody targeting CD19 operationally linked to TCRα and the second chain comprises of the vH fragment of FMC63 antibody targeting CD19 operationally linked to TCRβ2, along with a CAR comprising vHH fragment targeting CD123, then the binding of the antigen binding domain of said first and second chains of the double chain SAR to their cognate antigen (i.e. CD19) in the presence of said CAR is 70%, 80%, 85%, 90%, 95%, 96%, 97%, 98% or 99% of binding of the antigen binding domain of said first and second chains of the double-chain of SAR to their cognate antigen (i.e. CD19) in the absence of said CAR to its cognate antigen (i.e. CD 123).

[0511] In some embodiments, when present on the surface of a cell, the antigen binding domains of said first chain said second chain of a double chain SAR, associate with one another less than if both were scFv antigen binding domains. In some embodiments, the antigen binding domains of said first chain said second chain of a double chain SAR, associate with one another 5%, 10%, 20%, 30%, 40%, 50%, 60%, 70%, 80%, 90% or 99% less than if both were scFv antigen binding domains.

[0512] In some embodiments, the antigen specific domains of the SARs comprise one or more vL fragments. In exemplary embodiments, the one or more vL fragments are described in Table 3. In some embodiments, the polynucleotides encoding the one more vL fragments comprise, consist of or consist essentially of sequences set forth in any one or more of SEQ ID NOs: 46-282. In some embodiments, the polypeptides encoding the one more vL fragments comprise, consist of or consist essentially of sequences set forth in any one or more of SEQ ID NOS: 10736-10972 or sequences with 70-99% identity to sequences set forth in any one or more of SEQ ID NOS: 10736-10972 or sequences with 70-99% identity in the three complementarity determining regions (CDRs) to the sequences set forth in any one or more of SEQ ID NOS: 10736-10972 or sequences with less than 3 substitutions in the three CDRs of the sequences set forth in any one or more of SEQ ID NOS: 10736-10972 or sequences that bind to the same target antigens or the same epitopes on the target antigens as the sequences set forth in any one or more of SEQ ID NOS: 10736-10972. In some embodiments, the antigen specific domains of the SARs comprise one or more vH fragments. In exemplary embodiments, the one or more vH fragments are described in Table 3. In some embodiments, the polynucleotides encoding the one more vH fragments comprise, consist of or consist essentially of sequences set forth in any one or more of SEQ ID NOS: 288-524. In some embodiments, the polypeptides encoding the one more vH fragments comprise, consist of or consist essentially of sequences set forth in any one or more of SEQ ID NOS: 10978-11214 or sequences with 70-99% identity to sequences set forth in any one or more of SEQ ID NOS: 10978-11214 or sequences with 70-99% identity in the three complementarity determining regions (CDRs) to the sequences set forth in any one or more of SEQ ID NOS: 10978-11214 or sequences with less than 3 substitutions in the three CDRs of the sequences set forth in any one or more of SEQ ID NOS: 10978-11214 or sequences that bind to the same target antigens or the same epitopes on the target antigens as the sequences set forth in any one or more of SEQ ID NOS: 10978-11214.

[0513] In exemplary embodiments, the one or more AABD (e.g., VHH (or vHH) or SVH) fragments are described in Table 4. In some embodiments, the polynucleotides encoding the one more AABD (e.g., VHH (or vHH) or SVH) comprise, consist of or consist essentially of sequences set forth in any one or more of SEQ ID NOS: 830-902. In some embodiments, the polypeptides encoding the one more AABD (e.g., VHH (or vHH) or SVH) comprise, consist of or consist essentially of sequences set forth in any one or more of SEQ ID NOS: 11520-11592 or sequences with 70-99% identity to sequences set forth in any one or more of SEQ ID NOS: 11520-11592 or sequences with 70-99% identity in the three complementarity determining regions (CDRs) to the sequences set forth in any one or more of SEQ ID NOS: 11520-11592 or sequences with less than 3 substitutions in the three CDRs of the sequences set forth in any one or more of SEQ ID NOS: 11520-11592 or sequences with less than 3 substitutions in the three CDRs of the sequences set forth in any one or more of SEQ ID NOS: 11520-11592 or sequences that bind to the same target antigens or the same epitopes on the target antigens as the sequences set forth in any one or more of SEQ ID NOS: 11520-11592.

[0514] In exemplary embodiments, the one or more AABD are non-immunoglobulin antigen binding scaffold as described in Table 7. In some embodiments, the polynucleotides encoding the one more non-immunoglobulin antigen binding scaffolds comprise, consist of or consist essentially of sequences set forth in any one or more of SEQ ID NOS: 972-983. In some embodiments, the polypeptides encoding the one more non-immunoglobulin antigen binding scaffolds comprise, consist of or consist essentially of sequences set forth in any one or more of SEQ ID NOS: 11662-11673 or sequences with 70-99% identity to sequences set forth in any one or more of SEQ ID NOS: 11662-11673 or sequences that bind to the same target antigens or the same epitopes on the target antigens as the sequences set forth in any one or more of SEQ ID NOS: 11662-11673.

[0515] In exemplary embodiments, the one or more AABD are ligand binding domains of receptors. Exemplary such ligand binding domains of receptors are described in Table 8. In exemplary embodiments, the one or more AABD are ligand binding domains of receptors with SEQ ID NO: 11674 to 11691 or sequences with 70-99% identity to sequences set forth in any one or more of SEQ ID NOS: 11674 to 11691.

[0516] In one embodiment, the V_{H} domain is selected from SEQ ID NOs. 11517-11592 having one or more amino acid substitutions, deletions, insertions or other modifications compared to SEQ ID NOs. 11517-11592, and which retains a biological function of the single domain antibody.

[0517] In one embodiment, the modification is a conservative sequence modification. Thus, one or more amino acid residues within the CDR regions of a single domain antibody of the disclosure can be replaced with other amino acid residues from the same side chain family and the altered antibody can be tested for retained function (i.e., the functions set forth in (c) through (I) above) using the functional assays described herein.

[0518] In another embodiment, the vH (or V_{H}) domain is selected from one of the SEQ ID NOs. 11517-11592, but comprises one or more amino acid substitutions, for example 1 to 20, such as 1, 2, 3, 4, 5, 6, 7, 8, 9 or 10 amino acid substitutions. In one embodiment, the one or more amino acid substitution is in one or more of the framework areas. In another embodiment, the one or more amino acid substitution is in one or more of the CDRs. In one embodiment, the amino acid substitutions are in the framework and CDR sequences.

[0519] In one embodiment, the V_{H} single domain antibody that is a variant of a single domain antibody selected from those having SEQ ID NOs. 11517-11592 that comprises one or more sequence modification and has improvements in one or more of a property such as binding affinity, specificity, thermostability, expression level, effector function, glycosylation, reduced immunogenicity, or solubility as compared to the unmodified single domain antibody.

[0520] A skilled person will know that there are different ways to identify, obtain and optimise the antigen binding molecules as described herein, including in vitro and in vivo expression libraries. This is further described in the examples. Optimisation techniques known in the art, such as display (e.g., ribosome and/or phage display) and / or mutagenesis (e.g., error-prone mutagenesis) can be used. The disclosure therefore also comprises sequence optimised variants of the single domain antibodies described herein.

[0521] The disclosure also relates to the use of multiple human V_{H} domains in a SAR construct. In one embodiment, more than one, for example two or three V_{H} domains are selected from the V_{H} domains with SEQ ID NOs shown in Table 5 or amino acid sequences with at least 70%, 80% or 90% homology thereto (with corresponding nucleic acid SEQ ID Nos shown in Table 5).

[0522] In one embodiment, the binding domain of the SAR of the disclosure provides biparatopic targeting to any one or more of tha antigens listed in Table B. Thus, the binding domain comprises a first AABD (e.g., V_{H} single domain antibody) that binds to a first epitope of one or more antigens listed in Table B and an AABD (e.g., V_{H} single domain antibody), an Fv or an scF that binds to a second epitope of that antigen. The first and second epitope may be overlapping.

[0523] In one embodiment, the binding domain of the SAR of the disclosure provides biparatopic targeting to BCMA. Thus, the binding domain comprises a first AABD (e.g., V_{H} single domain antibody) that binds to a first epitope of BCMA and an AABD (e.g., V_{H} single domain antibody), an Fv, or an scFv that binds to a second epitope of BCMA. The first and second epitope may be overlapping.

[0524] In one embodiment, the binding domain of the SAR of the disclosure provides biparatopic targeting to CD19. Thus, the binding domain comprises a first AABD (e.g., V_{H} single domain antibody) that binds to a first epitope of CD19 and an AABD (e.g., V_{H} single domain antibody), an Fv or an scF that binds to a second epitope of CD19. The first and second epitope may be overlapping.

[0525] In one embodiment, the binding domain of the SAR of the disclosure provides biparatopic targeting to MSLN. Thus, the binding domain comprises a first AABD (e.g., V_{H} single domain antibody) that binds to a first epitope of MSLN and an AABD (e.g., V_{H} single domain antibody), an Fv or an scF that binds to a second epitope of MSLN. The first and second epitope may be overlapping.

[0526] In one embodiment, the binding domain of the SAR of the disclosure provides biparatopic targeting to CD20. Thus, the binding domain comprises a first AABD (e.g., V_{H} single domain antibody) that binds to a first epitope of CD20 and an AABD (e.g., V_{H} single domain antibody), an Fv or an scF that binds to a second epitope of CD20. The first and second epitope may be overlapping.

[0527] In one embodiment, the binding domain of the SAR of the disclosure provides biparatopic targeting to BCMA. Thus, the binding domain comprises a first AABD (e.g., V_{H} single domain antibody) that binds to a first epitope of BCMA and an AABD (e.g., V_{H} single domain antibody), an Fv or an scF that binds to a second epitope of BCMA. The first and second epitope may be overlapping.

[0528] In one embodiment, the binding domain of the SAR of the disclosure provides biparatopic targeting to CD22. Thus, the binding domain comprises a first AABD (e.g., V_{H} single domain antibody) that binds to a first epitope of CD22 and an AABD (e.g., V_{H} single domain antibody), an Fv or an scF that binds to a second epitope of CD22. The first and second epitope may be overlapping.

[0529] In one embodiment, the binding domain of the SAR of the disclosure provides biparatopic targeting to PSMA. Thus, the binding domain comprises a first AABD (e.g., V_{H} single domain antibody) that binds to a first epitope of PSMA and an AABD (e.g., V_{H} single domain antibody), an Fv or an scF that binds to a second epitope of PSMA. The first and second epitope may be overlapping.

[0530] In one embodiment, the binding domain of the SAR of the disclosure provides biparatopic targeting to CD123. Thus, the binding domain comprises a first AABD (e.g., V_{H} single domain antibody) that binds to a first epitope of CD123 and an AABD (e.g., V_{H} single domain antibody), an Fv or an scF that binds to a second epitope of CD123. The first and second epitope may be overlapping.

[0531] In one embodiment, the binding domain of the SAR of the disclosure provides biparatopic targeting to Her2. Thus, the binding domain comprises a first AABD (e.g., V_{H} single domain antibody) that binds to a first epitope of Her2 and an AABD (e.g., V_{H} single domain antibody), an Fv or an scF that binds to a second epitope of Her2. The first and second epitope may be overlapping.

[0532] In one embodiment, the binding domain of the SAR of the disclosure provides biparatopic targeting to CD123. Thus, the binding domain comprises a first vH single domain antibody that binds to a first epitope of CD123 and a second vH single domain antibody that binds to a second epitope of CD123. The first and second epitope may be overlapping.

[0533] In one embodiment, the binding domain of the SAR of the disclosure provides biparatopic targeting to Mucl6. Thus, the binding domain comprises a first vH single domain antibody that binds to a first epitope of Muc16 and a second vH single domain antibody that binds to a second epitope of Muc16. The first and second epitope may be overlapping.

[0534] In one embodiment, the binding domain of the SAR of the disclosure provides bispecific targeting. Thus, the binding domain comprises a vH single domain antibody or vHH domain that binds BCMA and a second binding moiety that targets a second target. The vH single domain antibody that binds BCMA is for example selected from SEQ ID NOs. 11543-11548, 11579-11580, 11585-11586 or from a sequence with at least 60%, 70%, 80% or 90% homology thereto. The second binding moiety may be an antibody fragment, typically a V_{H} single domain antibody, a centyrin, an affibody or a vHH domain. The second target may be selected from CD19, CD20, CD22, BCMA, PSCA, CS1, GPC3, CSPG4, EGFR, 5T4, L1 CAM, MUC16, ROR1, cKit, ROR, 1mesothelin, IL3Ra, c-Met, EGFRvlll, GD-2, NY-ESO-1 TCR or MAGE A3 TCR, HER2, Wilm’s tumor gene 1 (WT1), carcinoembryonic antigen (CEA), mucin 16, MUC1, an immuno checkpoint target or combinations thereof. However, a skilled person would understand that other tumor antigens are also potential combination targets within the scope of the invention. In the case of a single chain SAR, the two binding domains may be present in either order. For example, in the case of a bispecific single chain SAR targeting BCMA and CD38, the order of the vH domains may be BCMA-vH-linker-CD38-vH or CD38-vH-linker-BCMA-vH. Similarly, in the case of a double chain SAR, the two binding domains may be operably linked to either of the two constant chains. For example, in the case of a double chain SAR targeting BCMA and CD38, the configuration could be BCMA-vH-TCRα-2A-CD38-vH-TCRβ or CD38-vH-TCRα-2A-BCMA-TCRβ, or BCMA-vH-TCRβ-2A-CD38-vH-TCRα or CD38-vH-TCRβ-2A-BCMA-TCRα where 2A represents a cleavable linker such as P2A, T2A, F2A and the like. In another embodiment, in the case of a double chain SAR targeting BCMA and CD38, the configuration could be BCMA-vH-TCRγ-2A-CD38-vH-TCRδ or CD38-vH-TCRγ-2A-BCMA-TCRδ or BCMA-vH-TCRδ-2A-CD38-vH-TCRγ or CD38-vH-TCRδ-2A-BCMA-TCRγ, where 2A represents a cleavable linker such as P2A, T2A, F2A and the like.

[0535] In one embodiment, the fist binding domain of SAR comprises an AABD (e.g., V_{H} single domain antibody or SVH, vHH or Centyrin etc.) that binds BCMA and a second binding moiety that targets CD38. The AABD (e.g., SVH or vHH or Centryrin. etc.) that binds BCMA is for example selected from SEQ ID NOs. 11543-11548, 11579-11580, 11585-11586, 11673, 23167 or from a sequence with at least 60%, 70%, 80%, 90%, 98% homology thereto. The AABD (e.g., SVH, VHH or Centyrin) that binds CD38 is for example selected from SEQ ID NOs. 11535-11539, 11582, 11586, 23168 and 23169 or from a sequence with at least 60%, 70%, 80%, 90% or 98% homology thereto.

[0536] In an embodiment, the SAR further comprises vL/vH fragments that combine to form a Fv targeting a specific antigen. Exemplary vL/vH fragments and their target antigens are provided in Table 3. Additional exemplary vL/vH fragments, their LC-CDR1-3, HC-CDR1-3 and their target antigens are provided in Table 39. In an embodiment, the SAR further comprises Va/Vb or Vg/Vd fragments that combine to form a TCR-Fv targeting different antigens. Exemplary Va/Vb or Vg/Vd fragments and their target antigens are provided in Table 4.

[0537] In one embodiment, one binding domain of SAR comprises an AABD (e.g., V_{H} single domain antibody or SVH, vHH or Centyrin etc.) that binds BCMA and a second binding moiety that targets CD19. The AABD (e.g., V_{H} single domain antibody or SVH, vHH or Centyrin etc.) that binds BCMA is for example selected from SEQ ID NOs. 11543-11548, 11579-11580, 11585-11586, 11673 or from a sequence with at least 60%, 70%, 80% or 90% homology thereto. The AABD that binds CD19 is for example selected from SEQ ID NOs. 11524, 11526-11529, 11588 or from a sequence with at least 60%, 70%, 80% or 90% homology thereto. In an embodiment, the SAR further comprises vL/vH fragments that combine to form a Fv targeting a specific antigen. Exemplary vL/vH fragments and their target antigens are provided in Table 3. In an embodiment, the SAR further comprises Va/Vb or Vg/Vd fragments that combine to form a TCR-Fv targeting different antigens. Exemplary Va/Vb or Vg/Vd fragments and their target antigens are provided in Table 4.

[0538] In one embodiment, the first binding domain of SAR comprises an AABD (e.g., V_{H} single domain antibody or SVH, vHH or Centyrin etc.) that binds BCMA and a second binding moiety that targets CD22. The AABD that binds BCMA is for example selected from SEQ ID NOs. 11543-11548, 11579-11580, 11585-11586, 11673 or from a sequence with at least 60%, 70%, 80% or 90% homology thereto. The AABD that binds CD22 is for example selected from SEQ ID NOs. 11532-11534 or from a sequence with at least 60%, 70%, 80%, or 90% homology thereto. In an embodiment, the SAR further comprises vL/vH fragments that combine to form a Fv targeting a specific antigen. Exemplary vL/vH fragments and their target antigens are provided in Table 3. In an embodiment, the SAR further comprises Va/Vb or Vg/Vd fragments that combine to form a TCR-Fv targeting different antigens. Exemplary Va/Vb or Vg/Vd fragments and their target antigens are provided in Table 4.

[0539] In one embodiment, the fist binding domain of SAR comprises an AABD (e.g., V_{H} single domain antibody or SVH, vHH or Centyrin etc.) that binds BCMA and a second binding moiety that targets CD20. The V_{H} single domain antibody that binds BCMA is for example selected from SEQ ID NOs. 11543-11548, 11579-11580, 11585-11586, 11673 or from a sequence with at least 60%, 70%, 80% or 90% homology thereto. The AABD that binds CD2 is for example selected from SEQ ID NOs. 11530-31, 11589 of from a sequence with at least 60%, 70%, 80% or 90% homology thereto. In an embodiment, the SAR further comprises vL/vH fragments that combine to form a Fv targeting a specific antigen. Exemplary vL/vH fragments and their target antigens are provided in Table 3. In an embodiment, the SAR further comprises Va/Vb or Vg/Vd fragments that combine to form a TCR-Fv targeting different antigens. Exemplary Va/Vb or Vg/Vd fragments and their target antigens are provided in Table 4.

[0540] In one embodiment, the fist binding domain of SAR comprises an AABD that binds CD22 and a second binding moiety that targets CD20. The AABD that binds CD22 is for example selected from SEQ ID NOs. 11532-11534 or from a sequence with at least 60%, 70%, 80% or 90% homology thereto. The AABD that binds CD20 is for example selected from SEQ ID NOs. 11530-31, 11589 or from a sequence with at least 60%, 70%, 80% or 90% homology thereto. In an embodiment, the SAR further comprises vL/vH fragments that combine to form a Fv targeting a specific antigen. Exemplary vL/vH fragments and their target antigens are provided in Table 3. In an embodiment, the SAR further comprises Va/Vb or Vg/Vd fragments that combine to form a TCR-Fv targeting different antigens. Exemplary Va/Vb or Vg/Vd fragments and their target antigens are provided in Table 4.

[0541] In one embodiment, the fist binding domain of SAR comprises an AABD that binds CD22 and a second binding moiety that targets CD19. The AABD that binds CD22 is for example selected from SEQ ID NOs. 11532-11534 or from a sequence with at least 60%, 70%, 80% or 90% homology thereto. The AABD that binds CD19 is for example selected from SEQ ID NOs. 11524, 11526-11529, 11588 or from a sequence with at least 60%, 70%, 80% or 90% homology thereto. In an embodiment, the SAR further comprises vL/vH fragments that combine to form a Fv targeting a specific antigen. Exemplary vL/vH fragments and their target antigens are provided in Table 3. In an embodiment, the SAR further comprises Va/Vb or Vg/Vd fragments that combine to form a TCR-Fv targeting different antigens. Exemplary Va/Vb or Vg/Vd fragments and their target antigens are provided in Table 4.

[0542] In one embodiment, the fist binding domain of SAR comprises an AABD that binds CD19 and a second binding moiety that targets CD20. The AABD that binds CD19 is for example selected from SEQ ID NOs. 11524, 11526-11529, 11588 or from a sequence with at least 60%, 70%, 80% or 90% homology thereto. The V_{H} single domain antibody that binds CD20 is for example selected from SEQ ID NOs. 11530-31, 11589 or from a sequence with at least 60%, 70%, 80% or 90% homology thereto. In an embodiment, the SAR further comprises vL/vH fragments that combine to form a Fv targeting a specific antigen. Exemplary vL/vH fragments and their target antigens are provided in Table 3. In an embodiment, the SAR further comprises Va/Vb or Vg/Vd fragments that combine to form a TCR-Fv targeting different antigens. Exemplary Va/Vb or Vg/Vd fragments and their target antigens are provided in Table 4.

[0543] In one embodiment, the fist binding domain of SAR comprises an AABD that binds CD19 and a second binding moiety that targets CD38. The V_{H} single domain antibody that binds CD19 is for example selected from SEQ ID NOs. 11524, 11526-11529, 11588 or from a sequence with at least 60%, 70%, 80% or 90% homology thereto. The AABD that binds CD38 is for example selected from SEQ ID NOs. 11535-11539, 11582 and 11586 or from a sequence with at least 60%, 70%, 80% or 90% homology thereto. In an embodiment, the SAR further comprises vL/vH fragments that combine to form a Fv targeting a specific antigen. Exemplary vL/vH fragments and their target antigens are provided in Table 3. In an embodiment, the SAR further comprises Va/Vb of Vg/Vd fragments that combine to form a TCR-Fv targeting different antigens. Exemplary Va/Vb or Vg/Vd fragments and their target antigens are provided in Table 4.

[0544] In one embodiment, the fist binding domain of SAR comprises AABD that binds CD19 and a second binding moiety that targets CD123. The AABD that binds CD19 is for example selected from SEQ ID NOs. 11524, 11526-11529, 11588 or from a sequence with at least 60%, 70%, 80% or 90% homology thereto. The AABD that binds CD123 is for example selected from SEQ ID NOs. 11569-70 or from a sequence with at least 60%, 70%, 80% or 90% homology thereto. In an embodiment, the SAR further comprises vL/vH fragments that combine to form an Fv targeting a specific antigen. Exemplary vL/vH fragments and their target antigens are provided in Table 3. In an embodiment, the SAR further comprises Va/Vb or Vg/Vd fragments that combine to form a TCR-Fv targeting different antigens. Exemplary Va/Vb or Vg/Vd fragments and their target antigens are provided in Table 4.

[0545] In one embodiment, the fist binding domain of SAR comprises AABD that binds CD19 and a second binding moiety that targets BAFF-R. In an embodiment, the SAR further comprises vL/vH fragments that combine to form a Fv targeting a specific antigen. Exemplary vL/vH fragments and their target antigens are provided in Table 3. In an embodiment, the SAR further comprises Va/Vb or Vg/Vd fragments that combine to form a TCR-Fv targeting different antigens. Exemplary Va/Vb or Vg/Vd fragments and their target antigens are provided in Table 4.

[0546] In one embodiment, at least one binding domain of SAR comprises an AABD that binds to the spike glycoprotein of a virus. In an embodiment, the virus is coronavirus. In an embodiment, the at least one binding domain of SAR comprises an AABD that binds to the COVID-19 spike glycoprotein. In an embodiment, the at least one binding domain of SAR comprises an AABD that binds to the SARS spike glycoprotein. In an embodiment, the at least one binding domain of SAR comprises an AABD that binds to the MERS spike glycoprotein. The AABD that binds COVID-19 spike glycoprotein is for example the extracellular domain of ACE2 (Angiotensin-converting Enzyme 2; Genbank: AY623811) or a fragment thereof. The AABD that binds COVID-19 spike glycoprotein is for example a SVH, VHH, Centyrin, Affibody, vL, vH, Fv, scFv or a fragment thereof. The AABD that binds SARS spike glycoprotein is for example the extracellular domain of ACE2 receptor or a fragment thereof. The AABD that binds SARS spike glycoprotein is for example a SVH, VHH, Centyrin, Affibody, vL, vH, Fv, scFv or a fragment thereof.

[0547] In one embodiment, the fist binding domain of SAR comprises AABD that binds CD19 and a second binding moiety that targets CD79b. The V_{H} single domain antibody that binds CD19 is for example selected from SEQ ID NOs. 11524, 11526-11529, 11588 or from a sequence with at least 60%, 70%, 80% or 90% homology thereto. In an embodiment, the SAR further comprises vL/vH fragments that combine to form a Fv targeting a specific antigen. Exemplary vL/vH fragments and their target antigens are provided in Table 3. In an embodiment, the SAR further comprises Va/Vb or Vg/Vd fragments that combine to form a TCR-Fv targeting different antigens. Exemplary Va/Vb or Vg/Vd fragments and their target antigens are provided in Table 4.

[0548] In one embodiment, the binding domain of the SAR of the disclosure provides bispecific targeting. Thus, the binding domain comprises an AABD that binds PSMA and a second binding moiety that targets a second target. The AABD antibody that binds PSMA is for example selected from SEQ ID NOs. 11520-11523, 11667-11669 or from a sequence with at least 60%, 70%, 80% or 90% homology thereto. The second binding moiety may be an antibody fragment, typically a V_{H}single domain antibody. The second target may be selected from CD19, CD20, CD22, BCMA, PSCA, CS1, GPC3, CSPG4, EGFR, ST4, L1 CAM, MUC16, ROR1, cKit, mesothelm, IL3Ra, c-Met, EGFRvlll, GD-2, NY-ESO-1 TCR or MAGE A3 TCR, HER2, Wilm’s tumor gene 1 (WT1), carcinoembryonic antigen (CEA), mucin 16, MUC1, an immuno checkpoint target or combinations thereof. However, a skilled person would understand that other tumor antigens are also potential combination targets within the scope of the invention.

[0549] In one aspect the novel antigen binding domain of a SAR binds to an antigen preferentially or exclusively expressed on hematopoietic lineage cells. Exemplary antigens that are preferentially or exclusively expressed on hematopoietic lineage cells are CD19, CD20, CD22, BCMA, CS1, CD33, MPL, CD138, CD38 and CD123. In one aspect the novel antigen binding domain of a SAR binds to an antigen preferentially or exclusively expressed on non-hematopoietic lineage cells. Exemplary antigens that are preferentially or exclusively expressed on non-hematopoietic lineage cells are Mesothelin (MSLN), Her2, EGFR, PSMA, IL13Ra2 and the like. In one aspect the SAR expresses two or more novel antigen binding domains where at least one of the novel antigen binding domain binds to an antigen preferentially or exclusively expressed on hematopoietic lineage cells and at least one of the novel antigen domain binds to an antigen expressed on non-hematopoietic lineage cells.

[0550] In a preferred embodiment, a vH single domain antibody for use in a SAR as described herein is generated from human heavy chain only antibody produced in a transgenic rodent that expresses human heavy chain loci.

[0551] The mouse having functionally-silenced endogenous lambda and kappa L-chain loci may, for example, be made as disclosed in WO 2003/000737, which is hereby incorporated by reference in its entirety.

[0552] Alternative methods known in the art may be used for deletion or inactivation of endogenous mouse or rat immunoglobulin genes and introduction of human V_{H}, D and J genes in combination with mouse immunoglobulin constant region genes lacking C_{H}1 domains, mouse enhancer and regulatory regions.

[0553] The transgenic rodent described above produces human variable heavy chains which can be isolated and used for the generation of human V_{H} domains for use in the SARs of the invention, for example as described in WO2016/062990 or WO2016/113557.

[0554] Thus, the disclosure also relates to a SAR comprising a single V_{H} domain antibody generated from human variable heavy chains produced in a TKO mouse that expresses human heavy chain loci.

[0555] In a embodiment, a vL single domain antibody for use in a SAR as described herein is generated from human heavy chain only antibody produced in a transgenic rodent that expresses human light chain loci.

[0556] In addition to a binding domain as described in detail above, the SAR of the disclosure may further comprise one or more TCR constant chains or fragments and variants thereof. Exemplary TCR constant chains are provided in Table 12. The components of TCR constant chains, including TCR Ig-Like-C1-Domains (SEQ ID NO: 11848-11865), TCR connecting peptides (SEQ ID NO:11867-11875), transmembrane domains (SEQ ID NO: 11877-11881), and TCR cytosolic domains (SEQ ID NO: 11883-11886) are provided in Tables 13-16. The TCR constant chains and fragments for the construction of the SARs are for example selected from SEQ ID NOs., 11848-11865, 11867-11875, 11877-11881, 11883-11886 or from a sequence with at least 60%, 70%, 80% or 90% homology thereto or functional variants thereof.

[0557] The vector encoding SAR generally have a limited capacity to encode a SAR. For example, the size of a SAR polynucleotide affects the titer of the lentiviral or retroviral vector. As such, a SAR that is small in size is desirable. In one aspect, the present disclosure describes a unispecific double chain SAR inclusive of two signal peptides and an intervening 2A linker that is less than 1765 nucleotide, less than 1770 nucleotide, less than 1780 nucleotide, less than 1790 nucleotide, less than 1800 nucleotide, less than 1820 nucleotide in size. In one aspect, the present disclosure describes a unispecific double chain SAR where one of the chain without the signal sequence is no longer than 815 nucleotide, 820 nucleotide, 825 nucleotides or 850 nucleotides and the second chain without the signal sequence is no longer than 790 nucleotides, 800 nucleotides, 810 nucleotides, 815 nucleotides, 820 nucleotides, 825 nucleotides or 850 nucleotides. In one aspect the SAR has the backbone of a SIR, cTCR, Ab-TCR, AABD-TCR, εTFP, γTFP, δTFP, αβTFP, γδTFP or a TCR. In one aspect the SAR has the backbone of a SIR. In one aspect the SAR has the backbone of a SIR, cTCR, Ab-TCR, AABD-TCR, αβTFP, γδTFP or a TCR with TCRα and TCRβ constant chains. In one aspect the SAR has the backbone of a SIR, cTCR, Ab-TCR, AABD-TCR, αβTFP, γδTFP or a TCR with TCRγ and TCRδ constant chains.

[0558] The disclosure also provides novel deletion mutants of the constant chains of TCRα (SEQ ID Nos: 11793-11803), TCRβ (SEQ ID NO: 11805-11817), TCRγ (SEQ ID NO: 11819-11823) and TCRδ (SEQ ID NO:11825-11830) (Table 12) that can be used in the construction of SIRs and SARs based on the SIR backbones. Use of the deletion mutants of the constant chains of TCRα, TCRβ, TCRγ and TCRδ help to reduce the size of the SIR/SAP constructs, improve their packaging into viral vectors and thereby improve viral vector titer and transduction efficiency.

[0559] In one aspect, the present disclosure describes a double chain SAR where the TCRα constant chain fragment is less than 370, 380, 390, 400, 410 or 421 nucleotides in length and TCRβ constant chain fragment is less than 490 nucleotides, less than 500 nucleotides, less than 510 nucleotides, less than 520 nucleotides, less than 530 nucleotides or less than 540 nucleotides in length. In one aspect the SAR has the backbone of a SIR, cTCR, Ab-TCR, AABD-TCR, αβTFP, or a TCR. In one aspect the SAR has the backbone of a SIR. In one aspect the SAR has the backbone of a SIR with TCRα and TCRβ constant chains or TCRγ and TCRδ constant chains. In one aspect the SAR has the backbone of a cTCR with TCRα and TCRβ constant chains or TCRy and TCRδ constant chains. In one aspect the TCRα and TCRβ constant chain fragments carry mutations that enhance their chain-pairing and reduce chain pairing with the endogenous TCRαβ chains. In one aspect the TCRα and TCRβ constant chain fragments carry mutations that result in an extra cysteine bond (double bond) between the two chains. Exemplary TCRα and TCRβ constant chains that can be used in the construction of the SARs of the disclosure are hTCRa-T48C-opt-d17 (SEQ ID NO: 11797) and hTCRb-S57C-opt1-d17 (SEQ ID NO: 11810) or TCRα and TCRβ chain variants comprising the above. Exemplary TCRα and TCRβ chain variants are provided in Table 12.

[0560] In one aspect the disclosure provides SARs comprising a TCRα constant chain fragment comprising hTCRa-T48C-opt-d17 (SEQ ID NO: 11797) or a variant with at least 70%, 75%, 80%, 85%, 90%, 95%, 98%, 99%, 99.9% homology to the sequence represented by hTCRa-T48C-opt-d17 (SEQ ID NO: 11797). In one aspect the disclosure provides SARs comprising a TCRα constant chain fragment comprising hTCRa-T48C-opt-d17 (SEQ ID NO: 11797) or its deletion mutant which retains the ability to pair with the complementary TCRβ constant chain. In one aspect the disclosure provides SARs comprising a TCRα constant chain fragment comprising hTCRa-T48C-opt-d17 (SEQ ID NO: 11797) or its deletion mutant which retains the ability to incorporate into the TCR/CD3 complex, recruit a TCR signaling module and/or induce T cell signaling upon engagement of target antigen. Additional TCRα constant chain and deletion mutants that can be used in the construction of the SARs are provided in Table 12.

[0561] In one aspect the disclosure provides SARs comprising a TCRβ constant chain fragment comprising hTCRb-S57C-opt1-d17 (SEQ ID NO: 11810) or a variant with at least 70%, 75%, 80%, 85%, 90%, 95%, 98%, 99%, 99.9% homology to the amino acid sequence represented by hTCRb-S57C-opt1-d17 (SEQ ID NO: 11810). In one aspect the disclosure provides SARs comprising a TCRβ constant chain fragment comprising hTCRb-S57C-opt1-d17 (SEQ ID NO: 11810) or its deletion mutant which retains the ability to pair with the complementary TCRα constant chain. In one aspect the disclosure provides SARs comprising a TCRβ constant chain fragment comprising hTCRb-S57C-opt1-d17 (SEQ ID NO:11810) or its deletion mutant which retains the ability to incorporate into the TCR/CD3 complex, recruit a TCR signaling module and/or induce T cell signaling upon engagement of target antigen. Additional TCRα constant chain and deletion mutants that can be used in the construction of the SARs are provided in Table 12.

[0562] In one aspect the disclosure provides SARs comprising a TCRγ constant chain fragment comprising hTCRg-Opt-d12 (SEQ ID NO: 11821) or a variant with at least 70%, 75%, 80%, 85%, 90%, 95%, 98%, 99%, 99.9% homology to the sequence represented by hTCRg-Opt-d12 (SEQ ID NO:11821). In one aspect the disclosure provides SARs comprising a TCRγ constant chain fragment comprising hTCRg-Opt-d12 (SEQ ID NO: 11821) or its deletion mutant which retains the ability to pair with the complementary TCRδ constant chain. In one aspect the disclosure provides SARs comprising a TCRg constant chain fragment comprising hTCRg-Opt-d12 (SEQ ID NO: 11821) or its deletion mutant which retains the ability to incorporate into the TCR/CD3 complex, recruit a TCR signaling module and/or induce T cell signaling upon engagement of target antigen.

[0563] In one aspect the disclosure provides SARs comprising a TCRγ constant chain fragment comprising hTCRg-Opt-d5 (SEQ ID NO (PRT): 11819) or a variant with at least 70%, 75%, 80%, 85%, 90%, 95%, 98%, 99%, 99.9% homology to the amino-acid sequence represented by hTCRg-Opt-d5 (SEQ ID NO (PRT): 11819). In one aspect the disclosure provides SARs comprising a TCRγ constant chain fragment comprising hTCRg-Opt-d5 (SEQ ID NO: 11819) or its deletion mutant which retains the ability to pair with the complementary TCRδ constant chain. In one aspect the disclosure provides SARs comprising a TCRγ constant chain fragment comprising hTCRg-Opt-d5 (SEQ ID NO: 11819) or its deletion mutant which retains the ability to incorporate into the TCR/CD3 complex, recruit a TCR signaling module and/or induce T cell signaling upon engagement of target antigen. Additional TCRγ constant chain and deletion mutants that can be used in the construction of the SARs are provided in Table 12.

[0564] In one aspect the disclosure provides SARs comprising a TCRδ constant chain fragment comprising hTCRd-opt-d13 (SEQ ID NO: 11828) or a variant with at least 70%, 75%, 80%, 85%, 90%, 95%, 98%, 99%, 99.9% homology to the sequence represented by hTCRd-opt-d13 (SEQ ID NO: 11828). In one aspect the disclosure provides SARs comprising a TCRδ constant chain fragment comprising hTCRd-opt-d13 (SEQ ID NO: 11828) or its deletion mutant which retains the ability to pair with the complementary TCRγ constant chain. In one aspect the disclosure provides SARs comprising a TCRδ constant chain fragment comprising hTCRd-opt-d13 (SEQ ID NO: 11828) or its deletion mutant which retains the ability to incorporate into the TCR/CD3 complex, recruit a TCR signaling module and/or induce T cell signaling upon engagement of target antigen.

[0565] In one aspect the disclosure provides SARs comprising a TCRδ constant chain fragment comprising hTCRd-opt-d2 (SEQ ID NO: 11825) or a variant with at least 70%, 75%, 80%, 85%, 90%, 95%, 98%, 99%, 99.9% homology to the sequence represented by hTCRd-opt-d5 (SEQ ID NO: 11828). In one aspect the disclosure provides SARs comprising a TCRδ constant chain fragment comprising hTCRd-opt-d5 (SEQ ID NO:11825) or its deletion mutant which retains the ability to pair with the complementary TCRγ constant chain. In one aspect the disclosure provides SARs comprising a TCRδ constant chain fragment comprising hTCRd-opt-d5 (SEQ ID NO: 11825) or its deletion mutant which retains the ability to incorporate into the TCR/CD3 complex, recruit a TCR signaling module and/or induce T cell signaling upon engagement of target antigen. Additional TCRδ constant chain and deletion mutants that can be used in the construction of the SARs are provided in Table 12.

[0566] In one aspect, the disclosure relates to an isolated SAR comprising an antigen binding domain, a transmembrane domain and an intracellular signaling domain wherein said antigen binding domain comprises one or more, for example at least two, human variable heavy chain (VH) domains and is devoid of light chains.

[0567] In one embodiment, the SARs of the disclosure comprise one or more connecting peptides. Exemplary connecting peptides are represented by SEQ ID NO: 11867-11875 (Table 14). In one embodiment, the SARs of the disclosure comprise one or more TCR cytosolic domains. Exemplary TCR cytosolic domains are represented by SEQ ID NO: 11833-11886 (Table 16).

[0568] In one embodiment, the SARs of the disclosure are co-expressed with one or more accessory modules. Exemplary accessory modules include K13, Synth-K13, MC159, hNEMO-K277A, tBCMA etc. (Table 24).

[0569] In one embodiment, the SAR of the disclosure further comprises a hinge or spacer region which connects the extracellular antigen binding domain and the transmembrane domain. This hinge or spacer region can be used to achieve different lengths and flexibility of the resulting SAR. Examples of a hinge or spacer region that can be used according to the disclosure include, but are not limited to, Fc fragments of antibodies or fragments or derivatives thereof, hinge regions of antibodies, or fragments or derivatives thereof, C_{H}2 regions of antibodies, C_{H}3 regions of antibodies, artificial spacer sequences, for example peptide sequences, or combinations thereof. In one embodiment, the hinge is an lgG4 hinge or a CD8A hinge. Specifically, within the scope of disclosure are hinge sequences shown in Table 17 and 18.

[0570] In addition to a binding domain as described in detail above, the SAR of the disclosure further comprises one or two transmembrane domains. A “transmembrane domain” (TMD) as used herein refers to the region of the SAR which crosses the plasma membrane and is connected to the endoplasmic signaling domain and the antigen binding domain, in case of the latter optionally via a hinge. In one embodiment, the transmembrane domain of the SAR of the disclosure is the transmembrane region of a transmembrane protein (for example Type I transmembrane proteins), an artificial hydrophobic sequence or a combination thereof. In one embodiment, the transmembrane domain comprises the CD3zeta domain or CD28 transmembrane domain. Other transmembrane domains will be apparent to those of skill in the art and may be used in connection with alternate embodiments of the invention. Specifically, within the scope of disclosure are TMD sequences shown in table 15 and 18.

[0571] The SAR of the disclosure may optionally further comprise an intracellular “activation domain” that transmits activation signals to T cells and directs the cell to perform its specialized function. Examples of domains that transduce the effector function signal and can be used accoridng to the disclosure include but are not limited to the ζ chain of the T-cell receptor complex or any of its homologs (e.g., η chain, FCER1G and β chains, MB 1 (Iga) chain, B29 (Ig) chain, etc.), human CD3zeta chain, CD3 polypeptides (γ, δ and ε), syk family tyrosine kinases (Syk, ZAP 70, etc.), src family tyrosine kinases (Lck, Fyn, Lyn, etc.). Other activation domains will be apparent to those of skill in the art and may be used in connection with alternate embodiments of the invention. Specifically, within the scope of disclosure are intracellular activation domain sequence shown in SEQ ID NO: 11896 and 11783.

[0572] In one embodiment, the SAR of the disclosure further comprises one or more co-stimulatory domains to enhance SAR cell activity after antigen specific engagement. Inclusion of this domain in the SAR of the disclosure enhances the proliferation, survival and/or development of memory cells. Specifically, within the scope of disclosure are co-stimulatory domains sequences with SEQ ID NO:11898 and 11781-82 as shown in Table 18.

[0573] In one embodiment, the SAR of the disclosure further comprises a “linker domain” or “linker region” that connects different domains of the SAR. This domain includes an oligo- or polypeptide region from about 1 to 500 amino acids in length. Suitable linkers will be apparent to those of skill in the art and may be used in connection with alternate embodiments of the invention. Specifically, within the scope of disclosure are linker domain sequences shown in Table 11 and 13. In an embodiment, the linker is a long linker and comprise a sequence between 25 and 500 amino acids in length. In particular, a long linker is used for connecting an AABD to a TCR connecting peptide which lack a vL, vH, Va, Vb, Vg, Vd or Ig linker domain.

[0574] In one embodiment, the SAR of the disclosure further comprises one or more “leader sequences” or signal peptides (SP). In one embodiment, the leader sequence is a CD8A signal peptide (SED ID NO: 31) or an IgH signal peptide (SEQ ID NO: 33). Specifically, within the scope of disclosure are leader sequences shown in Table 2. In an embodiment, each chain of a double chain SAR or one and a half chain SAR comprises a leader sequence or a signal peptide. The signal peptide is cleaved from the mature SAR polypeptide. Thus, although the sequences of SAR polypeptides are shown with their signal peptide (SP), it is understood by those skilled in the art that the signal peptide will not be present on the mature SAR polypeptide.

[0575] In some aspects, the SAR of the disclosure includes an antigen binding domain that transmits an inhibitory signal.

[0576] The SAR, may further include a label, for example a label that facilitates imaging, such as a fluorescent label or other tag. This can, for example be used in methods for imaging tumor binding. The label may be conjugated to the antigen binding domain.

[0577] In one embodiment, the SARs of the disclosure are co-expressed with one or more accessory modules. Exemplary accessory modules include K13, Synth-K13, MC159, hNEMO-K277A, tBCMA etc. (Table 24).

[0578] In some embodiments, the extracellular domain of any one of the SARs disclosed herein may comprise one or more epitopes specific for (e.g., specifically recognized by) an antigen binding agent, e.g., a monoclonal antibody. These epitopes are also referred to herein as mAb-specific epitopes. Exemplary mAb-specific epitopes are disclosed in International Patent Publication No. WO 2016/120126, which is incorporated herein in its entirety. The disclosure provides new composition and locations for incorporation of epitopes in a SAR. In these embodiments, the extracellular domain comprises one or more antigen binding domains that bind to target antigens and one or more epitopes that bind to one or more antibodies (e.g., monoclonal antibody, bispecific antibody, antibody fragments, vHH, non-immunoglobulin antigen binding scaffold etc.). SARs comprising the epitopes can be single-chain or multi-chain.

[0579] The inclusion of eptiopes specific for monoclonal antibodies and other antigen binding agents (e.g., vHH, non-immunoglobulin antigen binding domains etc.) in the extracellular domain of the SARs described herein allows sorting and depletion of engineered immune cells expressing the SARs. In some embodiments, this feature also promotes recovery of endogenous antigen-expressing cells that were depleted by administration of engineered immune cells expressing the SARs.

[0580] Accordingly, in some embodiments, the present disclosure relates to a method for sorting and/or depleting the engineered immune cells endowed with the SARs comprising antigen-binding agents (e.g., mAb)-specific epitopes and a method for promoting recovery of endogenous antigen-expressing cells (i.e., normal healthy cells that express the antigen targeted by the SAR cells), such as bone marrow progenitor cells.

[0581] Several epitope-monoclonal antibody couples can be used to generate CARs comprising monoclonal antibody specific epitopes; in particular, those already approved for medical use, such as CD20 epitope/rituximab as a non-limiting example.

[0582] The disclosure also encompasses methods for sorting the engineered immune cells endowed with the antigen-specific SARs expressing the mAb-specific epitope(s) and therapeutic methods where the activation of the engineered immune cells endowed with these SARs is modulated by depleting the cells using an antibody that targets the external ligand binding domain of said CARs.

[0583] In some embodiments, the SAR-T cell comprises a polynucleotide encoding a suicide polypeptide, such as for example RQR8. See, e.g., WO2013153391 A, which is hereby incorporated by reference in its entirety. In SAR-T or SAR-NK cells comprising the polynucleotide, the suicide polypeptide is expressed at the surface of a SAR-T cell or SAR-NK cells. In some embodiments, the suicide polypeptide comprises the amino acid sequence shown in SEQ ID NO: 22419.

[0584] The suicide polypeptide may also comprise a signal peptide at the amino terminus, for example, CD8 signal peptide (SEQ ID NO: 10721).

[0585] When the suicide polypeptide is expressed at the surface of a CAR-T cell, binding of rituximab to the R epitopes of the polypeptide causes lysis of the cell. More than one molecule of rituximab may bind per polypeptide expressed at the cell surface. Each R epitope of the polypeptide may bind a separate molecule of rituximab. Deletion of antigen-specific SAR-T cells may occur in vivo, for example by administering rituximab to a patient. The decision to delete the transferred cells may arise from undesirable effects being detected in the patient which are attributable to the transferred cells, such as for example, when unacceptable levels of toxicity are detected.

[0586] In some embodiments, upon administration to a patient, engineered immune cells expressing at their cell surface any one of the antigen-specific SARs described herein may reduce, kill or lyse endogenous antigen-expressing cells of the patient. In one embodiment, a percentage reduction or lysis of antigen X-expressing endogenous cells or cells of a cell line expressing antigen X by engineered immune cells expressing any one of the antigen X-specific SARs described herein is at least about or greater than 10%, 15%, 20%, 25%, 30%, 35%, 40%, 45%, 50%, 55%, 60%, 65%, 70%, 75%, 80%, 85%, 90%, or 95%. In one embodiment, a percentage reduction or lysis of antigen X-expressing endogenous cells or cells of a cell line expressing antigen X by engineered immune cells expressing any one of the antigen X-specific SARs described herein is about 5% to about 95%, about 10% to about 95%, about 10% to about 90%, about 10% to about 80%, about 10% to about 70%, about 10% to about 60%, about 10% to about 50%, about 10% to about 40%, about 20% to about 90%, about 20% to about 80%, about 20% to about 70%, about 20% to about 60%, about 20% to about 50%, about 25% to about 75%, or about 25% to about 60%. In one embodiment, the endogenous antigen X-expressing cells are endogenous antige X-expressing bone marrow cells. In an exemplary embodiment, the endogenous antigen X is selected from the group of, but not limited to, CD19, CD33, CD34, CD123, MPL, CD70, CD20, CD22, CD30, BCMA, SLAMF7, CD138, CLL1, CD38 or a combination thereof.

[0587] In one embodiment, the percent reduction or lysis of target cells, e.g., a cell line expressing antigen X, by engineered immune cells expressing at their cell surface membrane an antigen X-specific SAR of the disclosure can be measured using the assay disclosed herein (e.g., Flow cytometry).

[0588] In one aspect, provided are methods for in vitro sorting of a population of immune cells, wherein a subset of the population of immune cells comprises engineered immune cells expressing any one of the antigen X-specific SARs comprising epitopes specific for an antigen binding agent (e.g., monoclonal antibody, polyclonal antibody, vHH, DARPIN, Centyrin etc.) described herein. The method comprises contacting the population of immune cells with an antigen binding agent (e.g., monoclonal antibody) specific for the epitopes and selecting the immune cells that bind to the antigen binding agent (e.g., monoclonal antibody) to obtain a population of cells enriched in engineered immune cells expressing antigen X-specific SAR.

[0589] In some embodiments, said antigen binding agent (e.g., monoclonal antibody) specific for said epitope is optionally conjugated to a fluorophore. In this embodiment, the step of selecting the cells that bind to the antigen binding agent (e.g., monoclonal antibody) can be done by Fluorescence Activated Cell Sorting (FACS). In some embodiments, said antigen binding agent (e.g., monoclonal antibody) specific for said epitope is optionally conjugated to a magnetic particle. In this embodiment, the step of selecting the cells that bind to the antigen binding agent (e.g., monoclonal antibody) can be done by Magnetic Activated Cell Sorting (MACS).

[0590] In some embodiments, the extracellular binding domain of the SAR comprises a mAb-specific epitope of one or more of SEQ ID NO: 22411-22432.

[0591] According to the disclosure, cells to be administered to the recipient may be enriched in vitro from the source population. Methods of expanding source populations are known in the art, and may include selecting cells that express an antigen such as CD34 antigen, using combinations of density centrifugation, immuno-magnetic bead purification, affinity chromatography, and fluorescent activated cell sorting, known to those skilled in the art.

[0592] In some embodiments, the method used for sorting immune cells expressing a SAR is the Magnetic- Activated Cell Sorting (MACS).

[0593] In some embodiments, the mAb used in the method for sorting immune cells expressing the SAR is chosen from alemtuzumab, ibritumomab tiuxetan, muromonab-CD3, tositumomab, abciximab, basiliximab, brentuximab vedotin, cetuximab, infliximab, rituximab, bevacizumab, certolizumab pegol, daclizumab, eculizumab, efalizumab, gemtuzumab, natalizumab, omalizumab, palivizumab, ranibizumab, tocilizumab, trastuzumab, vedolizumab, adalimumab, belimumab, canakinumab, denosumab, golimumab, ipilimumab, ofatumumab, panitumumab, QBEND-10 and/or ustekinumab. In some embodiments, said mAb is rituximab. In another embodiment, said mAb is QBEND-10.

[0594] In some embodiments, the SAR-T or SAR-NK cell comprises a selected epitope within the scFv having a specificity to be recognized by a specific antibody. See, e.g., W02016/120216, which is hereby incorporated by reference in its entirety. Such an epitope facilitates sorting and/or depleting the SAR-T or SAR-NK cells. The epitope can be selected from any number of epitopes known in the art. In some embodiments, the epitope can be a target of a monoclonal antibody approved for medical use, such as, for example without limitation, the CD20 epitope recognized by rituximab.

[0595] In some embodiments, the epitope is located within the SAR. In an embodiment, the epitope is attached near the N-terminus or at the N-terminus of vL and/or vH fragment comprising the antigen binding domain of a SAR (e.g., 1^{st} generation CAR, 2^{nd} generation CAR, SIR, cTCR, Ab-TCR, zSIR, TFPε, TFPγ, TFPδ, αβTFP, γδTFP, TCR, HLA-independent TCR etc.). In an embodiment, the epitope is attached near the N-terminus or at the N-terminus of AABD fragment comprising the antigen binding domain of a SAR (e.g., 1^{st} generation CAR, 2^{nd} generation CAR, SIR, cTCR, Ab-TCR, AABD-TCR, zSIR, TFPε, TFPγ, TFPδ, αβTFP, γδTFP, TCR, HLA-independent TCR etc.). In an embodiment, the epitope is separated from the antigen binding domaion of the SAR via a linker. In some embodiments, two instances of the same epitope, separated by linkers, may be used in the SAR.

[0596] In some embodiments, the epitope-specific antibody may be conjugated with a cytotoxic drug. It is also possible to promote CDC cytotoxicity by using engineered antibodies on which are grafted component(s) of the complement system. In some embodiments, activation of the CAR-T cells can be modulated by depleting the cells using an antibody which recognizes the epitope.

[0597] The SARs described herein may be synthesized as single polypeptide chains. In this embodiment, the antigen-specific targeting regions are at the N- terminus, arranged in tandem and are separated by a linker peptide.

[0598] In another aspect, the disclosure provides an isolated SAR polypeptide molecule comprising one or more antigen binding domains (e.g., antibody or antibody fragment, a ligand or a receptor) that bind to antigens as described herein and are jointed to one or more T cell receptor constant chains.

[0599] In some embodiments, a SAR may comprise or consist of a single polypeptide that contains a single antigen binding domain joined to the NH2-terminus of a single T cell receptor constant chain (Class 1).

[0600] In some embodiments, a SAR comprises or consists of two polypeptides that assemble to make a functional SAR (Class 2). Each of the polypeptides of such dual chain Class 2 SAR contains a T cell receptor constant chain and contains (as in Class 2A) or does not contain (as in Class 2B) one or more antigen binding domains. In Class 2A SARs, each of the antigen binding domains is joined to the N-terminus of a separate T cell receptor constant chain. For example, antigen binding domain 1 (e.g., vL fragment of an antibody) is joined to the constant chain of T cell receptor beta (TCRβ) to constitute functional polypeptide unit 1 and antigen binding domain 2 (vH fragment of an antibody) is joined to the constant chain of T cell receptor α (TCRα) to constitute functional polypeptide unit 2. The two functional polypeptide units of such SAR are coexpressed in the same cell and pair with each other to become functionally active. It should be noted that each of the antigen binding domains may in turn be bispecific or multispecific, thereby allowing the Class 2 SARs to target more than 2 antigens.

[0601] In some embodiments, a dual polypeptides chain SAR comprises or consists of an antigen binding domain that is joined to the NH2-terminus of only one T cell receptor constant chain (functional polypeptide unit 1) but is coexpressed with a second T cell receptor constant chain. Such SARs are designated Class 2B. The purpose of the second T cell receptor constant chain in such Class 2B SARs is to facilitate the cell surface expression of the functional polypeptide unit 1 (i.e., antigen binding domain 1 joined to a T cell receptor constant chain). As such, the second T cell receptor constant chain in Class 2B SARs may be expressed by itself or expressed as a fusion protein carrying an epitope tag (e.g., MYC, V5, AcV5, G4Sx2, StrepTagII etc.) or expressed as a fusion protein carrying any irrelevant protein fragment (e.g., vL or vH fragment) so long as the irrelevant protein does not interfere with the assembly and function of the functional unit 1. As an example, a Class 2B SAR may comprise or consist of antigen binding domain 1 joined to the constant chain of T cell receptor alpha (TCRα) to constitute funcational polypeptide unit 1 and the empty (i.e., lacking an antigen binding domain) constant chain of T cell receptor β (TCRβ) constituting the functional polypeptide unit 2.

[0602] In some embodiments, the two functional polypeptide units of Class 2 SARs are coexpressed in a cell using different vectors. In some embodiments, the two functional polypeptide units of the Class 2 SARs are coexpressed in a cell using a single vector which employs two separate regulatory elements (e.g., promoters) to encode for two polynucleotides encoding the two functional polypeptide units of Class 2 SARs. In some embodiments, the two functional polypeptide units of the Class 2 SARs are coexpressed in a cell using a single vector which employs a single promoter to express a polynucleotide containing an IRES sequence that separates the nucleotide fragments encoding the two polypeptides of the SAR. In some embodiments, the two functional polypeptide units of the Class 2 SARs are coexpressed in a cell using a single vector which employs a single promoter to express a polynucleotide encoding for a single polypeptide containing a cleavable linker (e.g., F2A, T2A, E2A, P2A, Furine-SGSG-F2A, Furine-SGSG-T2A, Furine-SGSG-E2A, Furine-SGSG-P2A etc.). The resulting mRNA encodes a single polypeptide which subsequently generates the two functional polypeptide units of the SAR. In some embodiments, the two functional polypeptide units of the Class 2 SARs are coexpressed using transfection of a single mRNA sequence that encodes for both functional polypeptide units, while in other embodiments the two functional polypeptide units are coexpressed by transfection of two different mRNA sequences, each encoding for one functional polypeptide unit. In some embodiments, the vector or mRNA encoding the SAR may encode for additional genes/proteins (therapeutic controls, inhibitory molecules, accessory modules etc.), which may be separated from the SAR encoding sequences by IRES or cleavable linkers or combination thereof. In another embodiment, a therapeutic control or accessory module or both could be expressed in the cell in which SAR is expressed using a separate vector or mRNA. It is to be understood that the therapeutic controls or accessory modules are not essential for the function of a SAR and any of the SAR of the embodiment can be used without the therapeutic control or the accessory modules. For example, the antibiotic resistance cassette, such as PAC (puromycin resistance gene), can be removed from the SAR-encoding vectors of this disclosure without compromising the functionality of the SAR.

[0603] Also provided are functional variants of the SARs described herein, which have substantial or significant sequence identity or similarity to a parent SAR, which functional variant retains the biological activity of the SAR of which it is a variant. Functional variants encompass, for example, those variants of the SAR described herein (the parent SAR) that retain the ability to recognize target cells to a similar extent, the same extent, or to a higher extent, as the parent SAR. In reference to the parent SAR, the functional variant can, for instance, be at least about 30%, about 50%, about 75%, about 80%, about 85%, about 90%, about 91%, about 92%, about 93%, about 94%, about 95%, about 96%), about 97%, about 98%, about 99% or more identical in amino acid sequence to the parent SAR.

[0604] A functional variant can, for example, comprise the amino acid sequence of the parent SAR with at least one conservative amino acid substitution. Alternatively, the functional variants can comprise the amino acid sequence of the parent SAR with at least one non-conservative amino acid substitution. In this case, it is preferable for the non-conservative amino acid substitution to not interfere with or inhibit the biological activity of the functional variant. The non-conservative amino acid substitution may enhance the biological activity of the functional variant, such that the biological activity of the functional variant is increased as compared to the parent CAR.

[0605] The SARs (including functional portions and functional variants) can be of any length, i.e., can comprise any number of amino acids, provided that the SARs (or functional portions or functional variants thereof) retain their biological activity, e.g., the ability to specifically bind to antigen, detect diseased cells in a mammal, or treat or prevent disease in a mammal, etc. For example, the SAR can be about 300 to about 5000 amino acids long, such as 300, 400, 500, 600, 700, 800, 900, 1000 or more amino acids in length.

[0606] In another aspect, the disclosure relates to an isolated nucleic acid construct comprising at least one nucleic acid encoding a SAR as defined above. In one embodiment, the nucleic acid encodes a protein that targets one or more of the targets listed in Table B.

[0607] The nucleic acid and amino acid SEQ ID Nos of suitable SAR sequences within the scope of the disclosure are are listed in Tables 25-36 and 41-50. Also within the scope of the disclosure are sequences with at least 60%, 70%, 80% or 90% homology thereto.

[0608] The term “nucleic acid,” “polynucleotide,” or “nucleic acid molecule” refers to deoxyribonucleic acid (DNA) or ribonucleic acid (RNA), or a combination of a DNA or RNA. RNA includes in vitro transcribed RNA or synthetic RNA; an mRNA sequence encoding a SAR polypeptide as described herein). The nucleic acid may further comprise a suicide gene. The nucleic acid may further comprise a kill-switch. The nucleic acid may further comprise a therapeutic control or accessory module. The construct may be in the form of a plasmid, vector, transcription or expression cassette.

[0609] In one embodiment, the vector is an in vitro transcribed vector, e.g., a vector that transcribes RNA of a nucleic acid molecule described herein. The expression vector may be provided to a cell in the form of a viral vector. Viral vector technology is well known in the art and is described, for example, in Sambrook et al. (Molecular Cloning: A Laboratory Manual, Cold Spring Harbor Laboratory, New York, 2013). A number of viral based systems have been developed for gene transfer into mammalian cells. For example, retroviruses such as, adenovirus vectors are used. In one embodiment, a lentivirus vector is used. This is demonstrated in the examples. The disclosure also relates to a virus comprising a SAR described above.

[0610] The disclosure also includes an RNA construct that can be directly transfected into a cell. A method for generating mRNA for use in transfection involves in vitro transcription (IVT) of a template with specially designed primers, followed by poly A addition, to produce a construct containing 3′ and 5′ untranslated sequence (“UTR”) (e.g., a 3′ and/or 5′ UTR described herein), a 5′ cap (e.g., a 5′ cap described herein) and/or Internal Ribosome Entry Site (IRES) (e.g., an IRES described herein), the nucleic acid to be expressed, and a poly A tail, typically 50-2000 bases in length (SEQ ID NO: 13-16). RNA so produced can efficiently transfect different kinds of cells. In one embodiment, the template includes sequences for the SAR. In one embodiment, an RNA SAR vector is transduced into a cell, e.g., a T cell or a NK cell, by electroporation. In another embodiment, an RNA SAR vector is transduced into a cell, e.g., a T cell or a NK cell, by causing transient perturbations in cell membrane using a microfluid device. The different chains (or functional polypeptide units) of a SAR can be also introduced in a cell using one or more than one vector a combination of different vectors or techniques.

[0611] In another embodiment, one chain or functional polypeptide unit of SAR can be introduced using a retroviral vector while the other functional polypeptide unit is introduced using a lentiviral vector. In another aspect, one functional polypeptide unit is introduced using a lentiviral vector while the other functional polypeptide unit is introduced using a sleeping beauty transposon. In yet another aspect, one functional polypeptide unit is introduced using a lentiviral vector while the other functional polypeptide unit is introduced using RNA transfection. In yet another aspect, one functional polypeptide units is produced in a cell by genetic recombination at the endogeneous TCR chain loci using gene targeting techniques known in the art while the other functional polypeptide unit is introduced using a lentiviral or a retroviral vector.

[0612] RNA can be introduced into target cells using any of a number of different methods, which include, but are not limited to, electroporation, cationic liposome mediated transfection using lipofection, polymer encapsulation, peptide mediated transfection, or biolistic particle delivery systems such as “gene guns” (see, for example, Nishikawa, et al. Hum Gene Ther., 12(8):861-70 (2001) or by causing transient perturbations in cell membranes using a microfluidic device (see, for example, patent applications WO 2013/059343 A1 and PCT/US2012/060646).

[0613] In some embodiments, the non-viral method includes the use of a transposon (also called a transposable element). In some embodiments, a transposon is a piece of DNA that can insert itself at a location in a genome, for example, a piece of DNA that is capable of self-replicating and inserting its copy into a genome, or a piece of DNA that can be spliced out of a longer nucleic acid and inserted into another place in a genome. For example, a transposon comprises a DNA sequence made up of inverted repeats flanking genes for transposition. Exemplary methods of nucleic acid delivery using a transposon include a Sleeping Beauty transposon system (SBTS) and a piggyBac (PB) transposon system.

[0614] In some embodiments, cells, e.g., T or NKT or stem cells or iPSC or synthetic T cell, are generated that express a SAR described herein by using a combination of gene insertion using the SBTS and genetic editing using a nuclease (e.g., Zinc finger nucleases (ZFNs), Transcription Activator-Like Effector Nucleases (TALENs), the CRISPR/Cas system, or engineered meganuclease reengineered homing endonucleases).

[0615] In some embodiments, use of a non-viral method of delivery permits reprogramming of cells, e.g., T or NKT or stem cells or iPSC or synthetic T cell, and direct infusion of the cells into a subject. Advantages of non-viral vectors include but are not limited to the ease and relatively low cost of producing sufficient amounts required to meet a patient population, stability during storage, and lack of immunogenicity.

[0616] In a further aspect, the disclosure also relates to an isolated cell or cell population comprising one or more nucleic acid construct as described above. The cell has thus been genetically modified to express a SAR nucleic acid construct of the invention. Thus, the disclosure provides genetically engineered cells which comprise and stably express a SAR nucleic acid construct of the invention. In one embodiment, the cell is selected from the group consisting of a T cell, a NKT cell, a Natural Killer (NK) cell, a cytotoxic T lymphocyte (CTL), a regulatory T cell, hematopoietic stem cells and/or pluripotent embryonic/induced stem cells. T cells may be isolated from a patient for transfection with a SAR nucleic acid construct of the invention.

[0617] It is specifically contemplated herein that each of the individual embodiments described herein can be combined, e.g., in a single cell. By way of non-limiting example, a single cell could comprise a first complete multi-component SAR and a second partial multi-component SAR, wherein each multi-component SAR can be according to any of the embodiments described herein.

[0618] For example, cells can be transfected with the nucleic acid of the disclosure ex vivo. Various methods produce stable transfectants which express a SARs of the invention. In one embodiment, a method of stably transfecting and re-directing cells is by electroporation using naked DNA. Additional methods to genetically engineer cells using naked DNA encoding a SAR of the disclosure include but are not limited to chemical transformation methods (e.g., using calcium phosphate, dendrimers, liposomes and/or cationic polymers), non-chemical transformation methods (e.g., electroporation, optical transformation, gene electrotransfer and/or hydrodynamic delivery) and/or particle-based methods (e.g., impalefection, using a gene gun and/or magnetofection). The transfected cells demonstrating presence of an integrated un-rearranged vector and expression of the SAR may be expanded ex vivo. Viral transduction methods may also be used to generate redirected cells which express the SAR of the invention.

[0619] In some embodiments, a vector of the disclosure can further comprise a promoter. Non-limiting examples of a promoter include, for example, an EF1α promoter, an EF1α promoter variant (SEQ ID NO: 7), a CMV IE gene promoter, MNDU3 promoter (SEQ ID NO: 24), an ubiquitin C promoter, a core-promoter or a phosphoglycerate kinase (PGK) promoter. In some embodiments, the vector is an RNA nucleic acid. In some embodiments, the vector comprises a poly(A) tail. For example, contemplated herein is a poly(A) tail comprising about 150 adenosine bases (SEQ ID NO: 13-16). In some embodiments, the vector comprises a 3′UTR. In an embodiment, the SAR is expressed under the control of a synthetic notch (SynNotch) combinatorial antigen circuit (Dannenfelser et al., 2020, Cell Systems 11, 215-228).

[0620] In another aspect, the disclosure provides a method of making a cell (e.g., an immune effector cell or population thereof) comprising introducing into (e.g., transducing) a cell, e.g., a T cell, a NKT cell or a stem cell or a iPSC or a synthetic T cell described herein, with a vector comprising a nucleic acid encoding a SAR, e.g., a SAR described herein; or a nucleic acid encoding a SAR molecule e.g., a SAR described herein.

[0621] The cell can be an immune effector cell (e.g., a T cell, a NKT cell, a NK cell, a monocyte/macrophage or a combination thereof) or a stem/progenitor cell that can give rise to an immune effector cell or a synthetic T cell. In some embodiments, the cell in the methods is diaglycerol kinase (DGK) and/or Ikaros deficient. In some embodiments, the cell in the methods is deficient in constant chains of endogenous T cell receptor α, β1, β2, pre-TCRα, γ or δ or combination thereof. In some embodiments, the cell in the methods is deficient in HLA antigens. In some embodiments, the cell in the methods is deficient in β2 microglobulin. In some embodiments, the cell in the methods is deficient in expression of the target antigen of SAR. For example, the SAR expressing T cell is deficient in endogenous CD5 in case the SAR is directed against CD5 or is deficient in TCR-betalconstant chain in case the SAR is directed against TCR-beta1 constant chain or is deficient in TCR-beta2 constant chain in case the SAR is directed against TCR-beta2 or is deficient in CS1 in case the SAR is directed against CS1.

[0622] In some embodiment, the introducing the nucleic acid molecule encoding a SAR comprises transducing a vector comprising the nucleic acid molecule encoding a SAR, or transfecting the nucleic acid molecule encoding a SAR, wherein the nucleic acid molecule is an in vitro transcribed RNA. In some embodiments, the nucleic acid molecule encodes two or more components of a SAR, are introduced by transducing a cell with more than one vector or transfecting with two or more nucleic acid molecules encoding the different subunits of a SAR. For example, a cell may be transduced with two separate vectors each encoding one of the two functional polypeptide units of a SAR. Similarly, a cell may be transduced with two separate in vitro transcribed RNAs each encoding one of the two functional polypeptide units of a SAR. In addition to the functional polypeptide units of the SAR, each of the RNAs may carry a different selection marker or reporter (e.g., tEGFR or CD34 or CNB30 or mutant DHFR) that can be used to select the cells transduced with both the RNAs and thus expressing both the the functional polypeptide units of the SAR.

[0623] In some embodiments, the method further comprises: a) providing a population of immune effector cells (e.g., T cells or NK cells); and b) removing T regulatory cells from the population, thereby providing a population of T regulatory-depleted cells; wherein steps a) and b) are performed before introducing the nucleic acid encoding the SAR to the population. In embodiments of the methods, the T regulatory cells comprise CD25⁺ T cells, and are removed from the cell population using a CD25 antibody, or fragment thereof. The CD25 antibody, or fragment thereof, can be operably linked to a substrate, e.g., a bead. In other embodiments, the population of immune effector cells that is depleted of T regulatory cells provided from step (b) contains less than 30%, 25%, 20%, 15%, 10%, 5%, 4%, 3%, 2%, 1% of CD25+ cells. In yet other embodiments, the method further comprises: removing cells from the population which express a disease-associated antigen that does not comprise CD25 to provide a population of T regulatory-depleted and disease-associated antigen depleted cells prior to introducing the nucleic acid encoding a SAR to the population. The disease-associated antigen can be selected from CD19, CD30, CD123, CD20, CD22, CD33, CD138, BCMA, Lym1, Lym2, CD79b, CD170, CD179b, CD14 or CD11b, or a combination thereof.

[0624] In other embodiments, the method further comprises depleting cells from the population which express a checkpoint inhibitor, to provide a population of T regulatory-depleted and inhibitory molecule depleted cells prior to introducing the nucleic acid encoding a SAR to the population. The checkpoint inhibitor can be chosen from CTLA-4, PD-1, LAG-3, TIM3, B7-H1, CD160, P1H, 2B4, CEACAM (e.g., CEACAM-1, CEACAM-3, and/or CEACAM-5), TIGIT, BTLA, and LAIR1.

[0625] The disclosure also provides recombinant cells, e.g., an immune effector cell, (e.g., a population of cells, e.g., a population of immune effector cells) and/or a stem cell (e.g., a hematopoietic stem cell, a peripheral blood stem cell, a bone marrow derived stem cell, an immune stem cell, an induced pluripotent stem cell or iPSC) comprising a nucleic acid molecule, a SAR polypeptide molecule, or a vector as described herein.

[0626] In some embodiments, the cell is an immune cell. Non-limiting examples of immune cells include T-cells, NKT cells, NK-cells and monocyte/macrophages. Further, non-limiting examples of T-cells include Tregs, CD8+ T cells, and CD4+ T cells. In one embodiment, the cell is a human T cell. In some embodiments, the cell is a human cell. In some embodiments, the cell is a dog cell.

[0627] In one embodiment, the human cell is a T cell, an NKT cell or an NK cell that expresses P-glycoprotein (P-gp or Pgp; MDR1, ABCB1, CD243). In one embodiment, the human cell is a T cell, an NKT cell or an NK cell that stains dull with dyes that are substrates of P-glycoprotein mediated efflux. In one embodiment, the human cell is a T cell, an NKT cell or an NK cell that is resistant to a drug transported by P-gp. In one embodiment, the cell is a T cell as described in application no. PCT/US2017/042248, which is incorporated herein by reference. In some embodiments cells which lack expression of P-gp or P-gp activity are removed from the population.

[0628] The single chain and double chain SARs of the disclosure can be expressed in T cells in which the expression of the endogenous TCRα (TRAC), TCRβ (TRBC), TCRγ (TRGC) and/or TCRδ (TRDC) chains has been reduced or eliminated using methods known in the art. Such T cells in which the expression of endogenous functional TRAC, TRBC, TRGC and/or TRDC chains has been reduced or eliminated can be used for the purpose of allogeneic cell therapy.

[0629] In one embodiment, the cell is a T cell and the T cell is deficient in one or more of endogenous T cell receptor chains. T cells stably lacking expression of a functional TCR according to the disclosure may be produced using a variety of approaches such as use of Zn finger nucleases (ZFN), CRISP/Cas9 and shRNA targeting the endogenous T cell receptor chains. A non-limiting exemplary method relating to shRNAs is described in US 2012/0321667A1, which is incorporated herein by reference. Another non-limitng expemplary method relating to eliminating endogenous TCR expression using ZFNs targeting constant regions of α and β chains of TCRs is described in Torikai H et al (Blood, 119(24), June, 14 2012). Methods to generate T cells with reduced or eliminated expression of one or more TCR chains using CRISP/Cas9 are also known in the art. It is to be noted that in some embodiments, the SARs of the disclosure comprise constant chains of TCRs that are codon-optimized or are designed to differ in nucleotide sequences from the endogenous TCR constant chains and therefore escape targeting by the CRISP/Cas9, ZFN and/or shRNAs targeting the endogenous TCR constant chains.

[0630] A T cell lacking a functional endogenous TCR can be, e.g., engineered such that it does not express any functional endogenous TCR on its surface, engineered such that it does not express one or more subunits (e.g., constant chains of endogenous TCRα, TCRβ1, TCRβ2, TCRγ, TCRδ or pre-TCRα) that comprise a functional endogenous TCR or engineered such that it produces very little functional endogenous TCR on its surface. Alternatively, the T cell can express a substantially impaired endogenous TCR, e.g., by expression of mutated or truncated forms of one or more of the subunits of the TCR. The term “substantially impaired TCR” means that this TCR will not elicit an adverse immune reaction in a host. The unmodified TCRs are generally poorly expressed in primary human T cells when expressed ectopically (e.g., using retroviral or lentiviral vectors), suggesting that they compete inefficiently with endogenous TCR chains for cell surface expression. However, optimization of the TCR chains for efficient translation in human cells results in better expression of the introduced TCR. More importantly, ectopic expression of such dominant TCR prevented surface expression of a large proportion of the endogenous TCR repertoire in human T cells.

[0631] SARs with the backbones of TFPs comprising CD3ε, CD3γ, and CD3δ chains (designated as CD3ε/γ/δ TFPs) have poor expression and activity when expressed in αβ T cells that lack or have impaired functional endogenous or native TCRα or TCRβ chain polypeptide on their surface. For example, SARS represented by SEQ ID NO: 4110-4112 have impaired expression and activity (e.g., T cell activation, proliferation, cytokine production and cytotoxicity etc.) in αβ T cell in which the endogenous TRAC genomic locus has been disrupted. The disclosure provides a solution to this problem by re-expressing a TCRα constant chain (TRAC chain) polypeptide or a fragment thereof in T cells in which the expression of native full length TCRα chain polypeptide has been reduced or eliminated as described in WO2019067805, which is incorporated in its entirety by reference herein. In an exemplary embodiment, the expression and signaling activity of SARs based on CD3ε/γ/δ backbone can be restored in αβ T cells in which the expression of native TCRα chain is reduced or eliminated by expressing into such T cells a nucleic acid construct encoding an exogenous TCRα constant chain (TRAC chain) (e.g., SEQ ID NO (DNA): 1045 and SEQ ID NO (PRT): 11735) or a fragment thereof. In another exemplary embodiment, the expression and signaling activity of SARs based on CD3ε/γ/δ backbone can be restored in αβ T cells in which the expression of native TCRβ chain is reduced or eliminated by expressing into such T cells a nucleic acid construct encoding an exogenous TCRβ constant chain (TRBC chain) (e.g., SEQ ID NO (DNA): 1061 and SEQ ID NO (PRT): 11751) or a fragment thereof. In another exemplary embodiment, the expression and signaling activity of SARs based on CD3ε/γ/δ backbone can be restored in γδ T cells in which the expression of native TCRγ chain is reduced or eliminated by expressing into such T cells a nucleic acid construct encoding an exogenous TCRγ constant chain (TRGC chain) (e.g., SEQ ID NO (DNA): 1082 and SEQ ID NO (PRT): 11771) or a fragment thereof. In another exemplary embodiment, the expression and signaling activity of SARs based on CD3ε/γ/δ backbone can be restored in γδ T cells in which the expression of native TCRδ chain is reduced or eliminated by expressing into such T cells a nucleic acid construct encoding an exogenous TCRδ constant chain (TRDC chain) (e.g., SEQ ID NO (DNA): 1084 and SEQ ID NO (PRT): 11774) or a fragment thereof.

[0632] In another exemplary embodiment, the expression and signaling activity of SARs based on CD3ε/γ/δ backbone can be restored in αβ T cells in which the expression of native TCRα and/or β chain is reduced or eliminated by expressing into such T cells a nucleic acid construct encoding an exogenous TCRγ constant chain (TRGC chain) (e.g., SEQ ID NO (DNA): 1082 and SEQ ID NO (PRT): 11771) or a fragment thereof and/or an exogenous TCRδ constant chain (TRDC chain) (e.g., SEQ ID NO (DNA): 1084 and SEQ ID NO (PRT): 11774) or a fragment thereof.

[0633] The disclosure further provides that the expression and activity of CD3ε/γ/δ based SARs can be restored in T cells with impaired or lack of expression native TCRα/β/γ or δ chains by coexpression of a SAR on the SIR, Ab-TCR, AABD-TCR, or TCR backbones comprising the missing TCRα/β/γ or δ constant chains. The disclosure provides that for combination therapies with allogeneic T cells involving two SARs, a CD3α/γ/δ TFP-based SAR is typically combined with a SAR based on SIR, Ab-TCR, AABD-TCR or TCR backbones which incorporate the TCR constant chain or TCR constant chain fragment whose expression is reduced or missing in the allogeneic T cells.

[0634] In an embodiment, the single chain and double chain SARs of the disclosure can be targeted to the TRAC, TRBC, TRGC and/or TRDC locus in T cells using methods as described in PCT/US2018/053247 and Eyquem J et al (Nature, 543(7643):113-117, 2017) which are incorporated in their entirety by reference herein. Such T cells in which the endogenous TRAC, TRBC, TRGC and/or TRDC loci are disrupted by insertion of SAR can be used for the purpose of allogeneic cell therapy.

[0635] In an embodiment, the SAR of the disclosure is expressed under the physiological regulatory mechanisms afforded by endogenous TCR genes. In an embodiment, the SAR is expressed under the promoter and 3′ untranslated regulatory mechanisms afforded by endogenous TCR genes. In one embodiment, the expression cassette encoding a SAR is targeted to the endogenous TCRα, TCRβ1/β2, TCRγ or TCRδ gene locus.

[0636] In an embodiment, the SAR is targeted to the endogenous TCRα gene locus (TRAC) so that the TCRα constant chain of the SAR (i.e., a SAR with the backbone of a SIR, cTCR, Ab-TCR, AABD-TCR, αβTFP, or TCR) is expressed wholly or in part from the endogenous native TCRα constant chain gene. In an embodiment, the SAR is targeted to the endogenous TCRα gene locus (TRAC) so that the TCRα constant chain of the SAR (i.e., a SAR with the backbone of a SIR, cTCR, Ab-TCR, AABD-TCR, αβTFP, or TCR) is encoded completely or in part by at least one of the exons of the endogenous TCRα constant chain gene. In an embodiment, the SAR is targeted to the endogenous TCRα gene locus (TRAC) so that the TCRα constant chain of the SAR (i.e., a SAR with the backbone of a SIR, cTCR, Ab-TCR, AABD-TCR, αβTFP, or TCR) shares completely or in part the 3′ untranslated region and polyadenylation sequence of the native/endogenous TCRα constant chain gene.

[0637] In an embodiment, the SAR is targeted to the endogenous TCRβ gene locus (TRBC) so that the TCRβ constant chain of the SAR (i.e., a SAR with the backbone of a SIR, cTCR, Ab-TCR, AABD-TCR, αβTFP, or TCR) is expressed wholly or in part from the endogenous native TCRβ constant chain gene. In an embodiment, the SAR is targeted to the endogenous TCRβ gene locus (TRBC) so that the TCRβ constant chain of the SAR (i.e., a SAR with the backbone of a SIR, cTCR, Ab-TCR, AABD-TCR, αβTFP, or TCR) is encoded completely or in part by at least one of the exons of the endogenous TCRβ constant chain gene. In an embodiment, the SAR is targeted to the endogenous TCRβ gene locus (TRBC) so that the TCRα constant chain of the SAR (i.e., a SAR with the backbone of a SIR, cTCR, Ab-TCR, AABD-TCR, αβTFP, or TCR) shares completely or in part the 3′ untranslated region and polyadenylation sequence of the native/endogenous TCRβ constant chain gene.

[0638] In an embodiment, the SAR is targeted to the endogenous TCRγ gene locus (TRGC) so that the TCRγ constant chain of the SAR (i.e., a SAR with the backbone of a SIR, cTCR, Ab-TCR, AABD-TCR, γδTFP, or γδTCR) is expressed wholly or in part from the endogenous native TCRγ constant chain gene. In an embodiment, the SAR is targeted to the endogenous TCRγ gene locus (TRGC) so that the TCRγ constant chain of the SAR (i.e., a SAR with the backbone of a SIR, cTCR, Ab-TCR, AABD-TCR, γδTFP, or γδTCR) is encoded completely or in part by at least one of the exons of the endogenous TCRγ constant chain gene. In an embodiment, the SAR is targeted to the endogenous TCRγ gene locus (TRGC) so that the TCRγ constant chain of the SAR (i.e., a SAR with the backbone of a SIR, cTCR, Ab-TCR, AABD-TCR, γδTFP, or γδTCR) shares completely or in part the 3′ untranslated region and polyadenylation sequence of the native/endogenous TCRγ constant chain gene.

[0639] In an embodiment, the SAR is targeted to the endogenous TCRδ gene locus (TRDC) so that the TCRδ constant chain of the SAR (i.e., a SAR with the backbone of a SIR, cTCR, Ab-TCR, AABD-TCR, γδTFP, or γδTCR) is expressed wholly or in part from the endogenous native TCRδ constant chain gene. In an embodiment, the SAR is targeted to the endogenous TCRδ gene locus (TRDC) so that the TCRδ constant chain of the SAR (i.e., a SAR with the backbone of a SIR, cTCR, Ab-TCR, AABD-TCR, γδTFP, or γδTCR) is encoded completely or in part by at least one of the exons of the endogenous TCRδ constant chain gene. In an embodiment, the SAR is targeted to the endogenous TCRδ gene locus (TRGC) so that the TCRδ constant chain of the SAR (i.e., a SAR with the backbone of a SIR, cTCR, Ab-TCR, AABD-TCR, γδTFP, or γδTCR) shares completely or in part the 3′ untranslated region and polyadenylation sequence of the native/endogenous TCRδ constant chain gene.

[0640] The disclosure also provides compositions and methods for targeting bispecific and multispecific SARs to the TRAC and/or TRBC loci for the purpose of generating allogeneic SAR-T cells.

[0641] In one embodiment, the cell is a stem cell and the stem cell is deficient in one or more of endogenous T cell receptor chains. In another embodiment, the cell is a stem cell in which one or more target antigens (e.g., MPL, CD33, CD123, CD19, etc.) of the SAR have been deleted or mutated to a form that is no longer recognized by the SAR. As an example, a SAR targeting CD19 is expressed in stem cells that have been made deficient in CD19 using CRISP/Cas9 or Zn finger nucleases so that the B cells produced by such stem cells are not eliminated by the T cells expressing the CD19-targeting SAR. Alternatively, a SAR targeting CD19 is expressed in stem cells in which the endogenous CD19 has been mutated to a form that is not targeted by SAR using CRISP/Cas9 or Zn finger nucleases so that the B cells produced by such stem cells are not eliminated by the T cells expressing the CD19-targeting SAR. In another embodiment, the SAR is expressed in immune effector cells and the stem cells from an autologous or an allogeneic donor are genetically engineered to either lack the expression of the SAR-target antigen or to express a mutated form of SAR target antigen which is not recognized by the SAR. For example, a SAR targeting CD19 is expressed in T cells that are infused into a patient along with autologous or allogeneic hematopoietic stem cells that have been made deficient in CD19 using CRISP/Cas9 or Zn finger nucleases so that the B cells produced by such stem cells are not eliminated by the T cells expressing the CD19-targeting SAR. Alternatively, a SAR targeting CD19 is expressed in T cells that are infused into a patient along with autologous or allogeneic hematopoietic stem cells in which the endogenous CD19 has been mutated to a form that is not targeted by SAR using CRISP/Cas9 or Zn finger nucleases so that the B cells produced by such stem cells are not eliminated by the T cells expressing the CD19-targeting SAR. A similar approach can be used to mutate or eliminate other endogenous antigens (e.g., MPL, CD33, CD123 etc.) in stem cells using shRNA, CRISP/Cas9 or Zn finger nucleases in subjects receiving SAR-T cells targeting these antigens for the treatment of specific diseases in which these antigens are expressed on disease associated or disease-causing cells.

[0642] T cells or natural killer (NK) or stem cells can be obtained from a subject. The term “subject” is intended to include living organisms in which an immune response can be elicited (e.g., mammals). Examples of subjects include humans, monkeys, chimpanzees, dogs, cats, mice, rats, and transgenic species thereof. T cells can be obtained from a number of sources, including peripheral blood mononuclear cells, bone marrow, lymph node tissue, cord blood, thymus tissue, tissue from a site of infection, ascites, pleural effusion, spleen tissue, and tumors. T cells could be tissue resident gamma-delta T cells, which can be cultured and expanded in vitro prior to expression of the SAR.

[0643] In another aspect, the disclosure relates to a method for producing a genetically modified cell or cell population comprising expressing in said cell or cell population a SAR nucleic acid construct of the invention. The method may include introducing into the cell a nucleic acid as described herein (e.g., an in vitro transcribed RNA or synthetic RNA; an mRNA sequence encoding a SAR polypeptide as described herein). In embodiments, the RNA expresses the SAR polypeptide transiently. In one embodiment, the cell is a cell as described herein, e.g., an immune effector cell (e.g., T cells or NK cells, or cell population). Cells produced by such methods are also within the scope of the invention.

[0644] In another aspect, the disclosure relates to an ex vivo method for generating a population of cells for use in adaptive immunotherapy comprising transforming said cell with a SAR of the invention.

[0645] In certain aspects of the disclosure, immune effector cells, e.g., T cells, can be obtained from a unit of blood collected from a subject using any number of techniques known to the skilled artisan, such as Ficoll™ separation. In one preferred aspect, cells from the circulating blood of an individual are obtained by apheresis. In one aspect, the cells are collected from a subject in whom the T cells have been mobilized by administration of an agent. In some embodiments, the immune cells are collected from a donor who has been administered a CXCR4 antagonist (e.g., Plerixafor), a cytokine (e.g., G-CSF, GM-CSF or sargramostim, Neulasta or Pegfilgastrim), a beta2 agonist (e.g., epinephrine), a tyrosine kinase inhibitor (e.g., dasatinib), chemotherapy drug(s) (e.g., cyclophosphamide, doxorubicin etc.) either singly or in combination, prior to the collection of immune cells. In some embodiments, the donor is an autologous donor while in other embodiments, the donor is an allogeneic donor.

[0646] The apheresis product usually contains lymphocytes, including T cells, monocytes, granulocytes, B cells, other nucleated white blood cells, red blood cells, and platelets. In one aspect, the cells collected by apheresis may be washed to remove the plasma fraction and, optionally, to place the cells in an appropriate buffer or media for subsequent processing steps. In one embodiment, the cells are washed with phosphate buffered saline (PBS). In an alternative embodiment, the wash solution lacks calcium and may lack magnesium or may lack many if not all divalent cations.

[0647] It is recognized that the methods of the application can utilize culture media conditions comprising 5% or less, for example 2%, human AB serum, and employ known culture media conditions and compositions, for example those described in Smith et al., “Ex vivo expansion of human T cells for adoptive immunotherapy using the novel Xeno-free CTS Immune Cell Serum Replacement” Clinical & Translational Immunology (2015) 4, e31; doi: 10.1038/cti.2014.31.

[0648] In one aspect, T cells are isolated from peripheral blood lymphocytes by lysing the red blood cells and depleting the monocytes, for example, by by counterflow centrifugal elutriation or centrifugation through a PERCOLL™ gradient.

[0649] In another embodiment, a SAR-expressing effector cell described herein can further express an agent which enhances the activity of a SAR-expressing cell. In some embodiments, the agent is one that inhibits an inhibitory molecule. Non-limiting examples of inhibitory molecules include PD-1, PD-L1, CTLA-4, TIM-3, CEACAM (e.g., CEACAM-1, CEACAM-3 and/or CEACAM-5), LAG-3, VISTA, BTLA, TIGIT, LAIR1, CD160, 2B4 and TGFR beta. In one embodiment, the agent that inhibits an inhibitory molecule comprises a first polypeptide, e.g., a scFv or VHH or a receptor or a ligand fragment that binds an inhibitory molecule, associated with a second polypeptide that provides a positive signal to the cell, e.g., an intracellular signaling domain, such as 41BB, CD27, OX40, CD28, Dap10, CD2, CD5, ICAM-1, LFA-1, Lck, TNFR-1, TNFR-II, Fas, CD30, CD40 or combinations thereof) and/or a primary signaling domain (e.g., a CD3 zeta signaling domain). In one embodiment, the agent that inhibits an inhibitory molecule comprises a first polypeptide, e.g., a scFv or VHH fragment or a receptor or a ligand fragment that binds an inhibitory molecule, associated with a T cell receptor constant chain described herein (e.g., constant chain of TCRa, TCRb1, TCRb2, pre-TCRa, pre-TCRa-Del48, TCR-gamma, or TCR-delta).

[0650] In another embodiment, the SAR-expressing cell described herein can further express an accessory module, e.g., an agent which enhances the activity of a SAR-expressing cell. Several examples of accessory modules that comprise of agents that can enhance the activity of a SAR-expressing cell are provided in SEQ ID NO: 11998 to 12019 (Table 24). For example, in one embodiment, the agent can be an agent which increases the expression and/or activity of SAR chains (e.g., CD3ζ, CD3δ, CD3ε, CD3γ or combination thereof). In another embodiment, the agent can be an agent (e.g., vFLIP K13, vFLIP MC159, cFLIP-L, cFLIP-p22, HTLV1 Tax, HTLV2 Tax, 41BB or CD28) which provides costimulatory signal to SAR expressing cells. In another embodiment, the agent can be an agent (e.g., FKBPx2-K13, FKBPx2-MC159, FKBPx2-cFLIP, FKBPx2-cFLIP-L, FKBPx2-cFLIP-p22, FKBPx2-HTLV1 Tax, FKBPx2-HTLV2 Tax, FKBPx2-41BB or FKBPx2-CD28, Myr-MYD88-CD40-Fv′-Fv etc.) which provides costimulatory signal to SAR expressing cells in an inducible manner. In another embodiment, the agent can be a cytokine or a chemokine (e.g., CD40L, IL2, IL-7, IL-15, IL12f or IL-21) that promotes the prolilferation or persistence of SAR-expressing cells. In another embodiment, the agent can be a soluble receptor (e.g., sHVEM or sHVEM-Alb8-vHH) that promotes the activity of SAR expressing cells and/or synergizes with SAR-expressing cells. In another embodiment, the agent can be an agent that inhibits an inhibitory molecule. Inhibitory molecules, e.g., PD1, can, in some embodiments, decrease the ability of a SAR-expressing cell to mount an immune effector response. In another embodiment, the agent can be a scFV targeting PD1 or CTLA4. In one embodiment, the agent comprises a first polypeptide, e.g., of an inhibitory molecule such as PD1, PD-L1, CTLA4, TIM3, CEACAM (e.g., CEACAM-1, CEACAM-3 and/or CEACAM-5), LAG3, VISTA, BTLA, TIGIT, LAIR1, CD160, 2B4 or TGFR beta, or a fragment of any of these (e.g., at least a portion of an extracellular domain of any of these), and a second polypeptide which is an intracellular signaling domain described herein (e.g., comprising a costimulatory domain (e.g., 41BB, CD27 or CD28, e.g., as described herein) and/or a primary signaling domain (e.g., a CD3 zeta signaling domain described herein). In one embodiment, the agent comprises a first polypeptide of PD1 or a fragment thereof (e.g., at least a portion of an extracellular domain of PD1), and a second polypeptide of an intracellular signaling domain described herein (e.g., a CD28 signaling domain described herein and/or a CD3 zeta signaling domain described herein).

[0651] In some embodiments, the immune cells are engineered to be resistant to one or more chemotherapy drugs. The chemotherapy drug can be, for example, a purine nucleotide analogue (PNA), thus making the immune cell suitable for cancer treatment combining adoptive immunotherapy and chemotherapy. Exemplary PNAs include, for example, clofarabine, fludarabine, cyclophosphamide, and cytarabine, alone or in combination. PNAs are metabolized by deoxycytidine kinase (dCK) into mono-, di-, and tri-phosphate PNA. Their tri-phosphate forms compete with ATP for DNA synthesis, act as pro-apoptotic agents, and are potent inhibitors of ribonucleotide reductase (RNR), which is involved in trinucleotide production. Provided herein are SAR-T cells comprising a disrupted or inactivated dCK gene. In some embodiments, the dCK knockout cells are made by transfection of T cells using polynucleotides encoding specific TAL-nulcease directed against dCK genes by, for example, electroporation of mRNA. The dCK knockout SAR-T cells can be resistant to PNAs, including for example clorofarabine and/or fludarabine, and maintain T cell cytotoxic activity toward cells expressing the SAR antigen(s).

[0652] In one embodiment, the SAR-expressing effector cell described herein can further comprise a second SAR that may include a different antigen binding domain to the same or a different target. In some embodiments, the second SAR may target the same or a different cell type from the first SAR.

[0653] In one embodiment, the SAR-expressing effector cell described herein can further comprise a second SAR with the same or a different antigen binding domain, optionally the same or a different target. In some embodiments, the second SAR may target the same or a different cell type from the first SAR. The two SARs may have the same backbone or different backbones. In an exemplary embodiment, the two SARs may have the backbone of 2^{nd} generation CARs. In another exemplary embodiment, one SAR may have the backbone of a SIR while the second SAR may have the backbone of a TFPε. In another exemplary embodiment, one SAR may have the backbone of an Ab-TCR while the second SAR may have the backbone of a SIR. The nucleic acid and amino acid sequences of several exemplary SARs on different backbones are presented in Tables 35 and 36. In one embodiment, the SAR includes an antigen binding domain to a target expressed on the same disease cell type (e.g., cancer) as the disease associated antigen. In one embodiment, the SAR expressing cell comprises a first SAR that targets a first antigen, and a 2^{nd} SAR that targets a second, different, antigen and includes an intracellular signaling domain having no primary signaling domain but a costimulatory signaling domain. While not wishing to be bound by theory, placement of a costimulatory signaling domain, e.g., 4-1BB, CD28, CD27 or OX-40, onto SAR (e.g., a 2^{nd} generation CAR), can modulate the SAR activity to cells where both targets are expressed. In one embodiment, the SAR expressing cell comprises i) a first disease associated antigen SAR (e.g., a SIR) that includes one or more antigen binding domains that bind a target antigen described herein, and one or two TCR constant chains, and ii) a 2^{nd} generation CAR or a TFPs that targets a different target antigen (e.g., an antigen expressed on that same disease associated (e.g., cancer) cell type as the first target antigen) and includes an antigen binding domain, a transmembrane domain and a primary signaling domain and a costimulatory domain. In another embodiment, the SAR expressing cell comprises a i) a first SAR (e.g., a SIR) that includes an antigen binding domain that binds a target antigen described herein, and one or two TCR constant chains and ii) a CAR that targets an antigen other than the first target antigen (e.g., an antigen expressed on the same cancer cell type as the first target antigen) and includes an antigen binding domain specific to the antigen, a transmembrane domain and a costimulatory signaling domain. This CAR construct lacks the CD3z domain. In yet another embodiment, the SAR expressing cell comprises i) a first disease associated antigen SAR (e.g., a SIR or an Ab-TCR) that includes one or more antigen binding domains that bind a target antigen described herein, and one or two TCR constant chains, and ii) a CAR that targets a different target antigen (e.g., an antigen expressed on that same disease associated (e.g., cancer) cell type as the first target antigen) and includes an antigen binding domain, a transmembrane domain and a primary signaling domain but without a costimulatory domain.

[0654] In one embodiment, the CAR comprises the antigen binding domain, a transmembrane domain and an intracellular signaling domain (such as but not limited to one or more intracellular signaling domain from 41BB, CD27, OX40, CD28, Dap10, CD2, CD5, ICAM-1, LFA-1, Lck, TNFR-1, TNFR-II, Fas, CD30, CD40 or combinations thereof) and/or a primary signaling domain (such as but not limited to a CD3 zeta signaling domain).

[0655] In one embodiment, the SAR-expressing effector cell comprises a SAR described herein and an inhibitory CAR. In one embodiment, the inhibitory CAR comprises an antigen binding domain that binds an antigen found on normal cells but not cancer cells. In one embodiment, the inhibitory CAR comprises an antigen binding domain, a transmembrane domain and an intracellular domain of an inhibitory molecule. For example, the intracellular domain of the inhibitory CAR can be an intracellular domain of any one of PD1, PD-L1, CTLA-4, TIM-3, CEACAM (e.g., CEACAM-1, CEACAM-3 and/or CEACAM-5), LAG-3, VISTA, BTLA, TIGIT, LAIR1, CD160, 2B4 or TGFR beta. An exemplary SAR poypeptide co-expressing an inhibitory CAR is presented in SEQ ID NO: 3220. The inhibitory CAR in this polypeptide expresses a vHH targeting CXCR4 fused to the transmembrane domain and the cytosoloic domain of LAIR1.

[0656] In certain embodiments, the antigen binding domain of the first SAR molecule (e.g., a CAR) comprises a scFv and the antigen binding domain of the 2^{nd} SAR (e.g., a SIR, Ab-TCR, or TFP) molecule does not comprise a scFv. For example, the antigen binding domain of the first SAR molecule comprises a scFv and the antigen binding domain of the 2^{nd} SAR molecule comprises a camelid VHH domain.

[0657] In one embodiment, the disclosure provides an immune effector cell (e.g., T cell, NK cell) expressing a SAR comprising an antigen binding domain that binds to a tumor antigen as described herein, and a CAR comprising a PD 1 extracellular domain or a fragment thereof. In some embodiments, the cell further comprises an inhibitory molecule comprising an inhKIR cytoplasmic domain; a transmembrane domain, e.g., a KIR transmembrane domain; and an inhibitor cytoplasmic domain, e.g., an ITIM domain, e.g., an inhKIR ITIM domain.

[0658] Cells that express a. SAR of the disclosure are used in the treatment of disease.

[0659] The disclosure thus relates to methods for the prevention and/or treatment of cancer, comprising administering to a subject a cell or cell population comprising a SAR as described herein, said method comprising administering, to a subject in need thereof, a pharmaceutically active amount of a cell and/or of a pharmaceutical composition of the invention.

[0660] The disclosur ealso relates to a SAR, a cell or cell population comprising a SAR as described herein for use in therapy. The disclosure also relates to a SAR or a cell comprising a SAR as described herein for use in the treatment of cancer. The disclosure also relates to the use of a SAR or a cell comprising a SAR as described herein in the manufacture of a medicament for the treatment of cancer.

[0661] In another aspect, the disclosure relates to a method for stimulating a T cell-mediated immune response to a target cell population or tissue in a subject, the method comprising administering to a subject an effective amount of a cell or cell population that expresses a SAR of the invention, wherein the antigen binding domain is selected to specifically recognize the target cell population or tissue.

[0662] In another aspect, the disclosure relates to a method of providing an anti-tumor immunity in a subject, the method comprising administering to the mammal an effective amount of a cell or cell population genetically modified to express a SAR of the invention, thereby providing an anti- tumor immunity in the subject.

[0663] The disclosure also provides a method comprising administering a SAR molecule, a cell expressing a SAR molecule or a cell comprising a nucleic acid encoding a SAR molecule to a subject. In one embodiment, the subject has a disorder described herein, e.g., the subject has cancer, infectious disease, allergic disease, degenerative disease or autoimmune disease, which expresses a target antigen described herein. In yet one embodiment, the subject has increased risk of a disorder described herein, e.g., the subject has increased risk of cancer, infectious disease, allergic disease, degenerative disease or autoimmune disease, which expresses a target antigen described herein. In one embodiment, the subject is a human. In another embodiment, the subject is an animal. In yet another embodiment, the subject is a companion animal such as a dog.

[0664] In one embodiment, the disclosure provides methods of treating or preventing a disease by providing to the subject in need thereof immune effector cells (e.g., T cells) or stem cells that can give rise to immune effector cells that are engineered to express an targeted X-SIR, wherein X represents a disease associated antigen as described herein, and wherein the disease causing or disease-associated cells express said X antigen. Table 45 provides a list of different antigens and the exemplary diseases that can be prevented, inhibited or treated using immune effector cells expressing SARs targeting these antigens.

[0665] In another embodiment, the disclosure provides methods of treating or preventing cancer by providing to the subject in need thereof immune effector cells (e.g., T cells) that are engineered to express a XSAR (or X-SAR) described herein, wherein the cancer cells express antigen target “X”. In one embodiment, X is expressed on both normal cells and cancers cells, but is expressed at lower levels on normal cells. In one embodiment, the method further comprises selecting a SAR that binds X with an affinity that allows the XSAR to bind and kill the cancer cells expressing X but less than 30%, 25%, 20%, 15%, 10%, 5% or less of the normal cells expressing X are killed, e.g., as determined by an assay described herein. For example, the Gluc release cytotoxicity assay described herein can be used to identify XSARs that target, e.g., the cancer cells. In one embodiment, the selected SAR has an antigen binding domain that has a binding affinity KD of about 10⁻⁴ M to 10⁻⁸ M, more commonly about 10⁻⁵ M to 10⁻⁷ M, and typically about 10⁻⁶ M or 10⁻⁷ M, for the target antigen. In one embodiment, the selected antigen binding domain has a binding affinity that is at least two-fold, five-fold, 10-fold, 20-fold, 30-fold, 50-fold, 100-fold or 1,000-fold less than a reference antibody, e.g., an antibody described herein and from which the binding domain of the SAR is derived.

[0666] In another embodiment, the disclosure provides methods of treating or preventing cancer by providing to the subject in need thereof immune effector cells (e.g., T cells) that are engineered to express a bispecific SAR (or AxB-SAR) described herein, wherein A and B represent the two different antigens targeted by the SAR. In an exemplary embodiment, antigen A is CD19 and antigen B is CD22 and the disease is B cell lymphoma or leukemia. In an exemplary embodiment, antigen A is CD19 and antigen B is CD20 and the disease is B cell lymphoma or leukemia. In an exemplary embodiment, antigen A is CD19 and antigen B is BCMA and the disease is B cell lymphoma or leukemia. In an exemplary embodiment, antigen A is CD19 and antigen B is CD38 and the disease is B cell lymphoma or leukemia. In an exemplary embodiment, antigen A is BCMA and antigen B is CD38 and the disease is a plasma cell disorder or primary effusion lymphoma (PEL). In an exemplary embodiment, antigen A is BCMA and antigen B is CS1/SLAMF7 and the disease is a plasma cell disorder or primary effusion lymphoma (PEL). In an exemplary embodiment, antigen A is CD123 and antigen B is MPL and the disease is acute myeloid leukemia, chronic myeloid leukemia, myeloproliferative disorder or myelofibrosis. In an exemplary embodiment, antigen A is CD123 and antigen B is CD33 and the disease is acute myeloid leukemia, chronic myeloid leukemia, or myeloproliferative disorder.

[0667] In an exemplary embodiment, both antigen A and B are expressed on blood cells. In an embodiment, one antigen is expressed preferentially or exclusively on blood lineage cells (e.g., normal B cells or lymphoma cells) while the other antigen is expressed preferentially or exclusively on non-blood cells (e.g., prostate cancer cells). In an embodiment, one antigen is expressed preferentially or exclusively on normal blood lineage cells (e.g., normal B cells) while the other antigen is expressed preferentially or exclusively on tumor cells (e.g., prostate cancer cells). In an exemplary embodiment, antigen A is CD19 and antigen B is PSMA and the disease is prostate cancer. In such a construct targeting of CD19 provides proliferative signal to the SAR cells by targeting of CD19 expressed on the normal B cells while targeting of PSMA induces killing of prostate cancer cells. In another exemplary embodiment, antigen A is CD20 and antigen B is PSMA and the disease is prostate cancer. In another exemplary embodiment, antigen A is BCMA and antigen B is PSMA and the disease is prostate cancer. Other examples of antigens that are preferentially expressed on tumor cells (e.g., solid tumor cells) are known in the art, including but not limited to: Her2, Her3, Mesothelin, CEACAM5, EGFR, EGFRviii, IL13Ra2, TAJ, ROR1, CD70, DLL3, Muc16, Muc1, GD2, GD3, CDH6, CDH17, EpCAM, LiCAM, Folate receptor 1, GCC, NY-ESO, AFP, MAGE and WT1.

[0668] In another embodiment, the disclosure provides methods of treating or preventing a disease by providing to the subject in need thereof immune effector cells (e.g., T or NK cells) or stem cells that can give rise to immune effector cells that are engineered to express a CD19xC20 bispecific SAR, wherein the disease causing or disease associated cells express CD19 and CD20. In one embodiment, the disease to be treated or prevented is a cancer or immune disease. In one embodiment, the cancer to be treated or prevented is Acute B cell leukemia, chronic B cell leukemia, or B cell lymphoma.

[0669] In another embodiment, the disclosure provides methods of treating or preventing a disease by providing to the subject in need thereof immune effector cells (e.g., T or NK cells) or stem cells that can give rise to immune effector cells that are engineered to express a CD19xC22 bispecific SAR, wherein the disease causing or disease associated cells express CD19 and CD22. In one embodiment, the disease to be treated or prevented is a cancer or immune disease. In one embodiment, the cancer to be treated or prevented is Acute B cell leukemia, chronic B cell leukemia, or B cell lymphoma.

[0670] In another embodiment, the disclosure provides methods of treating or preventing a disease by providing to the subject in need thereof immune effector cells (e.g., T cells) or stem cells that can give rise to immune effector cells that are engineered to express a CD19xC22xCD20 trispecific SAR, wherein the disease causing or disease associated cells express CD19, CD22 and CD20. In one embodiment, the disease to be treated or prevented is a cancer or immune disease. In one embodiment, the cancer to be treated or prevented is Acute B cell leukemia, chronic B cell leukemia, or B cell lymphoma.

[0671] In another embodiment, the disclosure provides methods of treating or preventing a disease by providing to the subject in need thereof immune effector cells (e.g., T cells) or stem cells that can give rise to immune effector cells that are engineered to express a BCMAxCD38 bispecific SAR, wherein the disease causing or disease associated cells express BCMA and CD38. In one embodiment, the disease to be treated or prevented is a cancer or immune disease. In one embodiment, the cancer to be treated or prevented is plasma cell disorder (e.g., plasma cell leukemia, myeloma.

[0672] In another embodiment, the disclosure provides methods of treating or preventing a disease by providing to the subject in need thereof immune effector cells (e.g., T cells) or stem cells that can give rise to immune effector cells that are engineered to express TCRB1-SAR, wherein the disease causing or disease associated cells express TCRB1 (T cell receptor Beta1 chain). In one embodiment, the disease to be treated or prevented is a cancer or immune disease. In one embodiment, the cancer to be treated or prevented is T cell leukemia or T cell lymphoma. In one embodiment, the immune disorder to be treated or prevented is multiple sclerosis, rheumatoid arthritis, ankylosing spondylitis, inflammatory Bowel Disease, Diabetes Mellitus, Graft vs host disease or autoimmune Thyroiditis.

[0673] In another embodiment, the disclosure provides methods of treating or preventing a disease by providing to the subject in need thereof immune effector cells (e.g., T cells) or stem cells that can give rise to immune effector cells that are engineered to express TCRB2-SIR, wherein the disease causing or disease associated cells express TCRB2 (T cell receptor Beta2 SAR). In one embodiment, the disease to be treated or prevented is a cancer or immune disorder. In one embodiment, the cancer to be treated or prevented is T cell leukemia or T cell lymphoma. In one embodiment, the immune disorder to be treated or prevented is multiple sclerosis, rheumatoid arthritis, ankylosing spondylitis, inflammatory Bowel Disease, Diabetes Mellitus, Graft vs host disease or autoimmune thyroiditis.

[0674] In another embodiment, the disclosure provides methods of treating or preventing a disease by providing to the subject in need thereof immune effector cells (e.g., T cells) or stem cells that can give rise to immune effector cells that are engineered to express T cell receptor gamma-delta -SIR, wherein the disease-causing or disease associated cells express T cell receptor gamma-delta. In one embodiment, the disease to be treated or prevented is a cancer or immune disorder. In one embodiment, the cancer to be treated or prevented is T cell leukemia or T cell lymphoma. In one embodiment, the immune disorder to be treated or prevented is multiple sclerosis, rheumatoid arthritis, ankylosing spondylitis, inflammatory bowel disease, diabetes mellitus, Graft vs host disease or autoimmune Thyroiditis.

[0675] In another embodiment, the disclosure provides methods of treating or preventing a disease by providing to the subject in need thereof immune effector cells (e.g., T cells) or stem cells that can give rise to immune effector cells that are engineered to express a SAR encoding CD4-DC-SIGN. In one embodiment, the disease to be treated or prevented is HIV1/AIDS.

[0676] In another embodiment, the disclosure provides methods of treating or preventing an autoimmune-diseases by providing to the subject in need thereof immune effector cells (e.g., T cells) or stem cells that can give rise to immune effector cells that are engineered to express a SAR encoding the autoantigen or a fragment thereof. In one embodiment, the autoimmune disease is diabetes mellitus, rheumatoid arthritis, multiple sclerosis, pemphigus vulgaris, paraneoplastic pemphigous, glomerulonephritis, ankylosing spondylitis, Ulcerative Colitis or Crohn’s disease. In one aspect, the disease is pemphigus vulgaris, and the antigen binding domain of the SAR comprises of extracellular domain of Desmoglein 3 (Dsg3)

[0677] In another embodiment, the disclosure provides methods of treating or preventing a cancer, infection, autoimmune or allergic diseases by providing to the subject in need thereof immune effector cells (e.g., T cells) or stem cells that can give rise to immune effector cells that are engineered to express a universal SAR encoding CD16 or a deletion- or point-mutant fragment thereof along with an antibody or an antibody fragment that binds to the CD16 domain of the SAR and an antigen expressed on the disease associated cells. In one aspect the disease associated cell is a cancer cell, an infected cell, or a plasma cell or a B cell or a T cell.

[0678] In another embodiment, the disclosure provides methods of treating or preventing a cancer, infection, autoimmune or allergic diseases by providing to the subject in need thereof immune effector cells (e.g., T cells) or stem cells that can give rise to immune effector cells that are engineered to express a universal SAR encoding an immunoglobulin binding receptor or a deletion- or point-mutant fragment thereof. The SAR-expressing immune effector cells are administered to the patient along with one or more antibodies or antibody fragments that bind to the immunoglobulin binding domain of the SAR receptor and with one or more antigens expressed on the disease associated cells. In one aspect the disease associated cell is a cancer cell, an infected cell, or a plasma cell or a B cell or a T cell.

[0679] In another embodiment, the disclosure provides methods of treating or preventing a cancer, infection, autoimmune or allergic diseases by providing to the subject in need thereof immune effector cells (e.g., T cells) or stem cells that can give rise to immune effector cells that are engineered to express both a universal SAR encoding an immunoglobulin binding receptor or a deletion- or point-mutant fragment thereof joined to a T cell receptor constant chain (e.g., constant chain of TCRα) and an antigen binding domain (e.g., a scFv, vHH, vL, vH, or a non-immunoglobulin antigen binding domain) joined to a T cell receptor constant chain (e.g., constant chain of TCRβ). The SARs-expressing immune effector cells are administered to the patient along with one or more antibodies or antibody fragments that bind to the immunoglobulin binding domain of the first SAR receptor with one or more antigens expressed on the disease associated cells. In one aspect the disease associated cell is a cancer cell, an infected cell, or a plasma cell or a B cell or a T cell.

[0680] In another embodiment, the disclosure provides methods of treating or preventing a cancer, infection, autoimmune or allergic diseases by providing to the subject in need thereof immune effector cells (e.g., T cells) or stem cells that can give rise to immune effector cells that are engineered to express a universal SAR encoding an immunoglobulin receptor or a deletion- or point-mutant fragment thereof thereof along with one or more antibodies or an antibody fragments that bind to the above receptor and one or more antigens expressed on the disease associated cells.

[0681] In another embodiment, the disclosure provides methods of treating or preventing a cancer, infection, autoimmune or allergic diseases by providing to the subject in need thereof immune effector cells (e.g., T cells) or stem cells that can give rise to immune effector cells that are engineered to express both a universal SAR encoding CD16 or a deletion- or point-mutant (e.g., V158 mutant) fragment thereof joined to a T cell receptor constant chain and a SAR encoding an antigen binding domain (e.g., a scFv, vHH, vL, vH, or a non-immunoglobulin antigen binding domain) joined to a T cell receptor constant chain. The SARs-expressing immune effector cells are administered to the patient along with one or more antibody or an antibody fragments that binds to the CD16 domain of the SAR and one or more antigens expressed on the disease associated cells. In one aspect the disease associated cell is a cancer cell, an infected cell, or a plasma cell or a B cell or a T cell.

[0682] In another embodiment, the disclosure provides methods of treating or preventing a cancer, infection, autoimmune or allergic diseases by providing to the subject in need thereof immune effector cells (e.g., T cells) or stem cells that can give rise to immune effector cells that are engineered to express a universal SAR encoding CD16 or a deletion- or point-mutant fragment (e.g., V158 mutant) thereof along with one or more antibody or an antibody fragments that binds to the CD16 domain of the SAR and one or more antigens expressed on the disease associated cells. In one aspect the disease associated cell is a cancer cell, an infected cell, or a plasma cell or a B cell or a T cell.

[0683] In another embodiment, the disclosure provides methods of treating or preventing a cancer, infection, autoimmune or allergic diseases by providing to the subject in need thereof immune effector cells (e.g., T cells) that are engineered to express a SAR encoding NKG2D receptor or a deletion- or point-mutant fragment thereof. In one aspect the disease associated cell is a cancer cell, an infected cell, or a plasma cell or a B cell or a T cell.

[0684] In another embodiment, the disclosure provides methods of treating or preventing a disease by providing to the subject in need thereof immune effector cells (e.g., T cells) or stem cells that can give rise to immune effector cells that are engineered to express CD19SAR. In one aspect the disease is an immune or allergic disease.

[0685] In another embodiment, the disclosure provides methods of treating or preventing a disease by providing to the subject in need thereof immune effector cells (e.g., T cells) that are engineered to express CD20SAR. In one aspect the disease is an immune or allergic disease.

[0686] In another embodiment, the disclosure provides methods of treating or preventing a disease by providing to the subject in need thereof immune effector cells (e.g., T cells) that are engineered to express CD22SAR. In one aspect the disease is an immune or allergic disease.

[0687] In another embodiment, the disclosure provides methods of treating or preventing a cancer, infection, autoimmune or allergic diseases by providing to the subject in need thereof immune effector cells (e.g., T cells) or stem cells that can give rise to immune effector cells that are engineered to express a FITC-SIR along with a FITC-labelled antibody or an antibody fragment or an antibody fragment or a receptor or a ligand or a non-Immunoglobulin scaffold that binds to an antigen expressed on the disease associated cells. In one aspect the disease associated cell is a cancer cell, an infected cell, or a plasma cell or a B cell or a T cell.

[0688] In another embodiment, the disclosure provides methods of treating or preventing a cancer, infection, autoimmune or allergic diseases by providing to the subject in need thereof immune effector cells (e.g., T cells) or stem cells that can give rise to immune effector cells that are engineered to express an avidin-SAR along with a Biotin-labelled antibody or an antibody fragment or an antibody fragment or a receptor or a ligand or a non-Immunoglobulin scaffold that binds to an antigen expressed on the disease associated cells. In one aspect the disease associated cell is a cancer cell, an infected cell, or a plasma cell.

[0689] In another embodiment, the disclosure provides methods of treating or preventing a cancer, infection, autoimmune or allergic diseases by providing to the subject in need thereof immune effector cells (e.g., T cells) or stem cells that can give rise to immune effector cells that are engineered to express an Streptag-SAR along with a Streptag-containing antibody or an antibody fragment or a receptor or a ligand or a non-Immunoglobulin scaffold that binds to an antigen expressed on the disease associated cells. In one aspect the disease associated cell is a cancer cell, an infected cell, or a plasma cell.

[0690] In another embodiment, the disclosure provides methods of treating or preventing a disease by providing to the subject in need thereof immune effector cells (e.g., T cells) that are engineered to express IgE-SAR whose antigen binding domain comprises of an antibody or antibody fragment that binds to IgE. In one aspect the disease is an immune or allergic disease.

[0691] In another embodiment, the disclosure relates to treatment of a subject in vivo using a PD1SAR (i.e., a SAR containing the extracellular domain of PD1 as its antigen binding domain) such that growth of cancerous tumors is inhibited. A PD1SAR may be used alone to inhibit the growth of cancerous tumors.

[0692] In another aspect of the disclosure, there is provided a pharmaceutical composition comprising a SAR or an isolated cell or cell population comprising a SAR according to the present disclosure and optionally a pharmaceutically acceptable carrier.

[0693] The genetically modified cells or pharmaceutical composition of the present disclosure can be administered by any convenient route, including parenteral administration. Parenteral administration includes, for example, intravenous, intramuscular, intraarterial, intraperitoneal, intranasal, rectal, intravesical, intradermal, topical or subcutaneous administration. Compositions can take the form of one or more dosage units.

[0694] The composition of the disclosure can be in the form of a liquid, e.g., , a solution, emulsion or suspension. The liquid can be useful for delivery by injection, infusion (e.g., IV infusion) or sub-cutaneously. The liquid compositions of the invention, whether they are solutions, suspensions or other like form, can also include one or more of the following: sterile diluents such as water, saline solution, typically physiological saline, Ringer’s solution, isotonic sodium chloride, fixed oils such as synthetic mono or diglycerides, polyethylene glycols, glycerin, or other solvents; antibacterial agents such as benzyl alcohol or methyl paraben; and agents for the adjustment of tonicity such as sodium chloride or dextrose. A composition can be enclosed in an ampoule, a disposable syringe or a multiple-dose vial made of glass, plastic or other material.

[0695] The amount of the pharmaceutical composition of the present disclosure that is effective/active in the treatment of a particular disorder or condition will depend on the nature of the disorder or condition and can be determined by standard clinical techniques. In addition, in vitro or in vivo assays can optionally be employed to help identify optimal dosage ranges. The precise dose to be employed in the compositions will also depend on the route of administration, and the seriousness of the disease or disorder, and should be decided according to the judgment of the practitioner and each patient’s circumstances.

[0696] The compositions of the disclosure comprise an effective amount of a binding molecule of the present disclosure such that a suitable dosage will be obtained. The correct dosage of the compounds will vary according to the particular formulation, the mode of application, and its particular site, host and the disease being treated. Other factors like age, body weight, sex, diet, time of administration, rate of excretion, condition of the host, drug combinations, reaction sensitivities and severity of the disease shall be taken into account. Administration can be carried out continuously or periodically within the maximum tolerated dose.

[0697] Typically, this amount is at least about 0.01% of a binding molecule of the present disclosure by weight of the composition.

[0698] Preferred compositions of the present disclosure are prepared so that a parenteral dosage unit contains from about 0.01% to about 2% by weight of the binding molecule of the disclosure.

[0699] For intravenous administration, the composition can comprise from about typically about 0.1 mg/kg to about 250 mg/kg of the animal’s body weight, preferably, between about 0.1 mg/kg and about 20 mg/kg of the animal’s body weight, and more typically about 1 mg/kg to about 10 mg/kg of the animal’s body weight.

[0700] The present compositions can take the form of suitable carriers, such aerosols, sprays, suspensions, or any other form suitable for use. Other examples of suitable pharmaceutical carriers are described in “Remington’s Pharmaceutical Sciences” by E. W. Martin.

[0701] The pharmaceutical compositions can be prepared using methodology well known in the pharmaceutical art. For example, a composition intended to be administered by injection can be prepared by combining a binding molecule of the present disclosure with water so as to form a solution. A surfactant can be added to facilitate the formation of a homogeneous solution or suspension.

[0702] The pharmaceutical composition of the disclosure can be co-administered with other therapeutics, for example anti-cancer agents.

[0703] In one embodiment, the cancer is selected from a haematological cancer or malignancy or a solid tumor. Hematologic cancers are cancers of the blood or bone marrow Solid tumors are abnormal masses of tissue that usually do not contain cysts or liquid areas.

[0704] In one embodiment, the cancer is metastatic.

[0705] Cancers that may treated by methods, uses and compositions described herein include, but are not limited to, cancer cells from the bladder, blood, bone, bone marrow, brain, breast, colon, esophagus, gastrointestine, gum, head, kidney, liver, lung, nasopharynx, neck, ovary, prostate, skin, stomach, testis, tongue, or uterus. In addition, the cancer may specifically be of the following histological type, though it is not limited to these: neoplasm, malignant; carcinoma; carcinoma, undifferentiated; giant and spindle cell carcinoma; small cell carcinoma; papillary carcinoma; squamous cell carcinoma; lymphoepithelial carcinoma; basal cell carcinoma; pilomatrix carcinoma; transitional cell carcinoma; papillary transitional cell carcinoma; adenocarcinoma; gastrinoma, malignant; cholangiocarcinoma; hepatocellular carcinoma; combined hepatocellular carcinoma and cholangiocarcinoma; trabecular adenocarcinoma; adenoid cystic carcinoma; adenocarcinoma in adenomatous polyp; adenocarcinoma, familial polyposis coli; solid carcinoma; carcinoid tumor, malignant; branchiolo-alveolar adenocarcinoma; papillary adenocarcinoma; chromophobe carcinoma; acidophil carcinoma; oxyphilic adenocarcinoma; basophil carcinoma; clear cell adenocarcinoma; granular cell carcinoma; follicular adenocarcinoma; papillary and follicular adenocarcinoma; nonencapsulating sclerosing carcinoma; adrenal cortical carcinoma; endometroid carcinoma; skin appendage carcinoma; apocrine adenocarcinoma; sebaceous adenocarcinoma; ceruminous adenocarcinoma; mucoepidermoid carcinoma; cystadenocarcinoma; papillary cystadenocarcinoma; papillary serous cystadenocarcinoma; mucinous cystadenocarcinoma; mucinous adenocarcinoma; signet ring cell carcinoma; infiltrating duct carcinoma; medullary carcinoma; lobular carcinoma, inflammatory carcinoma; paget’s disease, mammary; acinar cell carcinoma; adenosquamous carcinoma; adenocarcinoma w/squamous metaplasia; thymoma, malignant; ovarian stromal tumor, malignant; thecoma, malignant; granulosa cell tumor, malignant; and roblastoma, malignant; Sertoli cell carcinoma; ley dig cell tumor, malignant; lipid cell tumor, malignant; paraganglioma, malignant; extra-mammary paraganglioma, malignant; pheochromocytoma;glomangiosarcoma; malignant melanoma; amelanotic melanoma; superficial spreading melanoma; malig melanoma in giant pigmented nevus; epithelioid cell melanoma; blue nevus, malignant; sarcoma; fibrosarcoma; fibrous histiocytoma, malignant; myxosarcoma; liposarcoma; leiomyosarcoma; rhabdomyosarcoma; embryonal rhabdomyosarcoma; alveolar rhabdomyosarcoma; stromal sarcoma; mixed tumor, malignant; mullerian mixed tumor; nephroblastoma; hepatoblastoma; carcinosarcoma; mesenchymoma, malignant; brenner tumor, malignant; phyllodes tumor, malignant; synovial sarcoma; mesothelioma, malignant; dysgerminoma; embryonal carcinoma; teratoma, malignant; struma ovarii, malignant; choriocarcinoma; mesonephroma, malignant, hemangiosarcoma; hemangioendothelioma, malignant; kaposi’s sarcoma; hemangiopericytoma, malignant; lymphangiosarcoma; osteosarcoma; juxtacortical osteosarcoma; chondrosarcoma; chondroblastoma, malignant; mesenchymal chondrosarcoma; giant cell tumor of bone; ewing’s sarcoma; odontogenic tumor, malignant; ameloblastic odontosarcoma; ameloblastoma, malignant; ameloblastic fibrosarcoma; pinealoma, malignant; chordoma; glioma, malignant; ependymoma; astrocytoma; protoplasmic astrocytoma; fibrillary astrocytoma; astroblastoma; glioblastoma; oligodendroglioma; oligodendroblastoma; primitive neuroectodermal; cerebellar sarcoma; ganglioneuroblastoma; neuroblastoma; retinoblastoma; olfactory neurogenic tumor; meningioma, malignant; neurofibrosarcoma; neurilemmoma, malignant; granular cell tumor, malignant; malignant lymphoma; Hodgkin’s disease; Hodgkin’s lymphoma; paragranuloma; malignant lymphoma; small lymphocytic; malignant lymphoma, large cell, diffuse; malignant lymphoma, follicular; mycosis fungoides; other specified non-Hodgkin’s lymphomas; malignant histiocytosis; multiple myeloma; mast cell sarcoma; immunoproliferative small intestinal disease; leukemia; lymphoid leukemia; plasma cell leukemia; erythroleukemia; lymphosarcoma cell leukemia; myeloid leukemia; basophilic leukemia; eosinophilic leukemia; monocytic leukemia; mast cell leukemia; megakaryoblastic leukemia; myeloid sarcoma; and hairy cell leukemia,

[0706] In one embodiment, the SAR is used to target BCMA and CD38 and is used to treat plasma cell and autoimmune disorders, such as multiple myeloma, plasma cell leukemia, primary effusion lymphoma and systemic lupus erythematosus (SLE). Such a SAR includes antigen binding domains specific to BCMA. and CD38 as described herein. Exemplary such SARs are provided in Table 34 (SEQ ID NO:17638-177810, 17884-17956).

[0707] In one embodiment, the SAR is used to target BCMA and CD22 and is used to treat lymphoid disorders and plasma cell disorders, such as lymphoma, acute lymphocytic leukemia, multiple myeloma, plasma cell leukemia primary effusion lymphoma and systemic lupus erythematosus (SLE). Such a SAR includes antigen binding domains specific to BCMA and CD22 as described herein. Exemplary such SARs are provided in Table 34.

[0708] In one embodiment, the SAR is used to target BCMA and CD 19 and is used to treat lymphoid disorders and plasma cell disorders, such as lymphoma, acute lymphocytic leukemia, multiple myeloma, plasma cell leukemia primary effusion lymphoma and systemic lupus erythematosus (SLE). Such a SAR includes antigen binding domains specific to BCMA and CD19 as described herein. Exemplary such SARs are provided in Table 34 (SEQ ID NO:17665-17737).

[0709] In one embodiment, the SAR is used to target BCMA, CD38 and CD22 and is used to treat lymphoid, plasma cell and autoimmune disorders, such as multiple myeloma, plasma cell leukemia, primary effusion lymphoma, diffuse large B cell lymphoma, B-ALL, chronic lymphocytic leukemia and systemic lupus erythematosus (SLE). Such a SAR includes antigen binding domains specific to BCMA, CD38 and CD22 as described herein.

[0710] In one embodiment, the SAR is used to target BCMA, CD38 and CD19 and is used to treat lymphoid, plasma cell and autoimmune disorders, such as multiple myeloma, plasma cell leukemia, primary effusion lymphoma, diffuse large B cell lymphoma, B-ALL, chronic lymphocytic leukemia and systemic lupus erythematosus (SLE). Such a SAR includes antigen binding domains specific to BCMA, CD38 and CD19 as described herein.

[0711] In one embodiment, the SAR is used to target BCMA, CD38, CD22 and CD19 and is used to treat lymphoid, plasma cell and autoimmune disorders, such as multiple myeloma, plasma cell leukemia, primary effusion lymphoma, diffuse large B cell lymphoma, B-ALL, chronic lymphocytic leukemia and systemic lupus erythematosus (SLE). Such a SAR includes antigen binding domains specific to BCMA, CD38, CD22 and/or CD19 as described herein. Exemplary such SARs are provided in Table 32.

[0712] In one embodiment, the SAR is used to target BCMA, CD38, CD22, CD20 and CD19 and is used to treat lymphoid, plasma cell and autoimmune disorders, such as multiple myeloma, plasma cell leukemia, primary effusion lymphoma, diffuse large B cell lymphoma, B-ALL, chronic lymphocytic leukemia and systemic lupus erythematosus (SLE). Such a SAR includes antigen binding domains specific to BCMA, CD38, CD22, CD20 and/or CD19 as described herein. Exemplary such SARs are provided in Table 32.

[0713] In one embodiment, the SAR is used to target CD19 and CD22 and is used to treat lymphoid and autoimmune disorders, such as lymphoma, acute lymphocytic leukemia, chronic lymphocytic leukemia and systemic lupus erythematosus (SLE). Such a SAR includes antigen binding domains specific to CD19 and CD22 as described herein.

[0714] In one embodiment, the SAR is used to target CD19 and CD20 and is used to treat lymphoid and autoimmune disorders, such as lymphoma, acute lymphocytic leukemia, chronic lymphocytic leukemia and systemic lupus erythematosus (SLE). Such a SAR includes antigen binding domains specific to CD19 and CD22 as described herein.

[0715] In one embodiment, the SAR is used to target CD19, CD22 and CD20 and is used to treat lymphoid and autoimmune disorders, such as lymphoma, acute lymphocytic leukemia, chronic lymphocytic leukemia and systemic lupus erythematosus (SLE). Such a SAR includes antigen binding domains specific to CD19, CD20 and CD22 as described herein.

[0716] In one embodiment, the SAR is used to target CD19, CD22, BCMA and/or CD20 and is used to treat plasma cell, lymphoid and autoimmune disorders, such as multiple myeloma, plasma cell leukemia, primary effusion lymphoma, diffuse large B cell lymphoma, acute lymphocytic leukemia, chronic lymphocytic leukemia and systemic lupus erythematosus (SLE). Such a SAR includes antigen binding domains specific to CD19, CD22, BCMA and/or CD20 as described herein. Exemplary such SARs are provided in Table 31.

[0717] In one embodiment, the SAR is used to target CD123 and CD33 and is used to treat myeloid and myeloproliferative disorders such as acute myeloid leukemia and myelodysplasia. Such a SAR includes antigen binding domains specific to CD123 and CD33 as described herein. Exemplary such SARs are provided in SEQ ID NO (PRT): 22479-22484.

[0718] In one embodiment, the SAR is used to target CD123 and FLT3 and is used to treat lymphoid, myeloid and myeloproliferative disorders such as acute myeloid leukemia, acute lymphoid leukemia and myelodysplasia. Such a SAR includes antigen binding domains specific to CD123 and FLT3 as described herein. Exemplary such SARs are provided in SEQ ID NO (PRT): 22485-22487.

[0719] In one embodiment, the SAR is used to target CD123 and MPL (TPO-R) and is used to treat lymphoid, myeloid and myeloproliferative disorders such as acute myeloid leukemia, acute lymphoid leukemia and myelodysplasia. Such a SAR includes antigen binding domains specific to CD123 and MPL as described herein. Exemplary such SARs are provided in SEQ ID NO (PRT): 22488-22490.

[0720] In one embodiment, the SAR is used to target PSMA and treat prostate cancer. Such a SAR includes an antigen binding domain specific to PSMA as described herein.

[0721] In one embodiment, the SAR is used to target PSMA and CD19 and treat prostate cancer. Such a SAR includes antigen binding domains specific to PSMA and CD19 as described herein. The CD19 specific antigen binding domain is used to primarily stimulate activation, proliferation and expansion of the SAR.

[0722] In one embodiment, the SAR is used to target PSMA and CD22 and treat prostate cancer. Such a SAR includes antigen binding domains specific to PSMA and CD22 as described herein. The CD22 specific antigen binding domain is used to primarily stimulate activation, proliferation and expansion of the SAR.

[0723] In one embodiment, the SAR is used to target PSMA and CD20 and treat prostate cancer. Such a SAR includes antigen binding domains specific to PSMA and CD20 as described herein. The CD20 specific antigen binding domain is used to primarily stimulate activation, proliferation and expansion of the SAR.

[0724] In one embodiment, the SAR is used to target PSMA and BCMA and treat prostate cancer. Such a SAR includes antigen binding domains specific to PSMA and BCMA as described herein. The BCMA specific antigen binding domain is used to primarily stimulate activation, proliferation and expansion of the SAR.

[0725] In one embodiment, the SAR is used to target Her2, IL13Ra2 and/or CD19 and treat breast cancer, gastric cancer or brain cancer. Such a SAR includes antigen binding domains specific to Her2, IL13Ra2 and/or CD19 as described herein. Exemplary such SARs are provided in SEQ ID NO (PRT):22465-22473.

[0726] In one embodiment, the SAR is used to target Her2, IL13Ra2, low conductance chloride channel and/or CD19 and treat breast cancer, gastric cancer or brain cancer. Such a SAR includes antigen binding domains specific to Her2, IL13Ra2, low conductance chloride channel and/or CD19 as described herein. Exemplary such SARs are provided in SEQ ID NO (PRT):22474-22478, 22491-22495.

[0727] In one embodiment, the disclosure provides SARs targeting Her2, Her3, CD22, EGFR and/or CD19. Exemplary such SARs are provided in Table 32.

[0728] In one embodiment, the disclosure provides SARs targeting Her2, IL13Ra2, CD22, and/or CD19. Exemplary such SARs are provided in Table 32.

[0729] In one embodiment, the disclosure provides UNICON SAR targeting different antigens and comprising an adaptor binding domain. Exemplary such SARs are provided in Table 30.

[0730] Pharmaceutical compositions of the disclosure may be administered in a manner appropriate to the disease to be treated (or prevented). The quantity and frequency of administration will be determined by such factors as the condition of the patient, and the type and severity of the patient’s disease. When “an immunologically effective amount,” “an antitumor effective amount,” “a tumor-inhibiting effective amount,” or “therapeutic amount” or “anti-infective” is indicated, the amount of the compositions of the disclosure to be administered can be determined by a physician with consideration of individual differences in age, weight, tumor size, extent of infection or metastasis, and condition of the patient (subject) as the case may be. It can generally be stated that a pharmaceutical composition comprising the immune effector cells (e.g., T cells, NK cells) described herein may be administered at a dosage of 10⁴ to 10⁹ cells/kg body weight, in some instances 10⁵ to 10⁶ cells/kg body weight, including all integer values within those ranges. T or NK cell compositions may also be administered multiple times at these dosages. The cells can be administered by using infusion techniques that are commonly known in immunotherapy (see, e.g., Rosenberg et al., New Eng. J. of Med. 319:1676, 1988) and cellular therapies.

[0731] The dosage ranges for the agent, including SAR adaptors and antibodies, depend upon the potency, and encompass amounts large enough to produce the desired effect e.g., slowing of tumor growth or a reduction in tumor size. The dosage should not be so large as to cause unacceptable adverse side effects. Generally, the dosage will vary with the age, condition, and sex of the patient and can be determined by one of skill in the art. The dosage can also be adjusted by the individual physician in the event of any complication. In some embodiments, the dosage ranges from 0.001 mg/kg body weight to 0.5 mg/kg body weight. In some embodiments, the dose range is from 5 µg/kg body weight to 100 µg/kg body weight. Alternatively, the dose range can be titrated to maintain serum levels between 1 µg/mL and 1000 µg/mL. For systemic administration, subjects can be administered a therapeutic amount, such as, e.g., 0.1 mg/kg, 0.5 mg/kg, 1.0 mg/kg, 2.0 mg/kg, 2.5 mg/kg, 5 mg/kg, 10 mg/kg, 15 mg/kg, 20 mg/kg, 25 mg/kg, 30 mg/kg, 40 mg/kg, 50 mg/kg, or more.

[0732] Administration of the doses recited above can be repeated. In some embodiments, the doses are given once a day, or multiple times a day, for example but not limited to three times a day. In some embodiments, the doses recited above are administered daily for several weeks or months. The duration of treatment depends upon the subject’s clinical progress and responsiveness to therapy.

[0733] In some embodiments, the dose can be from about 2 mg/kg to about 15 mg/kg. In some embodiments, the dose can be about 2 mg/kg. In some embodiments, the dose can be about 4 mg/kg. In some embodiments, the dose can be about 5 mg/kg. In some embodiments, the dose can be about 6 mg/kg. In some embodiments, the dose can be about 8 mg/kg. In some embodiments, the dose can be about 10 mg/kg. In some embodiments, the dose can be about 15 mg/kg. In some embodiments, the dose can be from about 100 mg/m2 to about 700 mg/m2. In some embodiments, the dose can be about 250 mg/m2. In some embodiments, the dose can be about 375 mg/m2. In some embodiments, the dose can be about 400 mg/m2. In some embodiments, the dose can be about 500 mg/m2.

[0734] In some embodiments, the dose can be administered intravenously. In some embodiments, the intravenous administration can be an infusion occurring over a period of from about 10 minute to about 3 hours. In some embodiments, the intravenous administration can be an infusion occurring over a period of from about 30 minutes to about 90 minutes.

[0735] In some embodiments the dose can be administered about weekly. In some embodiments, the dose can be administered weekly. In some embodiments, the dose can be administered weekly for from about 12 weeks to about 18 weeks. In some embodiments the dose can be administered about every 2 weeks. In some embodiments the dose can be administered about every 3 weeks. In some embodiments, the dose can be from about 2 mg/kg to about 15 mg/kg administered about every 2 weeks. In some embodiments, the dose can be from about 200 mg/m² to about 400 mg/m² administered intravenously about every 2 weeks. In some embodiments, a total of from about 2 to about 10 doses are administered. In some embodiments, a total of 4-8 doses are administered. In some embodiments, a total of 5 doses are administered. In some embodiments, a total of 6 doses are administered. In some embodiments, the administration occurs for a total of from about 4 weeks to about 12 weeks. In some embodiments, the initial dose can be from about 1.5 to about 2.5-fold greater than subsequent doses.

[0736] A therapeutically effective amount is an amount of an agent that is sufficient to produce a statistically significant, measurable change in tumor size, tumor growth etc. (efficacy measurements are described below herein). Such effective amounts can be gauged in clinical trials as well as animal studies.

[0737] An agent can be administered intravenously by injection or by gradual infusion over time. Given an appropriate formulation for a given route, for example, agents useful in the methods and compositions described herein can be administered intravenously, intranasally, by inhalation, intraperitoneally, intramuscularly, subcutaneously, intracavity, and can be delivered by peristaltic means, if desired, or by other means known by those skilled in the art. It is preferred that the compounds used herein are administered orally, intravenously or intramuscularly to a patient having cancer. Local administration directly to a tumor mass is also specifically contemplated.

[0738] In embodiments where the subject is administered a UNISAR or UNICON-SAR, the UNISAR/UNICON-SAR cell and the SAR adaptor can be administered together or separately. In embodiments where the subject is separately administered UNISAR/UNICON-SAR cell and the SAR adaptor each of the compositions can be administered, separately, according to any of the dosages and administration routes/routines described herein.

[0739] Precise amounts of active ingredient required to be administered depend on the judgment of the practitioner and are particular to each individual. However, suitable dosage ranges for systemic application are disclosed herein and depend on the route of administration. Suitable regimes for administration are also variable but are typified by an initial administration followed by repeated doses at one or more hour intervals by a subsequent injection or other administration. Alternatively, continuous intravenous infusion sufficient to maintain concentrations in the blood in the ranges specified for in vivo therapies are contemplated.

[0740] In one embodiment, a SAR or cell comprising a SAR of the disclosure is used in combination with an existing therapy or therapeutic agent, for example an anti-cancer therapy. Thus, in another aspect, the disclosure also relates to a combination therapy comprising administration of a SAR-T or pharmaceutical composition of the disclosure and an anti-cancer therapy. The anti-cancer therapy may include a therapeutic agent or radiation therapy and includes gene therapy, viral therapy, RNA therapy bone marrow transplantation, nanotherapy, targeted anti-cancer therapies or oncolytic drugs. Examples of other therapeutic agents include other checkpoint inhibitors, antineoplastic agents, immunogenic agents, attenuated cancerous cells, tumor antigens, antigen presenting cells such as dendritic cells pulsed with tumor-derived antigen or nucleic acids, immune stimulating cytokines (e.g., IL-2, IFNa2, GM-CSF), targeted small molecules and biological molecules (such as components of signal transduction pathways, e.g., modulators of tyrosine kinases and inhibitors of receptor tyrosine kinases, and agents that bind to tumor-specific antigens, including EGFR antagonists), an anti-inflammatory agent, a cytotoxic agent, a radiotoxic agent, or an immunosuppressive agent and cells transfected with a gene encoding an immune stimulating cytokine (e.g., GM-CSF), chemotherapy. In one embodiment, the SAR-T or pharmaceutical composition of the disclosure is used in combination with surgery. The SAR-T or pharmaceutical composition of the disclosure may be administered at the same time or at a different time as the other therapy, e.g., simultaneously, separately or sequentially.

[0741] In one embodiment, the method includes administering a cell expressing the SAR molecule, as described herein, in combination with an agent which enhances the activity of a SAR-expressing cell, wherein the agent is a cytokine, e.g., IL-2, IL-7, IL-15, IL-21, or a combination thereof.

[0742] In other embodiments, the cells expressing a SIR molecule are administered in combination with an agent that ameliorates one or more side effects associated with administration of a cell expressing a SIR molecule. Side effects associated with the SIR-expressing cell can be chosen from cytokine release syndrome (CRS), hemophagocytic lymphohistiocytosis (HLH) or neurological complications. Examples of such agents include steroids (e.g. prednisone, dexamethasone), IL6R antagonists (e.g., tocilizumab), src kinase inhibitors (e.g., dasatinib), a kinase inhibitor (e.g., Ibrutinib), calcineurin inhibitors (e.g., tacrolimus or cyclosporine A) or chemotherapy drugs (e.g., cyclophosphamide, methotrexate or vincristine).

[0743] In embodiments of any of the aforeseaid methods or uses, the cells expressing the SIR molecule are administered in combination with an agent that treats the disease associated with expression of the target antigen, e.g., any of the second or third therapies disclosed herein. Additional exemplary combinations include one or more of the following.

[0744] In another embodiment, the cell expressing the SIR molecule, e.g., as described herein, can be administered in combination with another agent that increases the expression of the target antigen against which the SAR is directed.

[0745] In another embodiment, the SIR-expressing immune effector cell of the disclosure, e.g., T cell, NK cell or hematopoietic stem cell, is administered to a subject along with an agent that disrupt the immunosuppressive pathways in the tumor microenvironment in certain cancers.

[0746] In one embodiment, the SAR-expressing immune effector cell of the disclosure, e.g., T cell, NK cell or hematopoietic stem cell, is administered to a subject that has received a previous stem cell transplantation, e.g., autologous stem cell transplantation or an allogenic stem cell transplanation.

[0747] In one embodiment, the SIR-expressing immune effector cell of the disclosure, e.g., T cell, NK cells or hematopoietic stem cells, is administered to a subject that has received a previous dose of chemotherapy, such as melphalan, fludarabine, etoposide or cylophosphamide.

[0748] In one embodiment, the SAR-expressing immune effector cell of the disclosure, e.g., T cell, NK cells or hematopoietic stem cells, is administered to a subject that has received a previous dose of a drug that enhances the expression of the target antigen of SAR, such as compounds 27, 40 and 49 (Du, J et al, Blood, Prepublished online Oct. 12, 2016) Arsenic trixoxide or ATRA. Similarly, BCMA-targeted SAR can be used in combination with γ-secretase inhibitors.

[0749] In one embodiment, the cell expressing a SAR molecule, e.g., a SAR molecule described herein, is administered in combination with an agent that increases the efficacy of a cell expressing a SIR molecule, e.g., an agent described herein. In one embodiment, the cells expressing a SAR molecule, e.g., a SAR molecule described herein, are administered in combination with a low, immune enhancing dose of an mTOR inhibitor.

[0750] In an embodiment, the SAR expressing cells are used in combination with an agent that control the activity of the SAR-expressing cells. In an embodiment, the agent is a SAR adaptor.

[0751] In some embodiments, provided are methods for depleting SAR-expressing engineered immune cells from a subject adminstered with said cells. Depletion can be by inhibition or elimination.

[0752] In one aspect, a method for depleting engineered immune cells expressing a SAR comprising an epitope specific for a monoclonal antibody comprises contacting said engineered immune cell with a monoclonal antibody specific for the epitope.

[0753] In some embodiments, a method for depleting from a subject administered with engineered immune cells expressing a SAR comprising an epitope specific for a monoclonal antibody comprises administering to the subject a monoclonal antibody specific for the epitope. In these embodiments, administration of the monoclonal antibody specific for the epitope present in the extracellular domain of the SAR to the subject eliminates or inhibits the activity of engineered SAR-expressing immune cells from the subject. In one aspect, depletion of engineered CAR expressing immune cells allows for recovery of an endogenous population of SAR-expressing cells.

[0754] In one aspect, the disclosure relates to a method for promoting recovery of endogenous antigen-expressing cells in a subject administered with engineered immune cells expressing at cell surface a SAR that target one or more antigens expressed on endogenously expressing cells comprising an epitope specific for an antigen binding agent (e.g., monoclonal antibody, vHH domain, antibody fragment, non-immunoglobulin antigen binding scaffold etc.), the method comprising administering a an antigen binding agent (e.g., monoclonal antibody, vHH domain, antibody fragment, non-immunoglobulin antigen binding scaffold etc.) specific for the epitope to the subject. The term “endogenous antigen expressing cells” as used herein refer to normal healthy cells that express the antigen targeted by the SAR. In an exemplary embodiment, endogenous antigen expressing cells refer to normal bone marrow cells that express CD33 in a subject administered CD33-specific SAR-T cells. Other examples of endogenous antigen expressing cells include cells expressing CD34, CD123, CD70, CD19 etc.

[0755] In some embodiments, endogenous antigen-expressing cells are endogenous antigen-expressing bone marrow cells. In one aspect, the term “recovery” refers to increasing the number of endogenous antigen-expressing cells. The number of endogenous antigen-expressing cells may increase due to increase in proliferation of endogenous antigen-expressing cells and/or due to reduction in elimination of endogenous antigen-expressing cells by SAR expressing engineered immune cells. In some embodiments, administration of the antigen binding agent (e.g., monoclonal antibody) to the subject depletes the antigen expressing engineered immune cells and increases the number of endogenous antigen-expressing cells, e.g, endogenous antigen-expressing bone marrow progenitor cells, in the subject. In one embodiment, administration of the antigen binding agent (e.g., monoclonal antibody) to the subject increases the number of endogenous antigen-expressing cells by at least about 10%, 15%, 20%, 25%, 30%, 35%, 40%, 45%, 50%, 55%, 60%, 65%, 70%, 75%, 80%, 85%, 90%, or 95%, compared to the number of endogenous antigen-expressing cells prior to administration of the antigen binding agent.

[0756] In one aspect, provided is a method for treating an Antigen X-mediated condition in a subject, the method comprising: (a) administering to the subject engineered immune cells expressing at cell surface X-specific SARs comprising one or more epitopes specific for one or more monoclonal antibodies; and (b) subsequently depleting the engineered immune cells from the subject by administering one or more monoclonal antibodies specific for the epitope to the subject. In an embodiment, the X-specific SAR may be a bispecific or a multispecific SAR which targets antigens in addition to antigen X.

[0757] In some embodiments, the antigen binding agent used in the method for depleting SAR-expressing engineered immune cells are selected from alemtuzumab, ibritumomab tiuxetan, muromonab-CD3, tositumomab, abciximab, basiliximab, brentuximab vedotin, cetuximab, infliximab, rituximab, bevacizumab, certolizumab pegol, daclizumab, eculizumab, efalizumab, gemtuzumab, natalizumab, omalizumab, palivizumab, ranibizumab, tocilizumab, trastuzumab, vedolizumab, adalimumab, belimumab, canakinumab, denosumab, golimumab, ipilimumab, ofatumumab, panitumumab, QBEND-10, ustekinumab, and combinations thereof.

[0758] In some embodiments, said epitope specific for a monoclonal antibody (mAb-specific epitope) is a CD20 epitope or mimotope (SEQ ID NO: 22418) and the antigen binding agent specific for the epitope is rituximab. In some embodiments, said epitope specific for a monoclonal antibody (mAb-specific epitope) is a CD20 epitope (SEQ ID NO: 22412) and the antigen binding agent specific for the epitope is Obinutuzumab. In some embodiments, said epitope specific for a monoclonal antibody (mAb-specific epitope) is a Her2 epitope, e.g., SEQ ID NO: 22432, and the antigen binding agent specific for the epitope is Herceptin (Trastuzumab), Kadcyla (Ado-trastuzumab), or ENHERTU (fam-trastuzumab deruxtecan-nxki). In some embodiments, said epitope specific for an antigen binding agent (e.g., mAb-specific epitope) is an EGFR epitope, e.g., SEQ ID NO: 22421-22425, and the antigen binding agent specific for the epitope is cetuximab. In some embodiments, said epitope specific for a monoclonal antibody (mAb-specific epitope) is an EGFR epitope, e.g., SEQ ID NO: 22426-22431, and the antigen binding agent (e.g., mAb) specific for the epitope is Panitumumab.

[0759] In some embodiments, the step of administering a monoclonal antibody to the subject comprises infusing the subject with the monoclonal antibody. In some embodiments, the amount of epitope-specific mAb administered to the subject is sufficient to eliminate at least 20%, 30%, 40%, 50%, 60%, 70%, 80% or 90% of the CAR-expressing immune cell in the subject.

[0760] In some embodiments, the step of administering a monoclonal antibody to the subject comprises infusing the subject with 375 mg/m² of rituximab, once or several times weekly. In some embodiments, the step of administering a monoclonal antibody to the subject comprises infusing the subject with 6 mg/kg of Panitumumab by intravenous infusion over 60 minutes, once or several times weekly or every 14 days. In some embodiments, the step of administering a monoclonal antibody to the subject comprises infusing the subject with 8 mg/kg of Herceptin by intravenous infusion over 60 minutes, once or several times weekly or every 14 days. In some embodiments, the step of administering a monoclonal antibody to the subject comprises infusing the subject with 400 mg/m² of cetuximab, once or several times weekly. In some embodiments, the step of administering a monoclonal antibody to the subject comprises infusing the subject with 3.6 mg/kg of Kadcyla, once or several times every 3 weeks. In some embodiments, the step of administering a monoclonal antibody to the subject comprises infusing the subject with 5.4 mg/kg of ENHERTU, once or several times every 3 weeks.

[0761] In some embodiments, when immune cells expressing a SAR comprising an mAb-specific epitope (SAR-expressing immune cells) are depleted in a CDC assay using epitope-specific mAb, the amount of viable SAR-expressing immune cells decreases, e.g., by at least 10%, 20%, 30%, 40%, 50%, 60%, 70%, 80% or 90%.

[0762] In some embodiments, a cytotoxic drug is coupled to the epitope-specific antigen binding agent (e.g., mAbs) which are used to deplete SAR-expressing immune cells. By combining targeting capabilities of monoclonal antibodies with the cell-killing ability of cytotoxic drugs, antibody-drug conjugate (ADC) allows a sensitive discrimination between healthy and diseased tissue when compared to the use of the drug alone.

[0763] In some embodiments, the epitope-specific mAb to be infused is conjugated beforehand with a molecule able to promote complement dependent cytotoxicity (CDC).

[0764] Therefore, the complement system helps or complements the ability of antibodies to clear pathogens from the organism. When stimulated by one of several, is triggered an activation cascade as a massive amplification of the response and activation of the cell-killing membrane attack complex. Different molecule may be used to conjugate the mAb, such as glycans [Courtois, A, Gac-Breton, S., Berthou, C, Guezennec, I, Bordron, A. and Boisset, C. (2012), Complement dependent cytotoxicity activity of therapeutic antibody fragments is acquired by immunogenic glycan coupling, Electronic Journal of Biotechnology ISSN: 0717-3458; http://www.ejbiotechnology.info DOI: 10.2225/vol15-issue5).

[0765] The disclosure also provides kits for use in the instant methods. Kits of the disclosure include one or more containers comprising a polynucleotide encoding a SAR, or an engineered immune cell comprising a polynucleotide encoding a SAR as described herein, and instructions for use in accordance with any of the methods of the disclosure described herein. The SARs and other compositions and methods the disclosure can be used for diagnostic, research and development and therapeutic applications. Generally, these instructions comprise a description of administration of the engineered immune cell for the above described therapeutic treatments. The SARs and other compositions and methods the dsclosure can be used for diagnostic, therapeutic research and development, laboratory research and therapeutic applications. Therefore, the kits and the accompanying instructions may comprise description of how to manufacture and use the various compositions and methods of the disclosure for diagnostic, therapeutic research and development, laboratory research and therapeutic applications.

[0766] The kit may include one or more agents for lymphodepletion and/or myelodepletion (e.g., alemtuzumab, cytoxan, fludarabine, cyclophosphamide, etoposide or temozolomide). The kit may include one or more adaptors or antibodies that can be used in combination with the SARs of the disclosure. The kit may include drugs (e.g., Dasatinib or Tocilizumab) or SAR adaptors to control the activity of SAR expressing cells. The kit may include the map and sequence of the SAR and vector encoding the SAR and the SAR adaptors. The kit may include instruction about how to generate vectors expressing the SAR, how to introduce SAR into immune cells (e.g., T or NK cells), how to expand SAR-expressing cells and how to test the activity of SAR-expressing cells.

[0767] The kits may include instructions how to generate novel SARs, SAR adaptors, antibodies, including bispecific antibodies based on the novel antigen binding domains described in this disclosure and instructions regarding methods of use of such reagents.

[0768] The instructions relating to the use of the engineered immune cells as described herein generally include information as to dosage, dosing schedule, and route of administration for the intended treatment. The containers may be unit doses, bulk packages (e.g., multi-dose packages) or sub-unit doses. Instructions supplied in the kits of the disclosure are typically written instructions on a label or package insert (e.g, a paper sheet included in the kit), but machine-readable instructions (e.g, instructions carried on a magnetic or optical storage disk) are also acceptable. In some embodiments, the containers are identifiable (e.g, by label, barcode, or radio-frequency identification (RFID)), trackable, or imprinted with a machine-readable container identifier.

[0769] The kits of this disclosure are in suitable packaging. Suitable packaging includes, but is not limited to, vials, bottles, jars, flexible packaging (e.g., sealed Mylar or plastic bags), and the like. In some embodiments, the container (e.g., plastic bag) is suitable for intravenous infusion. Also contemplated are packages for use in combination with a specific device, such as an inhaler, nasal administration device (e.g, an atomizer) or an infusion device such as a minipump. A kit may have a sterile access port (for example the container may be an intravenous solution bag or a vial having a stopper pierceable by a hypodermic injection needle). The container may also have a sterile access port (for example the container may be an intravenous solution bag or a vial having a stopper pierceable by a hypodermic injection needle). At least one active agent in the composition is a SAR. The container may further comprise a second pharmaceutically active agent.

[0770] Kits may optionally provide additional components such as buffers and interpretive information. Normally, the kit comprises a container and a label or package insert(s) on or associated with the container.

[0771] Unless otherwise defined herein, scientific and technical terms used in connection with the present disclosure shall have the meanings that are commonly understood by those of ordinary skill in the art. While the foregoing disclosure provides a general description of the subject matter encompassed within the scope of the present invention, including methods, as well as the best mode thereof, of making and using this invention, the following examples are provided to further enable those skilled in the art to practice this disclosure and to provide a complete written description thereof. However, those skilled in the art will appreciate that the specifics of these examples should not be read as limiting on the invention, the scope of which should be apprehended from the claims and equivalents thereof appended to this disclosure. Various further aspects and embodiments of the present disclosure will be apparent to those skilled in the art in view of the present disclosure.

[0772] Animal models can also be used to measure SAR activity. For example, xenograft model using human cancer associated antigen described herein-specific SAR⁺ T cells to treat a primary human pre-B-ALL in immunodeficient mice can be used. Dose dependent SAR treatment response can be evaluated. See, e.g., Milone et al., Molecular Therapy 17(S): 1453-1464 (2009). Assessment of cell proliferation and cytokine production has been previously described, e.g., at Milone et al., Molecular Therapy 17(S): 1453-1464 (2009). Cytotoxicity can be assessed by a standard ⁵¹Cr-release assay or Matador assay. Imaging technologies can be used to evaluate specific trafficking and proliferation of SIRs in tumor-bearing animal models.

[0773] Other assays, including those described in the Example section herein as well as those that are known in the art can also be used to evaluate the SARs described herein.

[0774] All documents and sequence database identifiers mentioned in this specification are incorporated herein by reference in their entirety. “and/or” where used herein is to be taken as specific disclosure of each of the two specified features or components with or without the other. For example, “A and/or B” is to be taken as specific disclosure of each of (i) A, (ii) B and (iii) A and B, just as if each is set out individually herein. Unless context dictates otherwise, the descriptions and definitions of the features set out above are not limited to any particular aspect or embodiment of the disclosure and apply equally to all aspects and embodiments which are described.

[0775] The disclosure is further described in the non-limiting examples.

### EXAMPLES

[0776] Cell lines engineered to express luciferases (e.g., GLuc or NLuc) for measuring cytotoxicity of different constructs targeting different cell surface and intracellular antigens are provided in Table C-1. Cell lines used in these experiments, target antigens on the cells lines and their growth media are shown in the following Table C-1. The relative level of expression of the commonly used blood lineage antigens in several target cell lines is provided in Table C-2. Cells were cultured at 37° C., in a 5% CO₂ humidified incubator. The cell lines were obtained from ATCC, NIH AIDS reagent program or were available in the laboratory.

TABLE C-1

| | | |
|---|---|---|
| Cell line | Culture Conditions | Exemplary SAR Target Antigens Expressed |
| BC-1 | RPMI, 20% FCS | BCMA, GPRC, CD138 |
| BC-3 | RPMI, 20% FCS | BCMA, GPRC, CD138 |
| BCBL-1 | RPMI, 20% FCS | GPRC, CD138 |
| JSC-1 | RPMI, 20% FCS | GPRC, CD138 |
| MM1S | RPMI, 10% FCS | CD38, GPRC, CD44, CD200R |
| U266 | RPMI, 10% FCS | BCMA, WT1/HLA-A2+, CS1, CLL1, CD138, c-MET, IL6R, CD179b, NY-ESO/HLA-A2, NYBR, LAMP1 |
| L363 | RPMI, 10% FCS | BCMA, GPRC, WT1/HLA-A2+, CS1, CLL1, CD138, NY-ESO/HLA-A2, NYBR, LAMP1 |
| K562 | RPMI, 10% FCS | CD33, IL1Ra, TnAg |
| BV173 | RPMI, 10% FCS | CD123, CD179b, IL1Ra, WT1/HLA-A2+,CXCR4, FLT3, CD179a |
| Nalm6 | RPMI, 10% FCS | CD19, CD20, CD22, CD179b, CD179a |
| HL60 | RPMI, 10% FCS | CD33, CD34, CLL1, IL6R, CD32, CD179 |
| U937 | RPMI, 10% FCS | CD4, CLL1 |
| RS:411 (RS411) | RPMI, 20% FCS | CD19, Folate Receptor beta (FRbeta), TGFbeta, CD179b, NKG2D, FLT3, CD179a |
| MV:411 | RPMI, 10% FCS | FLT3, CD123, FRbeta |
| Raji | RPMI, 10% FCS | CD19, CD20, CD22, BCMA, CD38, CD70, CD79, Folate Receptor beta, CLL1 |
| HEL-92.1.7 (HEL) | RPMI, 10% FCS | MPL, CD33, CD32, CD200R |
| Jurkat | RPMI, 10% FCS | TnAg, TSLRP, TSHR, CD4, CD38 |
| Daudi | RPMI, 10% FCS | BCMA, FRbeta |
| REC-1 | RPMI, 10% FCS | NKG2D, ROR1 |
| KG-1 | RPMI, 20% FCS | CD33, CD34, CD123, TSLRP |
| CEM | RPMI, 10% FCS | CD5, CD43 |
| U937 | RPMI, 10% FCS | CD4, CLL1 |
| LAMA5 | RPMI, 10% FCS | WT1/HLA-A2 |
| A549 | DMEM,10% FCS | ROR1, CD22, TIM1, CDH17 |
| HT29 | DMEM, 10% FCS | EGFR, SLEA, c-MET |
| Molm-13 | RPMI, 20% FCS | FLT3, IL6R, LAMP1, TSLRP, CD4, CSF2RA, CXCR4, IL6R, CSF2RA, GPC3 |
| A431 | DMEM,10% FCS | EGFR, Folate Receptor Alpha, Her3 |
| P19 | DMEM,10% FCS | SSEA |
| THP-1 | RPMI, 10% FCS | CD32, CD33,CXCR4, CD123, CD44, IL6R, Folate Receptor beta, CD70, LAMP1, FLT3, CSF2RA |
| U87MG | DMEM,10% FCS | CD276, gpNMB, IL13RA2 |
| LoVo | DMEM, 10% FCS | Tissue Factor, CDH17, EGFR |
| SKOV-3 | DMEM,10% FCS | Folate Receptor alpha (FR1), FSHR, Her2, Her3, LHR, MSLN, TIM1, EPCAM |
| NCI-H1993 | DMEM,10% FCS | EGFR |
| Kasumi-1 | RPMI, 20% FCS | CLEC5A, PR1/HLA-A2, TGFbeta, |
| Jeko-1 | RPMI, 20% FCS | BCMA, ROR1 |
| PC-3 | DMEM,10% FCS | CGH, TROP2, PSCA, PSMA. EPCAM, FSHR, CLD18A2 (CLDN18.2) |
| HeLa | DMEM, 10% FCS | EGFR, FR1, MSLN, TSHR |
| LnCap | DMEM,10% FCS | EGFR, FSHR, PSCA, PSMA, CD22, Her3, CD22, LHR, CLD18A2 (CLDN18.2) |
| OVCAR-3 | DMEM,10% FCS | B7H4, CDH6, DLL3, FR1, FSH, LHR, MSLN, PTK7, TnAg, TSHR, L1CAM |
| MEL-624 | DMEM,10% FCS | CDH19, GD2, GD3, gp100/HLA-A2, gpNMB, HMWMAA, NYESO/HLA-A2, MART1/HLA-A2 |
| LS174-T | DMEM,10% FCS | CEA |
| MEL-526 | DMEM, 10% FCS | GD2 |
| MDA-MB231 | DMEM,10% FCS | CD324, Muc1 |
| L1236 | RPMI, 20% FCS | CD30, CD23, PDL1 |
| L428 | RPMI, 20% FCS | CD30, CD123, CCR4, PDL1 |
| L540 | RPMI, 20% FCS | CD30, CCR4, PDL1 |
| Molt-16 | RPMI, 20% FCS | IL1ra, NKG2D |
| CEM | RPMI, 10% FCS | CD5 |
| MG-63 | DMEM,10% FCS | IL13RA2 |
| Karpass-299 | RPMI, 20% FCS | Alk, GPRC, PDL1 |
| MCF7 | DMEM, 10% FCS | B7D4, CD276, TROP2, Her3, Muc1, LewisY, LHR |
| AA-2 | RPMI, 10% FCS | HIV1 env glycoprotein (gp120) |
| HL2/3 | DMEM,10% FCS | HIV1 env glycoprotein (gp120) |
| TF228.1.16 | DMEM, 10% FCS | HIV1 env glycoprotein (gp120), CCR4 |
| TT | DMEM, 10% FCS | TGF-Beta, TSHR, GFRalpha4 |
| DMS79 | RPMI, 10% FCS | Fucosyl-GM1, Slea (CA19.9; Sialyl Lewis Antigen) |
| LAN-5 | DMEM, 10% FCS | ALK, DLL3, GFRalpha4, FUCOSYL-GM1 |
| PEER1 | RPMI, 10% FCS | TSHR |
| SK-MEL-37 | DMEM, 10% FCS | DLL3, GD2 |
| F9 | DMEM, 10% FCS | SSEA |
| HepG2 | DMEM, 10% FBS | GPC3, AFP/HLA-A2, TAJ |

TABLE C-2

Relative expression of different antigens in blood cancer cell lines on a scale of 1-5 with 5 being the highest

| | RAJI | RAJI-CD19-KO | NLAM6 | RS;411 | Daudi | L363 | U266 | THP |
|---|---|---|---|---|---|---|---|---|
| CD19 | 5 | 0 | 4 | 3 | 4.5 | 0 | 0 | 0 |
| CD22 | 2 | 2 | 2 | 3 | 3 | 0 | 0 | 0 |
| CD20 | 4 | 4 | 0.2 | 0 | 5 | 0 | 0 | 0 |
| BCMA | 4 | 4 | 0.2 | 0 | 4 | 4 | 4 | 0 |
| CD38 | 4 | 4 | 4 | 4 | 5 | 5 | 3 | 3 |

[0777] Jurkat cell line (clone E6-1) engineered with aNFAT-dependent EGFP (or GFP) reporter gene was a gift from Dr. Arthur Weiss at University of California San Francisco and have been described to study CAR-signaling ((Wu, CY et al., Science 350:293-302,2015). Jurkat cells were maintained in RPMI-1640 medium supplemented with 10% FBS, penicillin and streptomycin.

### Generation of Lentiviral Vectors Encoding SARs

[0778] The lentiviral vectors pLenti-EF1a or pLenti-EF1α (SEQ ID NO: 1), pLenti-EF1a-DWPRE [SEQ ID NO: 2] and pCCLc-MNDU3 Vector (SEQ ID NO: 3) were used. The psPAX2 vector was a gift from Didier Trono (Addgene plasmid # 12260). The pLP/VSVG envelope plasmid and 293FT cells were obtained from Invitrogen (ThermoFisher Scientific).

[0779] The generation of Chimeric antigen receptor (e.g., 2^{nd} generation CARs, SIRs, Ab-TCR and TFP etc.), the generation and use of GGS-NLuc fusion proteins (Topanga and Malibu-Glo assays), and the generation and use of luciferase (e.g., GLuc) reporter cell lines for measurement of cellular cytotoxicity using the Matador assays have been described (PCT/US2017/024843, PCT/US2017/025602, PCT/US2017/052344, PCT/US2017/064379 and PCT/US2018/53247).

### Lentivirus and Retrovirus Vectors

[0780] Lentiviruses were generated by calcium phosphate or PI based transfection in 293FT cells essentially as described previously (Matta H et al, Cancer biology and therapy. 2(2):206-10. 2003). The virus was either used fresh to infect the target cells or stored frozen in aliquots at -80° C.

### Infection of T Cells and PBMC

[0781] Buffy coat cells were obtained from healthy de-identified adult donors from the Blood Bank at Children Hospital of Los Angeles and used to isolate peripheral blood mononuclear cells (PBMC) by Ficoll-Hypaque gradient centrifugation. PBMC were either used as such or used to isolate T cells using CD3 magnetic microbeads (Miltenyi Biotech). PBMC or isolated T cells were re-suspended in XVIVO medium (Lonza) supplanted with 10 ng/ml CD3 antibody, 10 ng/ml CD28 antibody and 100 IU recombinant human-IL2. Cells were cultured at 37° C., in a 5% CO2 humidified incubator. Cells were activated in the above medium for 1 day prior to infection with lentiviral vectors. In general, primary cells (e.g., T cells) were infected in the morning using spin-infection (1800 rpm for 90 minutes at 37° C. with 300 µl of concentrated virus that had been re-suspended in XVIVO medium in the presence of 8 µg/ml of Polybrene® (Sigma, Catalog no. H9268). The media was changed in the evening and the infection was repeated for two more days for a total of 3 infections. After the 3rd infection, the cells were pelleted and resuspended in fresh XVIVO media containing 10 ng/ml CD3 antibody, 10 ng/ml CD28 antibody and 100 IU recombinant human-IL2 and supplemented with respective antibiotics (if indicated) and place in the cell culture flask for selection, unless indicated otherwise. Cells were cultured in the above medium for 10-15 days in case no drug selection was used and for 20-30 days in case drug-selection was used. In cases, where cells were infected with a lentivirus expressing EGFP, they were expanded without drug-selection or flow-sorted to enrich for EGFP-expressing cells. For infection of cancer cell lines, approximately 500,000 cells were infected with 2 ml of the unconcentrated viral supernatant in a total volume of 3 ml with Polybrene® (Sigma, Catalog no. H9268). Then next morning, the cells were pelleted and resuspended in the media with respective antibiotics and place in the cell culture flask for selection.

### FACS Analysis for Detecting Expression of SAR

[0782] For detection of SARs using Protein L staining, 1 × 10⁶ cells were harvested and washed three times with 3 ml of ice-cold 1 × PBS containing 4% bovine serum albumin (BSA) wash buffer. After wash, cells were resuspended in 0.1 ml of the ice-cold wash buffer containing 1 µg of protein L at 4° C. for 1 hour. Cells were washed three times with ice-cold wash buffer, and then incubated (in the dark) with 10 µl of APC-conjugated streptavidin in 0.1 ml of the wash buffer for 30 minutes followed by two washings with ice cold wash buffer. FACS was done using FACSVerse analyzer from BD Biosciences.

### Assay to Detect the Expression of Antigens on Target Cells and to Determine The Antigen Binding Activity of Various of Antigen Binding Moieties Used in the Construction of the SARs and BiTes

[0783] The expression of antigens on target cells was determined by bioinformatics approaches in combination with immunostaining with antigen specific antibodies or a highly sensitive antigen detection assay as described in PCT/US2017/025602 and incorporated herein in its entirety by reference. This assay involves the fusion of a GLuc or NLuc reporter fragment to the antigen binding domain of an antibody, a scFv, a vHH or any other antigen binding fragment or any receptor and ligand. The SEQ ID NOs of the exemplary soluble forms of several antigens containing their extracellular domains in fusion with Luc are provided in Table 23. These constructs also carry a puromycin resistance gene (PAC), which is optional and not needed for the functionality of the soluble proteins. The SEQ ID Nos of the exemplary scFv in fusion with Luc are provided in Table 21. The SEQ ID Nos of the exemplary SVH in fusion with Luc are provided in Table 22. These constructs also carry a puromycin resistance gene (PAC), which is optional and not needed for the functionality of the scFv luciferase fusion proteins.

### The Immune Effector Cells Expressing SAR Are Tested in the Following Assays to Identify the Functional SAR

[0784] (A) Topanga Assay (NLuc binding assay): The control vector- and SAR-expressing Jurkat-NFAT-GFP or T cells are stained with the target Antigen-Nluc fusion protein (as described above) and their ability to bind to the target antigen is assayed by measuring Nluc activity. For example, Jurkat-NFAT-GFP cells expressing FMC63 based CAR targeting CD19 show increased binding to CD19-NLuc fusion protein as compared to control vector expressing Jurkat-NFAT-GFP cells or parental Jurkat-NFAT-GFP cells.

[0785] (B) Assay for cytokine production: The control vector- and SAR-expressing Jurkat-NFAT-GFP or T cells are cocultured with the target cell lines for 4-96 hours and supernatant examined for induction of cytokines (e.g., IL2, IFNγ, TNFα etc.) expresson using ELISA.

[0786] (C) Assay for Cytotoxic Activity in vitro and in vivo: The uninfected T cells or those expressing a control vector or SAR are cocultured with the target cell lines expressing a non-secretory form of a luciferase (such as GLuc, NLuc, Turboluc 16 etc.) for 4-96 hours and induction of cell lysis examined by measuring the luciferase activity as described in PCT/US17/52344.

[0787] Induction ofNFAT promoter driven GFP expression. The control vector- and SAR-expressing Jurkat-NFAT-GFP cocultured for 4-24 hours with the target antigen-expressing cell line (described above) and their ability to bind to the target antigen is assayed by measuring induction of GFP expression using Flow Cytometry. Cellular supernatant is collected and assayed for the induction of cytokines (e.g., IL2).

### Induction of NFAT Promoter Driven GFP Expression

[0788] A number of different single chain and multi chain SAR constructs on different backgrounds (e.g., 2^{nd} generation CAR, double chain SIR, one and half chain SIR etc) targeting different antigens were constructs. While some constructs targeted a single antigen, others targeted more than one antigen or two different epitopes of a single antigen.

[0789] The control vector- and SAR-expressing Jurkat-NFAT-GFP cocultured for 4-24 hours with the target antigen-expressing cell line (described above) and their ability to bind to the target antigen is assayed by measuring induction of GFP expression using Flow Cytometry. Cellular supernatant is collected and assayed for the induction of cytokines (e.g., IL2).

[0790] JNG (Jurkat cells expressing EGFP under an NFAT promoter) were infected with lentiviral vectors encoding different single chain and multi-chain SARs by spinfection in the presence of 8 µg/ml of Polybrene® (Sigma, Catalog no. H9268). The Jurkat-NFAT-GFP cells are engineered in such a way that the IL-2 promoter, which carries NFAT binding sites, is cloned upstream of the GFP gene. These cells have been used to study signaling via TCR and CAR. The different SARs were stably expressed in Jurkat NFAT-GFP cells by lentiviral mediated gene transfer, followed by selection with puromycin or blasticidin. No drug selection was used in case the construct lacked an antibiotic resistance gene. The SAR-expressing Jurkat-NFAT-GFP cells were cocultured with the target cells at E:T ratio of approximately 1:2 for approximately 4 hours to 18 hours. When the interaction between SIRs and their target antigen results in activation of the NFAT pathway, GFP expression is induced. Hence Jurkat-NFAT-GFP cells expressing SAR show increased levels of GFP expression when they interact with target cell lines expressing the receptor for the SIR. Induction of GFP expression by coculturing of Jurkat-NFAT-GFP cells expressing different SIR constructs and the different target cells was studied essentially as described previously (Wu, Roybal, Puchner, Onuffer, & Lim, 2015). GFP expression was monitored by FACS analysis. The Jurkat-NFAT-GFP (parental) cells were used as control. The results with different SARs are summarized in the following summary Tables. The structure of different constructs can be determined based on their names. For example, the construct CD8SP-CD19-hu-mROO5-1-vL-[hTCRa-C SDVP]-F-F2A-Spe-IgHSP-Apa-CD20-vHH-2HCD25-G4S-CDl9-hu-mROO5-1-vH-Mlu-[hTCRb-KACIAH]-F-P2A-PAC has the following modules from 5′ to 3′ direction: a CD8 signal peptide (CD8SP), the CD19 targeting hu-mROO5-1 vL fragment (CD19-hu-mROO5-1), Xho1 cloning site, human TCRa constant chain containing CSDVP mutations (hTCRa-CSDVP), Furine cleavage site (F), F2A ribosomal skip sequence (F2A), SpeI site, human IgH signal peptide (IgHSP), Apa I restriction enzyme site, camelid CD20-2HCD25-VHH module targeting CD20, BamHI restriction enzyme site, Glycinex4-serine linker (G4S), BstI restriction enzyme site, CD19-hu-mROO5-1-vH fragment targeting CD19, Mlu I restriction enzyme site, human TCRb constant chain containing KACIAH mutations ([hTCRb-KACIAH]), Furine cleavage site (F), P2A ribosomal skip sequence and Puromycin resistance gene (PAC). The sequence of the other constructs in the table can be similarly determined from their names and by referring to the different Tables of this disclosure that provide the names and SEQ ID NO of the different modules. Alternatively, the composition and modular architecture of the different SAR constructs can be determined from their sequences by bioinformatics tools, including using nucleic acid and amino acids homology searches. A SAR is considered positive in the assay in case the SAR expressing Jurkat-NFAT-GFP cells show greater % GFP positive cells when cultured with the target cell line as compared to parental Jurkat-NFAT-GFP cells. The signs +/-, +, 2+ etc. after the name of the cell lines indicate the relative degree of positivity on the Jurkat-NFAT-GFP assay as measured by the % GFP positive cells after culture of the SAR expressing Jurkat-NFAT-GFP cells with that cell line above the % GFP cells observed in parental Jurkat NFAT-GFP cells serving as controls. In general, the number +/-, +, 2+, 3+, 4+, 5+ refer to approximately 5%, 10%, 20%, 30%, 40% and 50% GFP positive cells. The % of GFP induction in the above assay is dependent not only the the relative strength of the SAR but also, among other factors, on the relative level of expression of the SAR in the JNG cells and the relative level of expression of the target antigen in the target cell line. To control for the difference in gene transduction efficiency of the different SAR constructs, the experiment was conducted with JNG cells transduced with SAR constructs co-expressing a drug resistance gene (e.g., puromycin or PAC) followed by drug selection to generate a stable population of SAR-expressing cells. It is to be noted that the drug resistance gene (e.g., PAC) in the SAR constructs is optional and in vivo studies were conducted with SAR constructs lacking the PAC gene.

### Unispecific, Bispecific and Biparatopic Single Chain SARs on 2nd Generation Car Backbone

[0791] A number of unispecific, bispecific and biparatopic constructs on the 2^{nd} generation CAR backbone (BBz) with 4-1BB (BB) costimulatory domain and CD3z (z) activation domain were generated. These constructs, in general comprised a CD8 signal peptide (CD8SP) and CD8 hinge and transmembrane domain (CD8TM). They also comprised a Myc epitope tag, which was inserted upstream of the CD8TM region. The antigen binding domain(s) of these constructs comprised one or more AABDs based on single vH domains (SVH), including FHVH, aVH, chVH domains. The antigen binding domains of other construct comprised AABDs based on camelid derived vHH domains. An exemplary construct with a single AABD based on FHVH is represented by SEQ ID NO: 21907. An exemplary construct with a single AABD based on vHH is represented by SEQ ID NO:21908. An exemplary biparatopic construct with two tandem FHVH targeting two epitopes of BCMA is represented by SEQ ID NO: 21904. An exemplary construct with two tandem FHVH targeting the same epitopes of BCMA is represented by SEQ ID NO: 21903. An exemplaryi construct targeting two different antigens (BCMA and CD22) is represented by SEQ ID NO: 21910. An exemplary construct comprising a single human vH domain on chVH backbone is represented by SEQ ID NO: 21918. An exemplary bispecific construct comprising a vHH domain and a FVHV domain is represented by SEQ ID NO: 21912.

[0792] An exemplary construct comprising a BCMA-FHVH-93 attached to the N-terminus of a CD19-targeted scFv (MOR0028-scFv) via a G4s linker is CD8SP-BCMA-FHVH-93-G4S-CD19-MOR0028-scFv-hCD8TM-BBZ-T2A-PAC (SEQ ID NO: 21946). Similarly, the construct CD8SP-BCMA-FHVH-93-G4S-Her2-huMab-4D5-H91A-D98A-F100A-Y102V-hCD8TM-BBZ-T2A-PAC (SEQ ID NO: 21947) comprises BCMA-FHVH-93 attached to the N-terminus of a Her2 targeted scFv via a G4s linker.

[0793] The constructs were tested in JNG assay. As shown in Table 41, almost all constructs induced GFP expression when co-cultured with cell lines expressing their target antigen(s) but did not show GFP induction spontaneously or upon co-culture with cell lines that lacked the expression of their target antigens. These results demonstrate that functional unispecific, bispecific and biparatopic SAR constructs can be constructed with one or more AABD that are joined via optional short G4S linkers. The results further demonstrate lack of tonic signaling resulting in self-activation or compromised signaling when two or more AABD are joined in frame to make SAR constructs. Some of the CD38 targeted constructs did show GFP induction upon expression in JNG cells (i.e., self activation) without exposure to target cell lines. However, this was probably due to expression of CD38 antigen in JNG cells. The results further demonstrate that AABD belonging to different class or backbones (e.g., vHH, FHVH, chVH, aVH etc.) can be combined in a single SAR construct without compromising their antigen binding capabilities due to non-specific aggregation and/or steric hinderance between the different domains. Furthermore, the bispecific constructs comprising two AABD belonging to same class or different classes showed no significant decline in their ability to induce GFP in response to either of the single antigen as compared to unispecific constructs. Thus, the bispcific construct CD8SP-CD22-FHVH-24-PSMA71v2-chVH-Myc-CD8TM-BBZ-T2A-PAC (SEQ ID NO: 21917) was slightly more effective in inducing GFP (+5.5) when exposed to PSMA-expressing LNCaP cells as compared to the unispecific SAR construct (+4.5) represented by CD8SP-PSMA71-chVH-Myc-CD8TM-BBZ-T2A-PAC (SEQ ID NO: 21939). The SAR with SEQ ID NO: 21917 was, however, able to effectively induce GFP upon co-culure with RAJI cells that lack PSMA but express CD22.

[0794] Furthermore, effective GFP induction against both antigen targets were seen in the SAR constructs (SEQ ID NO: 21946-21947) in which an AABD is attached to the N-terminus of an scFv. For example, the construct with SEQ ID NO: 21946 showed effective GFP induction upon exposure to both RAJI (CD19⁺BCMA⁺) and RAJI-CD19-KO (CD19⁻ BCMA⁺) cells as it was able to respond to the latter cells via BCMA-FHVH-93 domain. These results demonstrated that SAR constructs comprising an scFv and an AABD (e.g., FHVH, vHH, etc.) can be generated which show good expression, antigen binding and signaling abilities. An advantage of such SAR constructs is that a large number of monoclonal antibodies against different cancer antigens are available that can be used to generate scFv for incorporation into SARs. The use of two scFv to make bispecific or biparatopic SARs, however, results in poor expression and compromised signaling due to non-specific aggregation and tonic signaling induced by aggregations of the vL/vH fragments of the two scFv. This disclosure provides a solution to this problem by using one scFv in combination with one or more AABD to generate bispecific, biparatopic and multispecific single chain SAR constructs. Thus, these results demonstrate that functional single chain SARs with the backbones of a conventional (e.g., 2^{nd} or 3^{rd} generation) single chain CAR can be generated by joining in frame an AABD to the N-terminus or near the N-terminus of an scFv. The order of the vL and vH fragments in an scFv in such constructs can be vL-vH or vH-vL.

[0795] Additional exemplary SAR constructs comprising one or more AABD targeting different antigens that are joined in frame to the polynucleotide encoding the N-terminus of a CD19 targeting hu-mROO5-1 scFv via an optional linker are provided in SEQ ID NOs: 4087, 4118-4119, 4214 (NKG2D), 4245-4246, 4341 (RZip), 4595 (E4), 4753-4754 (CD16-V158), 4976 (CD19-vHH-048), 5070-5071 (BCMA-FHVH-33 x CD19-vHH-048), 5265 (CD20-vHH-2HCD25), 5472 (CD123-vHH-2), 5720 (Her2-vHH-2D3), 5899 (CD22-FHVH-158 x Her3-Affi) and 6009 (IL13Ra2-huvHH-USC1-C1), respectively. The description of the AABD in the above constructs is provided in paranthesis after their respective SEQ ID NOs. These SAR constructs are expressed in JNG cells and are shown to induce GFP upon co-culture with their target antigen(s) expressing cell lines. The experiment is conducted in the absence and presence of SAR adaptors for constructs encoding an adaptor binding domain as their AABD (e.g., SEQ ID NO: 4214, 4341, 4595, 4753-4754 etc.). Additonal SAR constructs comprising different AABD fused to scFv can be constructed by substituting the AABD of the above constructs and tested using the assays described herein.

[0796] The above SAR constructs are also expressed in JNG cells in which the expression of constant chains of TCRα, TCRβ or both has been eliminated by CRISPR/Cas9 mediated gene knock-out. It is observed that the SAR constructs are expressed on the surface of TCRα-/-, TCRβ-/- and TCRα-/-β-/- cells at similar levels as the wild-type JNG cells and have similar signaling ability when exposed to their target antigen expressing cells. Essentially similar results are obtained when the SAR constructs are inserted at the TRAC or TRBC genomic loci so that it is expressed under the promoter and regulatory elements of TCRα or TCRβ genes. The insertion of SAR constructs at the TRAC and TRBC loci, which results in simultaneous disruption of these genes, is achieved using gene targeting as described in described in Knipping F et al, Molecular Therapy: Methods & Clinical Development, Vol 4, 2017 and Eyquem J et al Nature, 543(7643):113-117, 2017, respectively. Similarly, the endogenous TCRα, TCRβ, TCRγ or TCRδ genes are disrupted in αβ T cells or γδ T cells followed by the expression of the SARs with the conventional 2^{nd} generation CAR backbones. It is observed that the SARs on the conventional 2^{nd} generation backbone are still expressed and functional in the cells with elimination of TCRα, β, γ and/or δ chains.

[0797] Table 41 demonstrate effective signaling via a number of unispecific and bispecific SAR construct targeting novel antigens. Exemplary unispecific constructs targeting CEA, CSPG4 and PSMA are represented by SEQ ID NO: 21927, 21945 and 21939, respectively. These SAR constructs can be used for the treatment of cancers expressing these antigens. Similarlly, bispecific SAR constructs targeting CD20 and CD22, BCMA and CD20, BCMA and CD22 etc can be used to overcome disease relapse due to loss of single antigen (antigen escape) on tumor cells.

[0798] The bispecific constructs targeting a solid tumor antigen and an antigen expressed on blood cells (e.g., PSMA with CD20, PSMA and CD22, or PSMA and BCMA) have the advantage of providing adequate proliferative signal to the SAR-T cells upon administration to the patient due to high level expression of hematopoietic antigens on blood cells. This can potentially overcome the problem of lack of expansion of solid tumor targeted unispecific SAR constructs.

TABLE 41

UNISPECIFIC, BISPECIFIC AND BIPARATOPIC SINGLE CHAIN SARs on 2nd GENERATION CAR BACKBONE

| TARG ET ANTIG EN | SE Q ID NO (D NA ) | SE Q ID NO (PR T) | Constructs Name | NFAT-GFP ASSAY (JNG) Assay |
|---|---|---|---|---|
| BCMA, CD19 | 219 01 | 227 16 | CD8SP-BCMA-FHVH-33-huCD19USC3-W103R-Myc-CD8TM-BBZ-T2A-PAC | Raji (3+), Raji-CD19-KO (+/-), Nalm6 (+), L363 (3+), U266 (3+). RS411 (-) |
| BCMA, CD19 | 219 02 | 227 17 | CD8SP-BCMA-FHVH-74-huCD19USC3-W103R-Myc-CD8TM-BBZ-T2A-PAC | Raji (+), Raji-CD19-KO (+), Nalm6 (-), L363 (4+), U266 (4+). RS411 (-) |
| BCMA | 219 03 | 227 18 | CD8SP-BCMA-FHVH-33-BCMA-FHVH-33-Myc-CD8TM-BBZ-T2A-PAC | L363 (4+), U266 (3.5+) |
| BCMA | 219 04 | 227 19 | CD8SP-BCMA-FHVH-33-BCMA-FHVH-74-Myc-CD8TM-BBZ-T2A-PAC | L363 (4.5+), U266 (4+) |
| BCMA | 219 05 | 227 20 | CD8SP-BCMA-FHVH-74-BCMA-FHVH-33-Myc-CD8TM-BBZ-T2A-PAC | L363 (4.5+), U266 (3.5+) |
| BCMA | 219 06 | 227 21 | CD8SP-BCMA-FHVH-74-BCMA-FHVH-74-Myc-CD8TM-BBZ-T2A-PAC | Raji (1.5+), Raji-CD19-KO (1.5+), Nalm6 (+/-), L363 (5+), U266 (4.5+). RS411 (-) |
| BCMA | 219 07 | 227 22 | CD8SP-BCMA-FHVH-74-CD8TM-BBZ | L363 (+/-), U266 (+/-) |
| CD20 | 219 08 | 227 23 | CD8SP-CD20vHH-CD8TM-BBZ | Raji (+/-), Nalm6 (+/-) |
| CD22, BCMA | 219 09 | 227 24 | CD8SP-CD22-FHVH-24-BCMA-FHVH-33-CD8TM-BBZ | Raji (2+), Nalm6 (+), L363 (3+), U266 (1.5+). Daudi (1.5) |
| CD22, BCMA | 219 10 | 227 25 | CD8SP-CD22-FHVH-24-BCMA-FHVH-74-CD8TM-BBZ | Raji (+/-), Nalm6 (+/-), Daudi (+/-), L363 (+/-), U266 (+/-) |
| CD22, BCMA | 219 11 | 227 26 | CD8SP-CD22-FHVH-24-BCMA-FHVH-93-CD8TM-BBZ | Raji (+/-), Nalm6 (+/-), Daudi (+/-), L363 (+/-), U266 (+/-) |
| CD20, CD22 | 219 12 | 227 27 | CD8SP-CD20vHH-G4S-CD22FHVH-CD8TM-BBZ | Raji (1.5+), Nalm6 (+/-), Daudi (+) |
| CEA | 219 13 | 227 28 | CD8SP-CEA300-3001-aVH-CD8TM-BBZ | HL60 (-), LoVo (+/-) |
| CD22, CEA | 219 14 | 227 29 | CD8SP-CD22-FHVH-24-CEA3001-aVH-Myc-CD8TM-BBZ-T2A-PAC | Raji (2+), LoVo (4+) |
| CD22 | 219 15 | 227 30 | CD8SP-CD22-FHVH-24-CD22-FHVH-158-Myc-CD8TM-BBZ-T2A-PAC | Raji (2+) |
| CD22, PSMA | 219 16 | 227 31 | CD8SP-CD22-FHVH-24-PSMA28-chVH-Myc-CD8TM-BBZ-T2A-PAC | Raji (2+), LNCaP (5+) |
| CD22, PSMA | 219 17 | 227 32 | CD8SP-CD22-FHVH-24-PSMA71v2-chVH-Myc-CD8TM-BBZ-T2A-PAC | Raji (2.5+), LNCaP (5.5+) |
| CD22, PSMA | 219 18 | 227 33 | CD8SP-CD22-FHVH-24-PSMA28v2-chVH-Myc-CD8TM-BBZ-T2A-PAC | Raji (2.5+), LNCaP (6+) |
| CEA, BCMA | 219 19 | 227 34 | CD8SP-CEA300-aVH-BCMA-FHVH-93-Myc-CD8TM-BBZ-T2A-PAC | LoVo (4+), L363 (5+) |
| CD20, BCMA | 219 20 | 227 35 | CD8SP-CD20vHH-C07-BCMA-FHVH-93-Myc-CD8TM-BBZ-T2A-PAC | Raji (2.5+), L363 (5+) |
| PSMA, BCMA | 219 21 | 227 36 | CD8SP-PSMA71-chVH-BCMA-FHVH-93-Myc-CD8TM-BBZ-T2A-PAC | LNCaP (4+), L363 (5+) |
| PSMA, BCMA | 219 22 | 227 37 | IgHSP-PSMA28v2-chVH-BCMA-FHVH-93-Myc-CD8TM-BBZ-T2A-PAC | LNCaP (4+), L363 (4+) |
| BCMA | 219 23 | 227 38 | CD8SP-BCMA-FHVH-74-Myc-CD8TM-BBZ-T2A-PAC | L363 (5+) |
| CD20 | 219 24 | 227 39 | CD8SP-CD20vHH-C07-Myc-CD8TM-BBZ-T2A-PAC | Raji (3+) |
| PSMA | 219 25 | 227 40 | CD8SP-PSMA71-chVH-Myc-CD8TM-BBZ-T2A-PAC | LNCaP (4.5+) |
| CD22, BCMA | 219 26 | 227 41 | CD8SP-CD22-FHVH-24-BCMA-FHVH-33-hCD8TM-BBZ-T2A-PAC | Raji (2+), L363 (3.5+) |
| CEA | 219 27 | 227 42 | CD8SP-CEA300-aVH-Myc-CD8TM-BBZ-T2A-PAC | LoVo (5+) |
| BCMA, CD38 | 219 28 | 227 43 | CD8SP-BCMA-FHVH-33-CD38-309407-FHVH-Myc-CD8TM-BBZ-T2A-PAC | L363 (+/-) |
| BCMA, CD38 | 219 29 | 227 44 | CD8SP-BCMA-FHVH-74-CD38-309021-FHVH-Myc-CD8TM-BBZ-T2A-PAC | L363 (-) |
| BCMA, CD38 | 219 30 | 227 45 | CD8SP-BCMA-FHVH-33-CD38-986-FHVH-Myc-CD8TM-BBZ-T2A-PAC | L363 (-) |
| BCMA, CD38 | 219 31 | 227 46 | CD8SP-BCMA-FHVH-74-CD38-986-FHVH-Myc-CD8TM-BBZ-T2A-PAC | Self activation |
| BCMA | 219 32 | 227 47 | CD8SP-BCMA-FHVH-33-BCMA-FHVH-93-Myc-CD8TM-BBZ-T2A-PAC | L363 (5+), U266 (4+), Nalm6 (+/-), RS411 (-) |
| CD22, BCMA | 219 33 | 227 48 | CD8SP-CD22-FHVH-24-BCMA-FHVH-74-Myc-CD8TM-BBZ-T2A-PAC | L363 (4+), U266 (4+), Nalm6 (+), RS411 (+) |
| CD22, BCMA | 219 34 | 227 49 | CD8SP-CD22-FHVH-24-BCMA-FHVH-93-Myc-CD8TM-BBZ-T2A-PAC | L363 (4+), Nalm6 (+), RS411 (+/-) |
| CD22, BCMA | 219 35 | 227 50 | CD8SP-CD22-FHVH-24-BCMA-FHVH-33-Myc-CD8TM-BBZ-T2A-PAC | L363 (5+), Nalm6 (+), RS411 (+) |
| BCMA | 219 36 | 227 51 | CD8SP-BCMA-FHVH-74-BCMA-FHVH-93-Myc-CD8TM-BBZ-T2A-PAC | L363 (5+), Nalm6 (-), RS411 (-) |
| BCMA | 219 37 | 227 52 | CD8SP-BCMA-FHVH-74-Myc-CD8TM-BBZ-T2A-PAC | L363 (5+) |
| CD20 | 219 38 | 227 53 | CD8SP-CD20vHH-C07-Myc-CD8TM-BBZ-T2A-PAC | Raji (3+) |
| PSMA | 219 39 | 227 54 | CD8SP-PSMA71-chVH-Myc-CD8TM-BBZ-T2A-PAC | LNCaP (4.5+) |
| BCMA, CD38 | 219 40 | 227 55 | CD8SP-BCMA-FHVH-33-CD38-309021-FHVH-Myc-CD8TM-BBZ-TA2-PAC | Self activation |
| CD22 | 219 41 | 227 56 | CD8SP-CD22-FHVH-24-G4S-CD22-FHVH-158-Myc-CD8TM-BBZ-T2A-PAC | Raji (1.5+), Nalm6 (+), RS411 (-) |
| BCMA | 219 42 | 227 57 | CD8SP-BCMA-FHVH-33-Myc-CD8TM-BBZ-T2A-PAC | L363 (5.5+), RS411 (-) |
| BCMA, CD19 | 219 43 | 227 58 | CD8SP-BCMA-FHVH-74-CD19-MOR0chVH-Myc-CD8TM-BBZ-T2A-PAC | Raji (1.5+), Nalm6 (-), L363 (4+) |
| CSPG4 | 219 44 | 227 59 | CD8SP-MCSP-aVH-58-Myc-CD8TM-BBZ-TA2-PAC | SK-MEL-28 (+) |
| CSPG4 | 219 45 | 227 60 | CD8SP-MCSP-aVH-56-Myc-CD8TM-BBZ-TA2-PAC | SK-MEL-28 (1.5+) |
| BCMA, CD19 | 219 46 | 227 61 | CD8SP-BCMA-FHVH-93-G4S-CD19-MOR0028-scFv-hCD8TM-BBZ-T2A-PAC | Raji (4+), Raji-CD19-KO (3+), Nalm6 (3.5+), RS411 (5+) |
| BCMA, HER2 | 219 47 | 227 62 | CD8SP-BCMA-FHVH-93-G4S-Her2-huMab-4D5-H91A-D98A-F 100A-Y102V-hCD8TM-BBZ-T2A-PAC | Raji (3+), Nalm6 (+), L363 (4+), RS411 (-), SKOV-3 (7+), MCF-7 (2.5+), PC-3 (-) |

### Unispecific, Bispecific and Biparatopic Single Chain SARs on TFP Backbone

[0799] Single chain receptors comprising an scFv fused to CD3ε, CD3γ, CD3ε chains have been described and are known as TFPε, TFPγ and TFPε respectively. To generate SAR constructs comprising AABDs that are fused to the extracellular, transmembrane and cytoplasmic domains (ECDTMCP) of CD3ε, CD3γ, CD3ε, a number of bispecific and biparatopic constructs were constructed. The names, component AABD modules and SEQ ID NOs of these constructs are provided in Table 42. The AABD components of these constructs belong to different classes, such as FHVH (e.g., SEQ ID NO: 21949-21955), avH (SEQ ID NO: 21951) and vHH (SEQ ID NO: 21963) frameworks. Representative bispecific constructs are represented by SEQ ID NO: 21950-21953 and represented biparatopic constructs are represented by SEQ ID NO: 21949 and 21952. The constructs were cloned in lentiviral vectors and stably expressed in JNG cells as described above. The JNG cells expressing the SARs were tested in NFAT-GFP assay upon co-culture with the target antigen expressing cell lines. Table 42 shows robust induction of GFP by nearly all SAR constructs. Further, the % GFP induction by the bispecific constructs against a specific antigen (e.g., CD20) is noted to be similar to the % GFP observed using a unispecific construct targeting that antigen and comprising the same antigen binding domain, thereby demonstrating lack of steric hinderance by the presence of more than one antigen binding domains. These results demonstrate that functional single chain SAR constructs with the backbones of TFPε, TFPδ and TFPγ can be generated using AABDs with the framework of vHH and single vH domains, including fully human single vH domains. The results further demonstrate that functional single chain bispecific and biparatopic SAR with the backbones TFPε, TFPδ and TFPy can be generated using AABDs comprising single vH domains, including fully human vH domains. The results further demonstrate that functional bispecific and biparatopic SAR with the backbones TFPε, TFPδ and TFPγ can be generated using a combination of AABD belonging to different classes (e.g., FHVH and vHH etc.).

[0800] Additional exemplary SAR constructs with the backbones of TFPs and comprising one or more AABD are represented by SEQ ID NO: 6495-6497 (CD22-FHVH-24 x PSMA-chVH-71v2), 6641-6643 (CD22-FHVH-24 x CD19-FHVH-354), 6714-6716 (CD22-FHVH-24 x BCMA-FHVH-74), 6933-6935 (CEA-aVH-300 x BCMA-FHVH-93). Exemplary bispecific, biparatopic and multispecific SAR constructs with the backbones of TFPs and comprising one or more AABDs that are joined in frame to the N-terminus of the encoded CD19 targeted humanized hu-mROO5-1 scFv are represented by SEQ ID NO: 5004-5006 (CD19-vHH-048), 5252-5254 (CD38-FHVH-309021), 5346-5348 (BCMA-FHVH-33 x CD38-FHVH-309021), 5594-5596 (BCMA-FHVH-33 x CD123-vHH-2), 4237-4239 (NKG2D x NKG2D), 4364-4367 (RZip), 4491-4493 (E4), and 4745-4747 (CD16A-V158), respectively. The names of the AABD(s) are shown in parenethesis after their SEQ ID NOs. These SAR constructs can be expressed in JNG cells and shown to induce GFP upon co-culture with their target antigen(s) expressing cell lines. The experiment is conducted in the absence and presence of SAR adaptors for constructs encoding an adaptor binding domain as one of their AABDs (e.g., SEQ ID NO: 4364, 4341, 4491, 4745 etc.). Additonal SAR constructs comprising different AABD fused to scFv can be constructed by substituting the AABD of the above constructs and tested using the assays described herein. These results can be used to support the argument that functional single chain SARs with the backbones of TFPε, γ and δ can be generated by joining in frame an AABD to the N-terminus or near the N-terminus of an scFv. The order of the vL and vH fragments in an scFv in such constructs can be vL-vH or vH-vL.

[0801] The above SAR constructs on TFP backbones are also expressed in JNG cells in which the expression of TCRα, TCRβ or both has been eliminated by CRISPR/Cas9 mediated gene knock-out. In contrast to the results with SARs on the conventional 2^{nd} generation CAR backbone, it is observed that the SAR constructs on the TFP backbones are not effectively expressed on the surface of TCRα-/-, TCRβ-/- and TCRα-/-β-/- cells at similar levels as observed in the wild-type JNG cells and have poor signaling ability when exposed to their target antigen expressing cells. It is observed that co-expression of the constant chain of TCRα can rescue the expression of the SARs on the TFP backbone in cells in which the expression of endogenous TCRα chain has been impaired or eliminated. An exemplary construct to co-express an exogenous TCRα constant chain is presented in SEQ ID NO: 23331. Similary, co-expression of TCRβ constant chain is observed to rescue the expression of SARs on the TFP backbone in cells in which the endogenous TCRβ chain has been eliminated or impaired. An exemplary construct to co-express an exogenous TCRβ constant chain is presented in SEQ ID NO: 23332. Finally, coexpression of both TCRα and TCRβ constant chains is observed to be sufficient to rescue the expression of SARs on TFP backbone in the αβ T cells in which both TCRα and TCRβ have been knocked out. Alternatively, it is observed that co-expression of the constant chains of both TCRγ and TCRδ can also rescue the expresson of SARs on TFP backbone in αβ T cells in which the expression of endogeneous TCRα and/or TCRβ constant chains has been eliminated. Exemplary constructs to express TCRγ and TCRδ chains are provided in SEQ ID NO: 23333 and 23334, respectively. Similarly, the coexpression of constant chains TCRα and TCRβ can also rescue the expresson of SARs on TFP backbone in γδ T cells in which the expression of endogeneous TCRγ and/or TCRδ constant chains has been eliminated.

[0802] Essentially similar results are obtained when the SAR constructs are inserted at the TRAC or TRBC genomic loci so that they are expressed under the promoter and regulatory elements of endogenous TCRα or TCRβ genes. The insertion of SAR constructs at the TRAC and TRBC loci, which results in simultaneous disruption of these genes, is achieved using gene targeting as described in described in Knipping F et al, Molecular Therapy: Methods & Clinical Development, Vol 4, 2017 and Eyquem J et al Nature, 543(7643):113-117, 2017, respectively. An exemplary targeting construct is represented by SEQ ID NO: 23329. SARs on the TFP backbone show impaired expression on T cells surface and reduced or absent activity (e.g., T cell activation, proliferation, cytokine production and cytotoxicity etc.) in T cell when their expression is directed to the TRAC locus as compared to when they are expressed using lentiviral vectors. It is next tested if expression of TCRα constant chain (TRAC chain) can be used to restore the expression and signaling activity of SARs on TFP backbone in T cells in which the endogenous TRAC genomic locus has been disrupted by the SARS expression cassette. For this purpose, a targeting construct is constructed that coexpress a TFP with an accessory module encoding a TCRα constant chain with an amino terminal signal peptide (IgSP). The accessory module is separated from the SARs encoding sequence by a Furine-SGSG-P2A linker. The nucleotide sequence of an exemplary targeting construct coexpressing a TCRα constant chain with an exemplary SAR constructs on TFP backbone targeting BCMA and CD22 is shown in SEQ ID NOs: 23330. The nucleotide sequence of the TCRα constant chain in this construct is codon optimized and differs from the endogenous TCRα constant chain in its nucleotide sequence. In an alternate embodiment, the TRAC chain is codon optimized and carries amino acid substitutions (e.g., SEQ ID NO: 1044, 1047) that are known to enhance the expression of human TCRα constant chain or its base pairing with exogenously expressed TCRβ chian. The exogenous TRAC can be expressed in T cells either by itself (SEQ ID NO: 23331) or it can be co-expressed with the TFP expression cassettes using a single vector.

[0803] The cells expressing the SAR constructs are exposed to RAJI and L363 target cells and tested in functional assays as described above. T cells in which the targeting construct includes a SAR on TFP backbone co-expressing a TCRα constant chain (SEQ ID NO: 23330) show better expression of the SAR on cell surface as compared to T cells in which the SAR construct on the TFP backbone alone (SEQ ID NO: 23329) (i.e., without coexpression of the exogenous TRAC chain) is directed to the TRAC locus. In addition, T cells targeted with the targeting construct with SEQ ID NO: 23330 show greater proliferation, activation, cytokine (e.g., IL2 and TNFα) production, cytotoxicity, in vivo expansion, in vivo anti-tumor activity against the target cells as compared to T cells targeted with the construct with SEQ ID NO: 23329. It is also observed that co-expression of the constant chains of both TCRγ and TCRδ can also rescue the expresson of SARs on TFP backbone in αβ T cells in which the expression of endogeneous TCRα and/or TCRβ constant chains has been eliminated by insertion of the SAR expresson cassette at the endogenous TRAC or/and TRBC loci. Exemplary constructs to express TCRγ and TCRδ chains are provided in SEQ ID NO: 23333 and 23334, respectively.

TABLE 42

UNISPECIFIC, BISPECIFIC AND BIPARATOPIC SINGLE CHAIN SARs ON TFP BACKBONE

| TARGE T ANTIGE N | SEQ ID NO (DN A) | SEQ ID NO (PR T) | Constructs Name | NFAT-GFP ASSAY |
|---|---|---|---|---|
| CD22 | 2194 9 | 2276 4 | CD8SP-CD22-FHVH-24-G4S-CD22-FHVH-15 8-G4S-CD3dECDTMCP-2A-Pac | Raji (1.5+), Nalm6 (+/-) |
| CD22, BCMA | 2195 0 | 2276 5 | CD8SP-CD22-FHVH-24-BCMA-FHVH-33-G4S-CD3dECDTMCP-2A-Pac | Raji (1.5+), L363 (1.5+) |
| CEA | 2195 1 | 2276 6 | CD8SP-CEA300-aVH-G4S-CD3dECDTMCP-2A-Pac | LoVo (2+) |
| CD22 | 2195 2 | 2276 7 | SP-CD22-FHVH-24-G4S-CD22-FHVH-158-G4S-CD3eECDTMCP-2A-Pac | Raji (+), Nalm6 (+/-) |
| CD22, BCMA | 2195 3 | 2276 8 | SP-CD22-FHVH-24-BCMA-FHVH-33-G4S-CD3eECDTMCP-2A-Pac | Raji (+), L363 (+/-) |
| CD22 | 2195 4 | 2276 9 | SP-CD22-FHVH-24-CD22-FHVH-158-G4S-CD3dECDTMCP-2A-Pac | Raji (+), Nalm6 (+/-) |
| CD22, BCMA | 2195 5 | 2277 0 | SP-CD22-FHVH-24-BCMA-FHVH-74-G4S-CD3dECDTMCP-2A-Pac | Raji (1.5+), L363 (2+) |
| CEA | 2195 6 | 2277 1 | SP-CEA300-aVH-G4S-CD3eECDTMCP-2A-Pac | LoVo (2.5+) |
| CD22 | 2195 7 | 2277 2 | SP-CD22-FHVH-24-CD22-FHVH-158-G4S-CD3eECDTMCP-2A-Pac | Raji (+), Nalm6 (+/-) |
| CD22, BCMA | 2195 8 | 2277 3 | SP-CD22-FHVH-24-BCMA-FHVH-74-G4S-CD3eECDTMCP-2A-Pac | Raji (1.5+), L363 (+) |
| BCMA, CD38 | 2195 9 | 2277 4 | SP-BCMA-FHVH-74-CD38-309021-FHVH-G4S-CD3eECDTMCP-2A-Pac | L363 (2.5+) |
| BCMA, CD38 | 2196 0 | 2277 5 | SP-BCMA-FHVH-33-CD38-986-FHVH-G4S-CD3eECDTMCP-2A-Pac | L363 (2.5+) |
| BCMA, CD38 | 2196 1 | 2277 6 | SP-BCMA-FHVH-74-CD38-986-FHVH-G4S-CD3eECDTMCP-2A-Pac | L363 (2.5+) |
| BCMA, CD38 | 2196 2 | 2277 7 | SP-BCMA-FHVH-33-CD38-309021-FHVH-G4S-CD3eECDTMCP-2A-Pac | L363 (2.5+) |
| CD20, CD22 | 2196 3 | 2277 8 | CD20-vHH-C07-G4S-CD22-FHVH-158-G4S-CD3eECDTMCP-2A-Pac | Raji (2.5+), Nalm6 (+/-) |

### Generation of Unispecific, Bispecific and Biparatopic SARs on One-and-a-Half and Double Chain SIR Backbones

[0804] Synthetic Immune Recepor (SIR) is a next generaton CAR platform described in WO2018102795 that provides physiological T cell signaling by engaging the endogeneous TCR signaling complex. In one configuration, a double chain SIR typicaly comprises two polypeptides each of which comprises an antigen binding domain (e.g., a vL or a vH etc.) attached to a TCR constant chain (e.g., Cα and Cβ or Cγ and Cδ). The vL and vH domains of a double chain SIR join to form an Fv that can bind to the target antigen. A one and a half chain SIR comprises an antigen binding domain (e.g., an scFV) attached in frame to one TCR constant chain which is coexpressed with the complementary second TCR constant chain that lacks an antigen binding domain. Several bispecific SIR constructs were generated in which nucleotides encoding two scFv were attached to the two TCR constant chains. For example, in the SAR construct with SEQ ID NO (DNA): 21974 and SEQ ID NO (PRT): 22789, the encoded scFv targeting CD19 derived from a humanized CD19 directed monoclonal antibody (hCD19-Bu12) is fused in frame to the mutated TCRβ chain (hTCRβ-KACIAH) and the encoded scFv targeting CD123 (CD123-CSL362) is attached to the complementary mutated human TCRα chain (hTCRα-CSDVP). The resulting construct was expressed in JNG cells but was found to be unresponsive against target cells expressing CD19 (e.g., Raji) and CD123 (Bv173) (Table 43). Similarly, the bispecific SIR construct represented by SEQ ID NO: 21975 encodes an MPL targeting scFv (MPL-175) attached in frame via an intervening linker to hCD19-Bu12 scFv which in turn is attached to the mutated human TCRα chain (hTCRα-CSDVP) via a MYC tag linker. The encoded TCRβ chain (hTCRβ-KACIAH) in this construct lacks an antigen binding domain but carries a V5 tag. This construct was also found to show only weak activity against CD19 expressing Raji and Nalm6 cells as measured by JNG assay. JNG cells expressing this construct also showed marginal GFP induction when co-cultured with MPL expressing HEL 92.1.7 cells (Table 43). In the constructs represented by SEQ ID NO: 21981 and 21982, the encoded two vL fragments are joined in tandem via an E-coil linker and are then attached in frame to one TCR constant chain whereas two vH fragments are joined in tandem via a K-coil linker and then attached to the complementary TCR chain. The construct with SEQ ID NO: 21981 showed no GFP induction activity in JNG assay while the construct with SEQ ID NO: 21982 showed mild to moderate activity. Several additional bispecific and biparatopic constructs on double chain or one and a half chain SIR backbones were generated encoding two or more vL, vH or scFv fragments joined via a variety of linkers and in different configurations and tested in the JNG assay. These constructs, in general, showed weak and/or inconsistent GFP induction when expressed in JNG cells as compared the corresponding double chain (DC) or one-and-half-chain (OAH) unispecific constructs encoding a single vL, vH or scFv per construct. Results with several exemplary constructs are provided in Table 43. These results demonstrate that presence of more than one vL, vH or scFv in a DC or OAH chain SIR backbone results in poor and/or inconsistent expression and/or signaling activity.

TABLE 43: UNISPECIFIC, BISPECIFIC AND BIPARATOPIC SARs ON ONE-AND-A-HALF AND DOUBLE CHAIN SIR BACKBONE

| | | | | |
|---|---|---|---|---|
| CD19, CD123 | 21974 | 22789 | hCD19-Bu12(vL-vH)-V5-[hTCRβ-KACIAH]-F-P2A-CD123-CSL362-(vL-vH)-MYC-[hTCRα-CSDVP]-F-F2A-PAC | Raji (-), Bv173 (-) |
| MPL, CD19 | 21975 | 22790 | SP-V5-[hTCRβ-KACIAH]-F-P2A-MPL-175-scFv-EAAAK-hCD19-Bu12-scFv-MYC-[hTCRα-CSDVP]-F-F2A-PAC | Raji (+), Nalm6 (+), HEL 92.1.7 (+/-) |
| CS1, CD19 | 21976 | 22791 | SP-V5-[hTCRβ-KACIAH]-F-P2A-HuLuc64-EAAAK-hCD19-Bu12-scFv-MYC-[hTCRα-CSDVP]-F-F2A-PAC | Raji (2+), Nalm6 (2+), L363 (+), U266 (1.5+) |
| CD19, CD20 | 21977 | 22792 | SP-V5-[hTCRβ-KACIAH]-F-P2A-hCD19-Bu12-EAAAK-CD20-2F2-scFv-MYC-[hTCRα-CSDVP]-F-F2A-PAC | Raji (+), Nalm6 (+) |
| CD19, CD20 | 21978 | 22793 | SP-V5-[hTCRβ-KACIAH]-F-P2A-huFMC63-11-EAAAK-CD20-2F2-scFv-MYC-[hTCRα-CSDVP]-F-F2A-PAC | Raji (2+), Nalm6 (2+) |
| CS1, CD19 | 21979 | 22794 | SP-V5-[hTCRβ-KACIAH]-F-P2A-HuLuc64-EAAAK-FMC64-scFv-MYC-[hTCRα-CSDVP]-F-F2A-PAC | Raji (+), Nalm6 (+), L363 (+), U266 (1.5+) |
| CD19, CS1 | 21980 | 22795 | hCD19-Bu12-V5-[hTCRβ-KACIAH]-F-P2A-huLuc64-scFV-MYC-[hTCRα-CSDVP]-F-F2A-PAC | Raji (+), Nalm6 (+/-), L363 (+/-), U266 (+) |
| CD19, CD19 | 21981 | 22796 | SP-FMC63-vL-Ecoil-MOR0028-vL-[hTCRβ-KACIAH]-F-P2A-IgH-SP-FMC63-vH-Kcoil-MOR0028-vH-[hTCRα-CSDVP]-F-F2A-PAC | Raji (-), Nalm6 (-) |
| CD19, CD22 | 21982 | 22797 | SP-FMC63-vL-Ecoil-CD22-5-vL-[hTCRα-CSDVP]-F-F2A-SP-FMC63-vH-Kcoil-CD22-5-vH-[hTCRβ-KACIAH]-F-P2A-PAC | Raji (2+), Nalm6 (+), Bv173 (+) |

### Generaton and Testing of Unispecific, Bispecific and Biparatopic Double Chain Constructs Comprising AABDs

[0805] Next, approximately 100 double chain constructs encoding AABD were generated and expressed in JNG cells. These constructs encoded a variety of antigen binding domains. The SEQ ID (DNA) and SEQ ID (PRT) are provided in Table 44. In the constructs with SEQ ID NO: 21985-21997, 22007-22008, 22011-22016, the encoded one FVHV is attached to TCRβ constant chain (hTCRβ-S57C) and the encoded second FHVH is attached to a the complementary TCRα constant chain [hTCRα-T48C-opt]. For example, in the exemplary construct with SEQ ID NO: 21985, the encoded CD22-FHVH-24 is attached to hTCRβ-S57C and BCMA-FHVH-93 is attached to hTCRα-T48C-opt. All these constructs failed to show significant activity in the JNG assay when expressed in JNG cells and co-cultured with their target antigen expressing cell lines (Table 44). Replacement of FHVH domain with other AABD (e.g., vHH or aVH) did not result in improvement in activity. Several unispecific and bispecific one-and-half chain constructs were also generated and are represented by SEQ ID NO: 21999-22000, 22002-22006 (Table 44). A representative construct of this series is CD8SP-V5-[hTCRβ-KACIAH]-F-P2A-CD8SP-BCMA-FHVH-74-MYC-[hTCRα-CSDVP]-F-F2A-PAC (SEQ ID NO: 22002). In this construct, an encoded BCMA-FHVH-74 is attached via a MYC linker to [hTCRα-CSDVP] chain while a V5 linker is attached to the encoded complementary [hTCRβ-KACIAH] chain. These constructs also showed only weak and inconsistent activtiy when expressed in JNG cells. Another design tested involved attachement of two AABD in tandem to one of the two TCR constant chains and is represented by SEQ ID NO: 22009 and 22010. The constructs with this design also showed only weak and inconsistent activity (Table 44). Next, constructs were generated in which one or both the TCR constant chains were truncated. Additionally, a variety of linker domains between the AABD and the TCR constant chain domains were tested. Exemplary linkers included Gly-Ser linkers (GS), E Coil, PG4SP and Ig Hinge domains (Table 17). Exemplary constructs are represented by SEQ ID NO:22025-22085. These constructs were expressed in JNG cells and tested in JNG assay. The constructs with this design also, in general, showed only weak and/or inconsistent activity as compared to the corresponding single chain constructs on the 2nd generation CAR or TFP backbones (Table 44).

TABLE 44

BISPECIFIC AND BIPARATOPIC DOUBLE CHAIN CONSTRUCTS

| ANTIGEN | SEQ ID NO (DNA) | SEQ ID NO (PRT) | NFAT-GFP ASSAY |
|---|---|---|---|
| CD22, BCMA | 21985 | 22800 | L363 (1.5+), Nalm6 (+/-), RS411 (-) |
| CD22, BCMA | 21986 | 22801 | L363 (+), Nalm6 (+/-), RS411 (-) |
| CD22, BCMA | 21987 | 22802 | L363 (+), Nalm6 (+/-), RS411 (-) |
| BCMA, BCMA | 21988 | 22803 | L363 (+), Nalm6 (-), RS411 (-) |
| BCMA, BCMA | 21989 | 22804 | L363 (+), Nalm6 (-), RS411 (-) |
| BCMA, BCMA | 21990 | 22805 | L363 (+), Nalm6 (-), RS411 (-) |
| BCMA, BCMA | 21991 | 22806 | L363 (1.5+), Nalm6 (-), RS411 (-) |
| CD22, PSMA | 21992 | 22807 | Raji (+/-), Nalm6 (-), LNCaP (2+) |
| CD22, CD22 | 21993 | 22808 | Raji (+/-) |
| BCMA, CD38 | 21994 | 22809 | L363 (+) |
| CD22, CD38 | 21995 | 22810 | Raji (+), L363 (-) |
| BCMA, CD38 | 21996 | 22811 | L363 (+) |
| CD38, BCMA | 21997 | 22812 | Self Activation (SA), L363 (+), RS411 (-) |
| CD38, BCMA | 21998 | 22813 | L363 (+) |
| CD38, CD38 | 21999 | 22814 | L363 (-), RS411 (-) |
| CD38, CD38 | 22000 | 22815 | L363 (-), RS411 (-) |
| CD22, BCMA | 22001 | 22816 | Raji (+/-), L363 (-) |
| BCMA | 22002 | 22817 | L363 (+), U266 (+) |
| CD22, BCMA | 22003 | 22818 | Raji (+), Nalm6 (+/-), Daudi (+/-), L363 (+), |
| CD22, BCMA | 22004 | 22819 | Raji (+), Nalm6 (+/-), Daudi (+/-), L363 (+) |
| CEA | 22005 | 22820 | HL60 (-), LoVo (+/-) |
| CD20 | 22006 | 22821 | Raji (+), Nalm6 (-) |
| CD22, CEA | 22007 | 22822 | Raji (+/-), Nalm6 (-), RS411 (-), LoVo (+/-) |
| CD22, CD38 | 22008 | 22823 | Raji (+/-), Nalm6 (-), L363 (-), RS411 (-) |
| CD38, CD38 | 22009 | 22824 | L363 (+/-) |
| CD38, CD38 | 22010 | 22825 | L363 (-) |
| CD22, CD22 | 22011 | 22826 | Raji (+/-), Nalm6 (-), RS411 (-) |
| CD38, BCMA | 22012 | 22827 | L363 (+), RS411 (+/-) |
| CD22, CD38 | 22013 | 22828 | Raji (-), Nalm6 (-), L363 (-), RS411 (-) |
| BCMA, CD38 | 22014 | 22829 | L363 (+/-), RS411 (-) |
| CD38, BCMA | 22015 | 22830 | L363 (-), RS411 (-) |
| CD38, BCMA | 22016 | 22831 | L363 (+/-), RS411 (-) |
| CD22, PSMA | 22017 | 22832 | Raji (+/-), Nalm6 (-), RS411 (-), LNCaP (-) |
| CEA, PSMA | 22018 | 22833 | LNCaP (+/-), LoVo (+/-) |
| CD22, BCMA | 22019 | 22834 | Raji (+), Nalm6 (+/-), L363 (+), RS411 (-) |
| CD22, CD22 | 22020 | 22835 | Raji (+/-), Nalm6 (+/-), L363 (-) |
| CD22, BCMA | 22021 | 22836 | Raji (+/-), Nalm6 (+/-), L363 (+/-) |
| PSMA, PSMA | 22022 | 22837 | LNCaP (1.5+) |
| CEA | 22023 | 22838 | LoVo (-) |
| CD22, CD22 | 22024 | 22839 | Raji (-), Nalm6 (-), L363 (-) |
| CD22, BCMA | 22025 | 22840 | Raji (+/-), Nalm6 (-), L363 (+) |
| CD22, PSMA | 22026 | 22841 | Raji (-), Nalm6 (-), L363 (-), LNCaP (-) |
| CD22, PSMA | 22027 | 22842 | Raji (-), Nalm6 (-), L363 (-), LNCaP (-) |
| CD22, PSMA | 22028 | 22843 | Raji (-), Nalm6 (-), L363 (-), LNCaP (-) |
| CD22, PSMA | 22029 | 22844 | Raji (+/-), Nalm6 (-), L363 (+), LNCaP (-) |
| CD22, PSMA | 22030 | 22845 | Raji (-), Nalm6 (-), L363 (-), LNCaP (-) |
| CD22, PSMA | 22031 | 22846 | Raji (+/-), Nalm6 (-), L363 (-), LNCaP (-) |
| CD22, PSMA | 22032 | 22847 | Raji (+/-), Nalm6 (-), L363 (-), LNCaP (-) |
| CD22, PSMA | 22033 | 22848 | Raji (+/-), Nalm6 (-), L363 (-), LNCaP (-) |
| CD22, BCMA | 22034 | 22849 | Raji (+/-), Nalm6 (-), L363 (+/-) |
| CD22, CD22 | 22035 | 22850 | Raji (+/-), Nalm6 (+/-), L363 (+/-) |
| CD22 | 22036 | 22851 | Raji (-), Nalm6 (-), Daudi (-) |
| CD22, BCMA | 22037 | 22852 | Raji (-), Nalm6 (-), L363 (-) |
| CD22, BCMA | 22038 | 22853 | Raji (-), Nalm6 (-), L363 (-) |
| CD22, BCMA | 22039 | 22854 | Raji (-), Nalm6 (-), L363 (-) |
| CD22, BCMA | 22040 | 22855 | Raji (-), Nalm6 (-), L363 (-) |
| CD22, BCMA | 22041 | 22856 | Raji (+), Nalm6 (-), L363 (+) |
| CD22, PSMA | 22042 | 22857 | Raji (-), Nalm6 (-), LNCaP (+/-) |
| CD22, PSMA | 22043 | 22858 | Raji (+/-), Nalm6 (-), LNCaP (+) |
| CD22, PSMA | 22044 | 22859 | Raji (-), Nalm6 (-), LNCaP (+/-) |
| CD22, PSMA | 22045 | 22860 | Raji (-), Nalm6 (-), LNCaP (+/-) |
| CD22, BCMA | 22046 | 22861 | Raji (2+), Nalm6 (+/-), L363 (+) |
| CD22, BCMA | 22047 | 22862 | Raji (1.5+), Nalm6 (+/-), L363 (+/-) |
| BCMA, BCMA | 22048 | 22863 | Raji (+), Nalm6 (-), L363 (+/-) |
| CD22, BCMA | 22049 | 22864 | Raji (1.5+), Nalm6 (+/-), L363 (+/-) |
| BCMA, BCMA | 22050 | 22865 | Raji (+), Nalm6 (-), L363 (+/-) |
| CD22, BCMA | 22051 | 22866 | Raji (+/-), Nalm6 (-), L363 (+/-) |
| CD22, BCMA | 22052 | 22867 | Raji (+/-), Nalm6 (-), L363 (+/-) |
| CD22, PSMA | 22053 | 22868 | Raji (-), Nalm6 (-), LNCaP (+) |
| CD22, PSMA | 22054 | 22869 | Raji (-), Nalm6 (-), LNCaP (-) |
| CD22, PSMA | 22055 | 22870 | Raji (+/-), Nalm6 (-), LNCaP (+) |
| CD22, PSMA | 22056 | 22871 | Raji (+/-), Nalm6 (-), LNCaP (-) |
| CD22, PSMA | 22057 | 22872 | Raji (+/-), Nalm6 (-), LNCaP (+) |
| CD22, PSMA | 22058 | 22873 | Raji (+/-), LNCaP (+) |
| CD22, PSMA | 22059 | 22874 | Raji (+/-), LNCaP (+) |
| CD22, BCMA | 22060 | 22875 | Raji (2+), Nalm6 (+/-), L363 (2+) |
| BCMA, BCMA | 22061 | 22876 | L363 (2+) |
| BCMA, BCMA | 22062 | 22877 | L363 (+/-) |
| BCMA, BCMA | 22063 | 22878 | L363 (+/-) |
| BCMA, BCMA | 22064 | 22879 | L363 (+/-) |
| BCMA, BCMA | 22065 | 22880 | L363 (-) |
| CD22, BCMA | 22066 | 22881 | Raji (+/-), Nalm6 (+/-), L363 (+/-), RS411 (-) |
| CD22, BCMA | 22067 | 22882 | Raji (+/-), Nalm6 (+/-), L363 (+), RS411 (-) |
| CD22, BCMA | 22068 | 22883 | Raji (+), Nalm6 (+/-), L363 (+), RS411 (+/-) |
| CD22, BCMA | 22069 | 22884 | Raji (+), Nalm6 (-), L363 (-), RS411 (-) |
| BCMA, CD19 | 22070 | 22885 | Raji (+/-), Nalm6 (+/-), L363 (+/-), RS411 (-) |
| BCMA, BCMA | 22071 | 22886 | L363 (2.5+), RS411 (-) |
| CD22, BCMA | 22072 | 22887 | Raji (+), Nalm6 (+/-), L363 (+), RS411 (-) |
| CD22, BCMA | 22073 | 22888 | Raji (+/-), Nalm6 (-), L363 (+/-), RS411 (-) |
| BCMA, BCMA | 22074 | 22889 | L363 (2.5+), RS411 (-) |
| BCMA, BCMA | 22075 | 22890 | L363 (+/-), RS411 (-) |
| CD22, BCMA | 22076 | 22891 | Raji (+/-), Nalm6 (-), L363 (+) |
| CD22, BCMA | 22077 | 22892 | Raji (-), Nalm6 (-), L363 (-) |
| CD22, BCMA | 22078 | 22893 | Raji (+/-), Nalm6 (-), L363 (+/-) |
| PSMA, PSMA | 22079 | 22894 | LNCaP (+/-) |
| CD22, BCMA | 22080 | 22895 | Raji (+), Nalm6 (-), L363 (1.5+) |
| PSMA, PSMA | 22081 | 22896 | LNCaP (3.5+) |
| CD22, CD22 | 22082 | 22897 | Raji (+/-), Nalm6 (-), L363 (-) |
| CD22, BCMA | 22083 | 22898 | Raji (+/-), Nalm6 (-), L363 (+/-) |
| CD22, CD22 | 22084 | 22899 | Raji (+/-), Nalm6 (-), L363 (-) |
| CD22, BCMA | 22085 | 22900 | Raji (+/-), Nalm6 (-), L363 (1.5+) |

### Bispecific and Biparatopic SARs on SIR, AABD-TCR and TCR Backbones

[0806] Another panel of constructs were generated comprising different antigen binding domain, linkers and TCR constant chains and tested in JNG assay (Table 45). The constructs represented by SEQ ID NO: 22096 and 22098 showed the best activity in this group. Both these constructs encoded an FHVH attached to a truncated TCRg chain (TCRg-6MD; SEQ ID NO: 1132) via an IgCL linker (SEQ ID NO: 1142) and a second FHVH attached to a truncated TCRd chain (TCRd-6MD; SEQ ID NO: 1139) via an IgG1-CH1 linker (SEQ ID NO: 1143). The construct with SEQ ID NO: 22099 also showed good activity. This construct comprises an encoded FHVH attached to a truncated TCRa chain (TCRa-wt2-opt-6MD; SEQ ID NO: 1112) via an IgCL linker (SEQ ID NO: 1142) and a second FHVH attached to a truncated TCRd chain (TCRb-wt2-opt-6MD; SEQ ID NO: 1126) via an IgG1-CH1 linker (SEQ ID NO: 1143).

[0807] The construct in which the vHH or FHVH or Centyrin or affibody or other non-immunoglobulin antigen binding domain are operably linked to the vL and the vH fragment which are then operably linked via Ig linkers (e.g., IgCL1 and IgG1-CH1) to the truncated TCR constant chains belonging to TCRα, β, γ or δ (i.e., TCRg-6MD, TCRd-6MD, TCRa-wt2-opt-6MD and TCRb-wt2-opt-6MD) retained their activity against two or more antigen targets.

[0808] The constructs in which the encoded IgG1-CH1 linker is replaced by other Ig linkers listed in Table 13 are also active. The constructs in which the encoded FHVH domains are switched for other AABD (e.g., vHH, centyrin, Rzip, E4, CD16 V158 etc.) are also active. The constructs in which encoded multiple AABD are joined in tandem via short optional linkes and then joined in frame to the truncated TCR constant chains (e.g., SEQ ID NO: 1126, 1132, 1139, 1112) via Ig linkers are also tested in JNG cells and show good signaling activity. The constructs with long linker domains (i.e., encoding >25 amino acid residues) between the AABD and the truncated TCR constant chains show stronger signaling as compared to the constructs with short linkers. The constructs that encode for long linkers that are between 50-150 amino acids in length show superior activity. The constructs in which an AABD is attached to a truncated TCR chain (e.g., TCRb-wt2-opt-6MD, TCRa-wt2-opt-6MD, TCRg-6MD, TCRd-6MD etc.) via an Ig linker or a long linker are collectively designated AABD-TCR.

[0809] The above results demonstrate that attachment of an AABD does not interfere with the ability of the vL fragment to combine with its complementary vH fragment to form a Fv that can recognize the target antigen and induce cell signaling when the vL and vH fragments are each attached to a truncated TCR constant chain via an Ig linker or a long linker. The above results further demonstrate that an AABD (e.g., a vHH or SVH) which is operably linked to the N-terminus or near the N-terminus of a vL or vH fragment retains its ability to bind to its target antigen and induce T cell signaling when expressed as part of a SAR. Taken collectively, these surprising results demonstrate that attachment of an AABD to the encoded N-terminus of vL or vH fragment of a SAR does not interfere with the assembly of a functional Fv capable of binding the target antigen and inducing T cell signaling.

TABLE 45

BISPECIFIC AND BIPARATOPIC SARs ON SIR AND AABD, TCR BACKBONE

| ANTIGEN | SEQ ID NO (DNA) | SEQ ID NO (PRT) | Constructs Name | NFAT-GFP ASSAY |
|---|---|---|---|---|
| BCMA | 22087 | 22902 | CD8SP-BCMA-FHVH-74-G4S-[hTCRβ-S57C]-F-P2A-IgHSP-BCMA-FHVH-33-GS-[TCRα-wt2-opt-6MD] | Raji (+), Nalm6 (-), L363 (2+) |
| CD19, BCMA | 22088 | 22903 | CD8SP-FMC63-scFv-[hTCRβ-S57C]-F-P2A-SP-BCMA-FHVH-93-GS-[TCRα-wt2-opt-6MD] | Raji (2+), Nalm6 (2.5+), L363 (3+) |
| CD22, BCMA | 22089 | 22904 | CD8SP-CD22-FHVH-24-GS-[TCRβ-wt2-opt-6MD]-F-P2A-SP-BCMA-FHVH-93-[hTCRa-T48C-opt]-F-F2A-PAC | Raji (+), Nalm6 (-), L363 (2+) |
| CD22, BCMA | 22090 | 22905 | CD8SP-CD22-FHVH-24-IgG1-Hinge-[TCRβ-wt2-opt-6MD]-F-P2A-SP-BCMA-FHVH-93-[hTCRa-T48C-opt]-F-F2A-PAC | Raji (1.5+), Nalm6 (-), L363 (3+) |
| CD22, BCMA | 22091 | 22906 | CD8SP-CD22-FHVH-24-[hTCRβ-KACIAH]-F-P2A-SP-BCMA-FHVH-93-[hTCRa-T48C-opt]-F-F2A-PAC | Raji (+), Nalm6 (+/-), L363 (1.5+) |
| BCMA | 22092 | 22907 | CD8SP-BCMA-FHVH-74-[hTCRβ-KACIAH]-F-P2A-SP-BCMA-FHVH-33-[hTCRa-T48C-opt]-F-F2A-PAC | Raji (1.5+), Nalm6 (-), L363 (1.5+) |
| CEA, CD19 | 22093 | 22908 | CD8SP-CEA300-aVH-V5-[hTCRβ-KACIAH]-F-P2A-CD8SP-CD19-hu-mROO5-1-MYC-[hTCRa-CSDVP]-F-F2A-PAC | Raji (2+), Nalm6 (+), L363 (-), LoVo (+/-) |
| CD19, PSMA | 22094 | 22909 | CD8SP-FMC63-scFv-V5-[hTCRβ-KACIAH]-F-P2A-IgHSP-PSMA28v2-ChVH-G4Sx2-PSMA71v2-ChVH-MYC-[hTCRa-CSDVP]-F-F2A-PAC | Raji (1.5+), Nalm6 (+), L363 (+/-), LNCaP (+/-) |
| CD19, BCMA | 22095 | 22910 | CD8SP-FMC63-scFv-[hTCRβ-S57C]-F-P2A-SP-BCMA-FHVH-93-[hTCRa-T48C-opt]-F-F2A-PAC | Raji (2+), Nalm6 (2+), L363 (2+) |
| CD22, BCMA | 22096 | 22911 | CD8SP-CD22-FHVH-24-IgCL-TCRg-6MD-F-P2A-IgHSP-BCMA-FHVH-93-IgG1-CH1-TCRd-6MD-F-F2A-PAC | Raji (2+), Nalm6 (+), L363 (3.5+) |
| CD22, BCMA | 22097 | 22912 | CD8SP-CD22-FHVH-24-IgCL-TCRb-wt2-opt-6MD-F-P2A-Bcu-IgHSP-BCMA-FHVH-93-IgG1-CH1-TCRa-wt2-opt-6MD-F-F2A-PAC | Raji (+), Nalm6 (-), L363 (1.5+) |
| BCMA | 22098 | 22913 | CD8SP-BCMA-FHVH-74-IgCL-TCRg-6MD-F-P2A-Bcu-IgHSP-BCMA-FHVH-33-IgG1-CH1-TCRd-6MD-F-F2A-PAC | L363 (4+) |
| BCMA | 22099 | 22914 | CD8SP-BCMA-FHVH-74-IgCL-TCRb-wt2-opt-6MD-F-P2A-Bcu-IgHSP-BCMA-FHVH-33-IgG1-CH1-TCRa-wt2-opt-6MD-F-F2A-PAC | L363 (2+) |

### Generation of SAR Constructs on SIR and Ab-TCR Backbones

[0810] Another panel of SAR construct are generated on SIR and ab-TCR backbone (Table 46). An exemplary double chain bispecific SAR on SIR backbone comprising two chains is CD8SP-CD19-hu-mROO5-1-vL-[hTCRb-S57C]-F-P2A-IgHSP-CD20-vHH2-HCD25-G4S-CD19-hu-mROO5-1-vH-[hTCRa-T48C-opt]-F-F2A-PAC and is represented by SEQ ID NO (DNA): 22104 and SEQ ID NO (PRT): 22919. This SAR construct has the backbone of a SIR, which has been described in WO2018102795 and is incorporated in its entirety by reference herein. One chain of the SAR construct encodes the humanized hu-mROO5-1 vL fragment fused to the constant chain of human TCRb carrying S57C mutation (hTCRb-S57C) and the other chain of the SAR encodes for the humanized hu-mROO5-1 vH fragment fused to the constant chain of human TCRa carrying the T48C mutation (hTCRa-T48C). The hu-mROO5-1 vL and hu-mROO5-1 vH fragments of the SAR together form a Fv targeting CD19. A vHH fragment targeting CD20 (CD20-vHH2-HCD25) is fused to the N-terminus of the hu-mROO5-1 vH fragment via a Glycine-Serine linker. Thus, the SAR targets CD19 via the hu-mROO5-1 Fv and targets CD20 via CD20-USC1-vHH-2HCD26. This construct showed strong activity against RAJI (CD19+/CD20+), RAJI-CD19-KO (CD19+/CD20-), DAUDI (CD19+/CD20+) and RS;411 (CD19+/CD20-) cell lines when expressed in JNG cells and tested using JNG assay. A large panel of additional bispecific SAR constructs were generated in which encoded one AABD is attached to the hu-mROO5-1 vL or the hu-mROO5-1 vH fragments of a double chain SIR and are represented by SEQ ID NO:22104-22119 (Table 46). These constructs vary in the type of AABD (e.g., FHVH, vHH, Centyrin etc.), the type of TCR constant chain (e.g., hTCRb-S57C, hTCRb-KACIAH, hTCRa-CSDVP, hTCRa-T48C-opt, hTCRg-d5, hTCRd-d2 etc.), and the nature of the target antigen targeted by the AABD and the Fv (Table 46). The exemplary construct with SEQ ID NO: 22109 encodes a BCMA targeted Centyrin as the AABD while the exemplary construct with SEQ ID NO: 22118 encodes a CD20 vHH domain as the AABD. These constructs showed robust activity against a panel of cell lines expressing one or both of their target antigen(s) while showing lack of non-specific activity against cell lines lacking the expression of both of their target antigens (Table 46).

[0811] The above results demonstrate that attachment of an AABD does not interfere with the ability of the vL fragment to combine with its complementary vH fragment to form a Fv that can recognize the target antigen and induce cell signaling when the vL and vH fragments are each attached to a TCR constant chain. The above results further demonstrate that an AABD (e.g., a vHH or SVH) which is operably linked to the N-terminus or near the N-terminus of a vL or vH fragment retains its ability to bind to its target antigen and induce T cell signaling when expressed as part of a SAR with the backbone of a SIR. Taken collectively, these surprising results demonstrate that attachment of an AABD to the encoded N-terminus of vL or vH fragment of a SAR does not interfere with the assembly of a functional Fv capable of binding the target antigen and inducing T cell signaling.

[0812] A panel of trispecific SAR constructs on the hu-mROO5-1 SIR backbone were next generated and are represented by SEQ ID NO: 22123-22139. These constructs vary in the type of encoded AABD (e.g., FHVH, vHH, Centyrin etc.), the type of TCR constant chain (e.g., hTCRb-S57C, hTCRb-KACIAH, hTCRa-CSDVP, hTCRa-T48C-opt, hTCRg-d5, hTCRd-d2 etc.), and the nature of the target antigen targeted by the AABD and the Fv (Table 46).

[0813] An exemplary double chain trispecific SAR comprising two chains is CD8SP-CD20-VHH-2HCD26-USC1-G4S-hu-mROO5-vL-[hTCRb-S57C]-F-P2A-IgHSP-CD20-vHH2-HCD25-G4S-CD19-hu-mROO5-1-vH-[hTCRa-T48C-opt]-F-F2A-PAC and is represented by DNA SEQ ID NO: 22136 and PRT SEQ ID NO: 22951. Another exemplary double chain trispecific SAR with this design is CD8SP-BCMA-FHVH-93-G4S-hu-mROO5-vL-[hTCRb-KACIAH]-F-P2A-IgHSP-CD20-vHH2-HCD25-G4S-CD19-hu-mROO5-1-vH-[hTCRa-CSDVP]-F-F2A-PAC (SEQ ID NO: 22123). This SAR construct has the backbone of a SIR. The encoded hu-mROO5-1 vL and hu-mROO5-1 vH fragments of the SIR dimerize to form a Fv targeting CD19. A FHVH fragment targeting BCMA is fused to the N-terminus of the hu-mROO5-1 vL fragment via a Glycine-Serine (G4S) linker. A vHH fragment targeting CD20 (CD20-vHH2-HCD25) is fused to the N-terminus of the hu-mROO5-1 vH fragment via a Glycine-Serine (GS) linker. Thus, the SAR targets CD19 via the hu-mROO5-1 Fv, targets BCMA via BCMA FHVH-93 and targets CD20 via CD20-vHH2-HCD25. These constructs showed robust activity against a panel of cell lines expressing one or both of their target antigen(s) while showing lack of non-specific activity against cell lines lacking the expression of both of their target antigens (Table 46).

[0814] A panel of double chain bispecific and trispecific constructs were also constructed on the backbone of double chain Ab-TCR and are represented by SEQ ID NO: 22120-22122 and 22140-22141, respectively. A representative SAR with the backbone of an Ab-TCR is CD8SP-CD19-hu-mROO5-1-vL-IgCL-TCRb-wt2-opt-6MD-F-P2A-IgHSP-CD20-vHH2-HCD25-G4S-CD19-hu-mROO5-1-vH-IgG1-CH1-TCRa-wt2-opt-6MD-F-F2A-PAC (SEQ ID NO: 22120). One chain of this SAR construct encodes the humanized hu-mROO5-1 vL fragment fused to the constant chain of truncatetd TCRb (TCRb-wt2-opt-6MD) via an IgCL linker and the other chain of the SAR encodes the humanized hu-mROO5-1 vH fragment fused to the constant chain of truncated human TCRa chain (TCRa-wt2-opt-6MD) via an IgG1-CH1 linker. The encoded hu-mROO5-1 vL and hu-mROO5-1 vH fragments of the SAR together form a Fv targeting CD19. A vHH fragment targeting CD20 (CD20-vHH2-HCD25) is fused to the N-terminus of the hu-mROO5-1 vH fragment via a Glycine-Serine linker. Thus, the SAR targets CD19 via the hu-mROO5-1 Fv and targets CD20 via CD20-USC1-vHH-2HCD26. These constructs showed robust activity against a panel of cell lines expressing one, two or three of their target antigen(s) while showing lack of non-specific activity against cell lines lacking the expression of either of their target antigens (Table 46).

[0815] The expression of different antigens on the panel of cell lines can be determined by reference to Table C-1 and C-2.

[0816] Another panel of bispecific and trispecific SAR constructs were generated on the backbone of double chain SIRs or double chain Ab-TCR comprising vL and vH fragments derived from a CD22 targeted humanized antibody huRFB4, a MPL targeted humanized antibody hu-161-2, a BCMA targeted humanized and optimized antibody BCMA-hu72, and a CD20 targeted antibody CD20-2F2. These constructs and are represented by SEQ ID NO: 22144-22147, 22148-22150, 22151-22155, 22156-22159. These constructs showed robust activity against a panel of cell lines expressing one, two or all three of their target antigen(s) while showing lack of non-specific activity against cell lines lacking the expression of either of their target antigens (Table 46).

[0817] Another panel of bispecific and trispecific SAR constructs were generated on the backbone of CD19-targeted hu-mROO5-1 based double chain SIR targeting additional antigens expressed on blood cancers (e.g., CD123) and solid tumors (e.g., IL13Ra2, Muc16 etc.). These constructs are represented by SEQ ID NO: 22164-22172 and showed showed robust activity against a panel of cell lines expressing their target antigen(s) while showing lack of non-specific activity against cell lines lacking the expression of either of their target antigens (Table 46).

[0818] Another bispecific SAR construct was generating targeting CD19 and PD1 (SEQ ID NO: 22162) and showed robust activity against Raji, Nalm6 and RS;411 cell lines (Table 46).

[0819] Another bispecific SAR construct was generating targeting CD19 and human serum albumn (SEQ ID NO: 22163). In this construct a vHH targeting human serum albumin (HAS) is attached to vL fragment of hu-mROO5-1 via a MMP14X3 protease cleavable linker. This construct showed a dose dependent reduction in activity upon addition of human serum albumin (Table 46).

[0820] Another panel of SAR construct was generated comprising the Fc binding domain of high affinity variant of CD16A, the human Fc receptor (SEQ ID NO: 22170-22173). The constructs were expressed in JNG cells and tested for GFP induction upon co-culture with their target antigen expressing cell lines. In addition, the experiment was repeated in the presence and absence of Herpceptin (a Her2 antibody) and/or Rituximab (a CD20 antibody). The construct with SEQ ID NO: 22170 showed robust GFP induction upon co-culture with RAJI cells and lack of non-specific GFP induction upon co-culture with RAJI-CD19-KO cells. Furthermore, JNG cells expressing this SAR construct showed robust GFP induction when co-cultured with SKOV-3 (Her2+/CD19-) cells in the presence of Hercepin (1 µg/ml) (Table 46). Essentially similar results were obtained with JNG cells expressing the SAR constructs with SEQ ID NO: 22173-22176. JNG cells expressing the CD19 and CD16 V158 expressing SAR construct with SEQ ID NO: 22172 showed robust GFP induction with CD19-expressing Raji cells but lack of GFP induction with RAJI-CD19-KO (CD19-ve) cells. However, it showed robust GFP induction when co-cultured with RAJI-CD19-KO cells in the presence of Rituximab which targets CD20 antigen (Table 46). Taken together the above results demonstrate the ability of the SAR constructs to have bispecific, trispecific and universal capabilities. The UNICON constructs (e.g., SEQ ID NO: 22170-22176) can target some antigens constitutively and other antigens conditionally only in the presence of added antibodies, thereby providing a highly flexible and adaptable platform for adoptive cell therapy that combines convenience and reduced cost with flexibility and improved safety and efficacy.

[0821] An exemplary trispecific SAR construct targeting CD19 and CD20 and coexpressing the ligand binding domain of NKG2D is represented by SEQ ID NO: 22177 and showed robust activity against CD19 expressing Raji and Nalm6 cells as well as against NKG2D-ligand expressing SKOV-3 cells (Table 6).

[0822] Exemplary bispecific and trispecific constructs targeting PSMA along with one or more hematopoietic antigens (e.g., CD19, CD20 etc.) are represented by SEQ ID NO: 22178-22190 and showed robust GFP induction activity against Raji (CD19⁺/CD20⁺/PSMA⁻) and LNCaP (CD19⁻/CD20⁻/PSMA⁺) cells.

[0823] Exemplary bispecific and trispecific SAR constructs comprising Cltx (chlorotoxin) attached to the backbone of a CD19 targeted SIR are represented by SEQ ID NO: 22191-22193. Cltx targets small conductance chloride channel expressed on certain cancer cells. These constructs showed robust GFP induction upon co-culture with Raji, Nalm6, RS;411 and other cell lines but lack of non-specific activity against Raji-CD19-KO or L363 cells.

[0824] Exemplary bispecific SAR constructs targeting CD19 and Her2 are represented by SEQ ID NO: 22195-22197 and showed robust GFP induction activity against Raji (CD19⁺) and SKOV-3 (Her2⁺) cell lines (Table 46). The constructs with SEQ ID NO: 22195 and 22197 encodes a Her2 targeting DARPIN as the AABD, while the construct with SEQ ID NO: 22196 encodes a Her2 targeting vHH domain.

[0825] An exemplary bispecific SAR constructs targeting CD19 and Her3 are represented by SEQ ID NO: 22198 and showed robust GFP induction activity against Raji (CD19⁺), MCF-7 (Her3⁺) and SKOV-3 (Her3⁺) cell lines (Table 46)

[0826] Exemplary bispecific and trispecific constructs on the backbone of a γδ TCR are represented by SEQ ID NO: 22201 and 22202. In the construct CD8SP-BCMA-FHVH-93-G4S-TCR-Vg9-F-P2A-IgHSP-CD20-vHH2-HCD25-G4S-TCR-Vd2-F-F2A-PAC (SEQ ID NO: 22201), an encoded BCMA-FHVH is fused in frame to the N-terminus end of Vg9 variable domain via a G4S linker and an encoded CD20-vHH2-HCD25 fragment is attached to the N-terminus of Vd2 variable domain via a G4S linker. This construct showed robust induction of GFP upon exposure to Raji, Raji-CD19-KO (CD19⁻/BCAM⁺) and L363 (BCMA⁺) cells, thereby demonstrating the ability to generate trispecific SAR on the backbone of a TCR. Similar results were obtained with the bispecific SAR represented by SEQ ID NO: 22202 that targets CD20 as one of its antigens.

[0827] Several SAR constructs with hybrid chains also showed activity and are represented by SEQ ID NO: 22203-22207. The construct CD8SP-BCMA-FHVH-93-G4S-hu-mROO5-vL-[hTCRb-KACIAH]-F-P2A-IgHSP-CD20-vHH2-HCD25-G4S-Her2-huMab4D5-D98W-vH-[hTCRa-CSDVP]-F-F2A-PAC with SEQ ID NO: 22203 has the backbone of a SIR and encodes for a vL fragment from CD19 targeted hu-mROO5-1 and a vH fragment from Her2 specific Her2-huMab4D5-D98W. The JNG cells expressing this construct were able to respond to Raji and L363 cells via GFP induction through its BCMA-FHVH-93 and CD20-vHH2-HCD25 domains although they failed to respond to Her2-expressing SKOV-3 cells. These results demonstrate that a functional Fv fragment targeting CD19 and/or Her2 is not being formed as the complementary hu-mROO5-1 vH and Her2-huMab4D5-D98W-vL chains are missing in this construct. Nevertheless, the expressed hu-mROO5-vL and Her2-huMab4D5-D98W vH fragments serve as scaffold for the attachment of the BCMA-FHVH-93 and CD20-vHH2-HCD25 domains. Thus, a funcational bispecific and/or trispecific SAR on the backbone of a double chain SIR can be generated with vL and vH fragments that are derived from different antibodies.

[0828] Similarly, the SAR construct MC7G5-TCRb-Vb-[hTCRb-S57C]-F-P2A-IgHSP-CD20-vHH2-HCD25-G4S-CD19-hu-mROO5-1-vH-[hTCRa-T48C-opt]-F-F2A-PAC (SEQ ID NO: 22205) comprised a Vb fragment from MC.7.G5 TCR and a vH fragment from hu-mROO5-1 antibody but was able to show robust GFP induction activity (Table 46) when expressed in JNG cells upon exposure to Raji cells which were bound by the CD20-vHH2-HCD25 domain. Thus, a funcational bispecific and/or trispecific SAR on the backbone of a double chain SIR can be generated with one variable fragment (e.g., Va, Vb, Vg or Vd) derived from a TCR and a second variable fragment (e.g., vL or vH) derived form an antibody.

[0829] Similarly, the SAR construct CD8SP-BCMA-FHVH-93-G4S-hu-mROO5-vL-[hTCRb-S57C]-F-P2A-IgHSP-CD20-VHH-USC1-2HCD26-G4S-AFP-Va-14-3-AI-[hTCRa-T48C]-F-F2A-PAC (SEQ ID NO: 22206) encodes for a hu-mROO5-vL fragment from a CD19-targeted antibody and an AFP-targeted variable fragment (Va) from a TCR. This construct showed robust GFP induction activity (Table 46) upon exposure to Raji cells which were bound by the CD20-vHH2-HCD25 domain. These results further demonstrate that a funcational bispecific and/or trispecific SAR on the backbone of a double chain SIR can be constructed with one variable fragment derived from a TCR and a second variable fragment derived form an antibody.

[0830] The construct CD8SP-CD19-hu-mROO5-1-vL-IgCL-TCRg-6MD-F-P2A-SP-CD19-hu-mROO5-1-vH-hTCR-delta-F-F2A-PAC (SEQ ID NO: 22207) encodes for hu-mROO5-1 attached to a truncated TCRg-6MD fragment via an IgCL linker and a hu-mROO5-1-vH fragment attached to a full-length hTCR-delta constant chain without an intervening linker. This SAR construct showed robust GFP induction in response to Raji cells (Table 46) thereby demonstrating that a TCR Ig domain can substitute for an Ig domain (i.e.,IgCL, IgG1-CH1 etc.) derived from an antibody for the generation of a functional SAR. This SAR construct represents a hybrid between a SIR and an Ab-TCR.

TABLE 46

Jurkat NFAT GFP ASSAY USING, BISPECIFIC AND MULTISPECIFIC SAR CONSTRUCTS

| Target | SEQ ID NO (DNA) | SEQ ID NO (PRT) | Name of Construct | Jurkat-NFAT-GFP (JNG) ASSAY |
|---|---|---|---|---|
| CD19 | 22101 | 22916 | CD8SP-FMC63-vL-hTCRb-S57C-opt-F-P2ASP-FMC63-vH-[hTCRa-T48C-opt]-F-F2A-PAC | Raji (2.5+), Raji-CD19-KO (-), Nalm6 (3+) |
| CD19 | 22102 | 22917 | CD8SP-FMC63-vL-[hTCRb-KACIAH]-F-P2A-IgHSP-FMC63-vH-[hTCRa-CSDVP]-F-F2A-PAC | Raji (3.5+), Raji-CD19-KO (-) |
| CD19 | 22103 | 22918 | CD8SP-CD19-hu-mROO5-1-vL-IgCL-TCRg-6MD-F-P2A-SP-CD19-hu-mROO5-1-vH-IgG1-CH1-TCRd-6MD-F-F2A-PAC | Raji (4+), Raji-CD19-KO (-) |
| CD19, CD22 | 22104 | 22919 | CD8SP-CD19-hu-mROO5-1-vL-[hTCRb-S57C]-F-P2A-IgHSP-CD20-vHH2-HCD25-G4S-CD19-hu-mROO5-1-vH-[hTCRa-T48C-opt]-F-F2A-PAC | Raji (5+), Raji-CD19-KO (5+), Daudi (6+), RS411 (5+) |
| CD19, CD20 | 22105 | 22920 | CD8SP-CD19-hu-mROO5-1-vL-[hTCRb-S57C]-F-P2A-IgHSP-CD20-vHH2-HCD25-G4S-CD19-hu-mROO5-1-vH-[hTCRa-T48C-opt]-F-F2A-PAC | Raji (2.5+), Raji-CD19-KO (4+), Nalm6 (5+) |
| CD19, CD20 | 22106 | 22921 | CD8SP-CD19-hu-mROO5-1-vL-[hTCRb-KACIAH]-F-P2A-IgHSP-CD20-vHH2-HCD25-G4S-CD19-hu-mROO5-1-vH-[hTCRa-CSDVP]-F-F2A-PAC | Raji (5+), Raji-CD19-KO (6+), L363 (-), RS411 (+) |
| CD19, CD20 | 22107 | 22922 | CD8SP-CD19-hu-mROO5-1-vL-[hTCRa-CSDVP]-F-F2A-IgHSP-CD20-vHH2-HCD25-G4S-CD19-hu-mROO5-1-vH-[hTCRb-KACIAH1-F-P2A-PAC | Raji (4+), Raji-CD19-KO (5+), L363 (-), RS411 (+) |
| BCMA, CD19 | 22108 | 22923 | CD8SP-BCMA-FHVH-74-G4S-hu-mROO5-vL-[hTCRb-S57C]-F-P2A-SP-CD19-hu-mROO5-1-vH-[hTCRa-T48C-opt]-F-F2A-PAC | Raji (4+), Raji-CD19-KO (3+), Nalm6 (7+), L363 (3.5+), RS411 (5+), HL60 (-), MOLM-13 (-), THP-1 (-) |
| BCMA, CD19 | 22109 | 22924 | CD8SP-BCMA-Centyrin-G4S-hu-mROO5-vL-[hTCRb-S57C]-F-P2A-SP-CD19-hu-mROO5-1-vH-[hTCRa-T48C-opt]-F-F2A-PAC | Raji (2+), Raji-CD19-KO (+/-), Nalm6 (2+), L363 (+/-), RS411 (4+) |
| CD22, CD19 | 22110 | 22925 | CD8SP-CD22-FHVH-24-G4S-hu-mROO5-vL-[hTCRb-S57C]-F-P2A-SP-CD19-hu-mROO5-1-vH-[hTCRa-T48C-opt]-F-F2A-PAC | Raji (5+), Raji-CD19-KO (4+), Nalm6 (-), L363 (-), U266 (-), RS411 (4+) |
| BCMA, CD19 | 22111 | 22926 | CD8SP-BCMA-FHVH-33-G4S-hu-mROO5-vL-[hTCRb-S57C]-F-P2A-SP-CD19-hu-mROO5-1-vH-[hTCRa-T48C-opt]-F-F2A-PAC | Raji (4+), Raji-CD19-KO (3+), Nalm6 (2+), L363 (3+), U266 (-), RS411 (4+), HL60 (-), MOLM-13 (-), THP-1 (-) |
| CD19, BCMA | 22112 | 22927 | CD8SP-CD19-hu-mROO5-1-vL-[hTCRb-S57C]-F-P2A-IgHSP-BCMA-917-vHH-E59D-G4S-CD19-hu-mROO5-1-vH-[hTCRa-T48C-opt]-F-F2A-PAC | Raji (6.5+), Raji-CD19-KO (5+), Nalm6 (6+), L363 (4.5+), RS411 (4.5+) |
| CD19, CD20 | 22113 | 22928 | CD8SP-CD19-hu-mROO5-1-vL-[hTCRb-KACIAH]-F-P2A-IgHSP-CD20-vHH2-HCD25-G4S-CD19-hu-mROO5-1-vH-[hTCRa-CSDVP]-F-F2A-PAC | Raji (5+), Raji-CD19-KO (4+), Nalm6 (4.5+), Daudi (4.5+), RS411 (4.5+) |
| CD19, CD20 | 22114 | 22929 | CD8SP-CD19-hu-mROO5-1-vL-[hTCRa-CSDVP]-F-F2A-IgHSP-CD20-vHH2-HCD25-G4S-CD19-hu-mROO5-1-vH-[hTCRb-KACIAH]-F-P2A-PAC | Raji (6+), Raji-CD19-KO (5+), Nalm6 (6+), Daudi (6+), RS411 (5+) |
| CD19, BCMA | 22115 | 22930 | CD8SP-CD19-hu-mROO5-1-vL-[hTCRβ-KACIAH]-F-P2A-CD8SP-BCMA-FHVH-74-CD19-hu-mROO5-1-vH-[hTCRa-CSDVP]-F-F2A-PAC | Raji (1.5+), Raji-CD19-KO (1.5+), Nalm6 (2.5+), L363 (2.5+), RS411 (2+) |
| CD19, BCMA | 22116 | 22931 | CD8SP-CD19-hu-mROO5-1-vL-[hTCRa-CSDVP]-F-F2A-CD8SP-BCMA-FHVH-74-CD19-hu-mROO5-1-vH-[hTCRβ-KACIAH]-F-P2A-PAC | Raji (3+), Raji-CD19-KO (2+), Nalm6 (3+), L363 (3.5+), RS411 (2+) |
| CD19, CD22 | 22117 | 22932 | CD8SP-CD19-hu-mROO5-1-vL-[hTCRa-CSDVP]-F-F2A-CD8SP-CD22-FHVH-24-SP-CD19-hu-mROO5-1-vH-[hTCRβ-KACIAH]-F-P2A-PAC | Raji (3+), Raji-CD19-KO (2.5+), Nalm6 (1.5+), L363 (-) |
| CD20, CD19 | 22118 | 22933 | CD8SP-CD20-vHH-C07-G4S-CD19-huCD19USC3-vL-[hTCRβ-S57C]-F-P2A-SP-CD19USC3-vH-[hTCRa-T48C-opt]-F-F2A-PAC | Raji (3+), Raji-CD19-KO (2+), Nalm6 (3+), Daudi (3+), RS411 (3+) |
| CD19, CD20 | 22119 | 22934 | CD8SP-CD19-hu-mROO5-1-vL-huTCRg-d5-F-P2A-IgHSP-CD20-vHH2-HCD25-G4S-CD19-hu-mROO5-1-vH-huTCRd-d2-F-F2A-PAC | Raji (4+), Raji-CD19-KO (3+), Nalm6 (5.5+), L363 (-), RS411 (3+) |
| CD19, CD20 | 22120 | 22935 | CD8SP-CD19-hu-mROO5-1-vL-IgCL-TCRb-wt2-opt-6MD-F-P2A-IgHSP-CD20-vHH2-HCD25-G4S-CD19-hu-mROO5-1-vH-IgG1-CH1-TCRa-wt2-opt-6MD-F-F2A-PAC | Raji (4+), Raji-CD19-KO (3+), Nalm6 (3.5+), L363 (-), RS411 (2.5+) |
| CD19, CD20 | 22121 | 22936 | CD8SP-CD19-hu-mROO5-1-vL-IgCL-TCRg-6MD-F-P2A-IgHSP-CD20-vHH2-HCD25-G4S-CD19-hu-mROO5-1-vH-IgG1-CH1-TCRd-6MD-F-F2A-PAC | Raji (5+), Raji-CD19-KO (4+), Nalm6 (7+), L363 (-), RS411 (5.5+) |
| CD22, BCMA | 22122 | 22937 | CD8SP-CD22-FHVH-24-IgCL-TCRg-6MD-F-P2A-Bcu-IgHSP-BCMA-FHVH-93-IgG1-CH1 -TCRd-6MD-F-F2A-P AC | Raji (3.5+), Nalm6 (1.5+), L363 (2.5+) |
| CD19, BCMA, CD20 | 22123 | 22938 | CD8SP-BCMA-FHVH-93-G4S-hu-mROO5-vL-[hTCRb-KACIAH]-F-P2A-IgHSP-CD20-vHH2-HCD25-G4S-CD19-hu-mROO5-1-vH-[hTCRa-CSDVP]-F-F2A-PAC | Raji (4.5+), Nalm6 (5+), L363 (3+), RS411 (4+), HL60 (-), MOLM-13 (-), THP-1 (-) |
| CD19, CD20, CD22 | 22124 | 22939 | CD8SP-CD20-VHH-USC1-G4S-CD22-USC1-160-G4S-hu-mROO5-vL-[hTCRa-CSDVP]-F-F2A-IgHSP-CD20-vHH2-HCD25-G4S-CD19-hu-mROO5-1-vH-[hTCRb-KACIAH]-F-P2A-PAC | Raji (2.5+), Raji-CD19-KO (1.5+), Nalm6 (2+), RS411 (2+) |
| CD20, CD20, CD19 | 22125 | 22940 | CD8SP-CD20-VHH-2HCD26-USC1-G4S-hu-mROO5-vL-[hTCRb-KACIAH]-F-P2A-IgHSP-CD20-vHH2-HCD25-G4S-CD 19-hu-mROO5-1-vH-[hTCRa-CSDVP]-F-F2A-PAC | Raji (4+), Raji-CD19-KO (5+), Nalm6 (2.5+), L363 (-), RS411 (+/-) |
| CD19, CD19, CD20 | 22126 | 22941 | CD8SP-CD19-FHVH-354-G4S-hu-mROO5-vL-[hTCRb-KACIAH]-F-P2A-IgHSP-CD20-vHH2-HCD25-G4S-CD19-hu-mROO5-1-vH-[hTCRa-CSDVP]-F-F2A-PAC | Raji (5+), Raji-CD19-KO (6+), Nalm6 (5+), L363 (-), RS411 (+/-) |
| BCMA, CD20, CD19 | 22127 | 22942 | CD8SP-BCMA-Centyrin-G4S-hu-mROO5-vL-[hTCRa-CSDVP]-F-F2A-IgHSP-CD20-vHH2-HCD25-G4S-CD19-hu-mROO5-1-vH-[hTCRb-KACIAH]-F-P2A-PAC | Raji (+), Raji-CD19-KO (+), Nalm6 (+), L363 (+), RS411 (+) |
| BCMA, CD38, CD19 | 22128 | 22943 | CD8SP-BCMA-FHVH-74-G4Sx2-IE-G4Sx2-CD38-309021-FHVH-G4S-hu-mROO5-vL-[hTCRb-S57C]-F-P2A-SP-CD19-hu-mROO5-1-vH-[hTCRa-T48C-opt]-F-F2A-PAC | Raji (3+), Raji-CD19-KO (2+), L363 (2+), L363-CD38-KO (2+), RS411 (2+) |
| CD38, CD19, CD20 | 22129 | 22944 | CD8SP-CD38-USC1-FHVH-32184-G4S-hu-mROO5-vL-[hTCRa-CSDVP]-F-F2A-IgHSP-CD20-vHH2-HCD25-G4S-CD19-hu-mROO5-1-vH-[hTCRb-KACIAH]-F-P2A-PAC | Raji (+), Raji-CD19-KO (+), Nalm6 (+), L363 (+), RS411 (+) |
| BCMA, CD19, CD20 | 22130 | 22945 | CD8SP-BCMA-FHVH-93-G4S-hu-mROO5-vL-[hTCRb-KACIAH]-F-P2A-IgHSP-CD20-vHH2-HCD25-G4S-CD19-hu-mROO5-1-vH-[hTCRa-CSDVP]-F-F2A-PAC | Raji (4+), Raji-CD19-KO (5+), Nalm6 (5.5+), L363 (5+), RS411 (4+) |
| BCMA, CD19, CD20 | 22131 | 22946 | CD8SP-BCMA-FHVH-93-G4S-hu-mROO5-vL-[hTCRb-KACIAH]-F-P2A-IgHSP-CD20-vHH2-HCD25-G4S-CD19-hu-mROO5-1-vH-[hTCRa-CSDVP]-F-F2A-PAC | Raji (4+), Raji-CD19-KO (5+), Nalm6 (6+), L363 (5+), RS411 (3.5+) |
| BCMA, CD19, CD20 | 22132 | 22947 | CD8SP-BCMA-FHVH-93-G4S-hu-mROO5-vL-[hTCRb-KACIAH]-F-P2A-IgHSP-CD20-VHH-USC1-2HCD26-G4S-CD19-hu-mROO5-1-vH-[hTCRa-CSDVP]-F-F2A-PAC | Raji (4.5+), Raji-CD19-KO (6+), Nalm6 (5+), L363 (4+), RS411 (4+) |
| CD19, CD19, CD20 | 22133 | 22948 | CD8SP-CD19-FHVH-354-G4S-hu-mROO5-vL-[hTCRb-KACIAH]-F-P2A-IgHSP-CD20-vHH2-HCD25-G4S-CD19-hu-mROO5-1-vH-[hTCRa-CSDVP]-F-F2A-PAC | Raji (2.5+), Raji-CD19-KO (5+), Nalm6 (5.5+) |
| CD38, CD19, CD20 | 22 13 4 | 229 49 | CD8SP-CD38-USC1-FHVH-32184-G4S-hu-mROO5-vL-[hTCRb-KACIAH]-F-P2A-IgHSP-CD20-vHH2-HCD25-G4S-CD 19-hu-mROO5-1-vH-[hTCRa-CSDVP]-F-F2A-PAC | Raji (+/-), Raji-CD19-KO (+/-), Raji-CD22-KO (+/), Nalm6 (-), L363 (-), U266 (-), RS411 (-) |
| BCMA, CD19, CD20 | 22135 | 22950 | CD8SP-BCMA-FHVH-93-G4S-hu-mROO5-vL-[hTCRb-S57C]-F-P2A-IgHSP-CD20-VHH-USC1-2HCD26-G4S-CD19-hu-mROO5-1-vH-[hTCRa-T48C-opt]-F-F2A-PAC | Raji (3.5+), Raji-CD19-KO (2.5+), Nalm6 (2.5+), L363 (2+), U266 (3+), RS411 (2+) |
| CD20, CD19, CD20 | 22136 | 22951 | CD8SP-CD20-VHH-2HCD26-USC1-G4S-hu-mROO5-vL-[hTCRb-S57C]-F-P2A-IgHSP-CD20-vHH2-HCD25-G4S-CD19-hu-mROO5-1-vH-[hTCRa-T48C-opt]-F-F2A-PAC | Raji (3+), Raji-CD19-KO (2.5+), Nalm6 (+), L363 (-), U266 (-), RS411 (+) |
| CD38, CD19, CD20 | 22137 | 22952 | CD8SP-CD38-331-vHH-D64E-G4S-hu-mROO5-vL-[hTCRb-KACIAH]-F-P2A-IgHSP-CD20-vHH2-HCD25-G4S-CD 19-hu-mROO5-1-vH-[hTCRa-CSDVP]-F-F2A-PAC | Raji (-), Raji-CD19-KO (-), Nalm6 (-), L363 (-), U266 (-), RS411 (-) |
| CD38, CD19, CD20 | 22138 | 22953 | CD8SP-CD38-331-vHH-S53E-G4S-hu-mROO5-vL-[hTCRb-KACIAH]-F-P2A-IgHSP-CD20-vHH2-HCD25-G4S-CD 19-hu-mROO5-1-vH-[hTCRa-CSDVP]-F-F2A-PAC | Raji (-), Raji-CD19-KO (-), Nalm6 (-), L363 (-), U266 (-), RS411 (-) |
| BCMA, CD20, CD19 | 22139 | 22954 | CD8SP-BCMA-FHVH-93-G4S-hu-mROO5-vL-huTCRg-d5-F-P2A-IgHSP-CD20-vHH2-HCD25-G4S-CD19-hu-mROO5-1-vH-huTCRd-d2-F-F2A-PAC | Raji (2+), Raji-CD19-KO (1.5+), Nalm6 (1.5+), L363 (1.5+), RS411 (2+) |
| BCMA, CD20, CD19 | 22140 | 22955 | CD8SP-BCMA-FHVH-93-G4S-hu-mROO5-vL-IgCL-TCRb-wt2-opt-6MD-F-P2A-IgHSP-CD20-vHH2-HCD25-G4S-CD19-hu-mROO5-1-vH-IgG1-CH1-TCRa-wt2-opt-6MD-F-F2A-PAC | Raji (5+), Raji-CD19-KO (4+), Nalm6 (5+), L363 (2+), RS411 (4+) |
| BCMA, CD19, CD20 | 22141 | 22956 | CD8SP-BCMA-FHVH-93-G4S-hu-mROO5-vL-IgCL-TCRg-6MD-F-P2A-IgHSP-CD20-vHH2-HCD25-G4S-CD19-hu-mROO5-1-vH-IgG1-CH1-TCRd-6MD-F-F2A-PAC | Raji (4+), Raji-CD19-KO (3.5+), Nalm6 (5.5+), L363 (2.5+), RS411 (4+) |
| BCMA, CD38, CD20, CD19 | 22142 | 22957 | CD8SP-BCMA-FHVH-74-G4Sx2-IE-G4Sx2-CD38-309021-FHVH-G4S-hu-mROO5-vL-[hTCRa-CSDVP]-F-F2A-IgHSP-CD20-vHH2-HCD25-G4S-CD19-hu-mROO5-1-vH-[hTCRb-KACIAH]-F-P2A-PAC | Raji (+), Raji-CD19-KO (+), Nalm6 (+), L363 (+/), RS411 (+/-) |
| BCMA, CD38, CD19, CD20 | 22143 | 22958 | CD8SP-BCMA-FHVH-74-G4Sx2-IE-G4Sx2-CD38-309021-FHVH-G4S-hu-mROO5-vL-[hTCRb-KACIAH]-F-P2A-IgHSP-CD20-vHH2-HCD25-G4S-CD19-hu-mROO5-1-vH-[hTCRa-CSDVP]-F-F2A-PAC | Raji (2+), Raji-CD19-KO (1.5+), L363 (2+), L363-CD38-KO (1.5+), RS411 (2+) |
| BCMA, CD22 | 22144 | 22959 | CD8SP-BCMA-Centyrin-G4S-huRFB4-vL-[hTCRb-S57C]-F-P2A-SP-huRFB4-vH-[hTCRa-T48C-opt]-F-F2A-PAC | Raji (+), Raji-CD22-KO (+/-), Nalm6 (+/-), L363 (+), U266 (3+), RS411 (-) |
| BCMA, CD20, CD22 | 22145 | 22960 | CD8SP-BCMA-FHVH-93-G4S-huRFB4-vL-IgCL-TCRg-6MD-F-P2A-IgHSP-CD20-vHH2-HCD25-G4S-huRFB4-vH-IgG1-CH1-TCRd-6MD-F-F2A-PAC | Raji (+/-), Raji-CD19-KO (1.5+), Raji-CD22-KO (2.5+), Nalm6 (+), L363 (1.5+), U266 (2+), RS411 (+) |
| BCMA, CD20, CD22 | 22146 | 22961 | CD8SP-BCMA-FHVH-93-G4S-huRFB4-vL-IgCL-TCRb-wt2-opt-6MD-F-P2A-IgHSP-CD20-vHH2-HCD25-G4S-huRFB4-vH-IgG1-CH1-TCRa-wt2-opt-6MD-F-F2A-PAC | Raji (2+), Raji-CD19-KO (1.5+), Raji-CD22-KO (3+), Nalm6 (+/-), L363 (+), U266 (2+), RS411 (-) |
| BCMA, CD20, CD22 | 22147 | 22962 | CD8SP-BCMA-FHVH-93-G4S-huRFB4-vL-huTCRg-d5-F-P2A-IgHSP-CD20-vHH2-HCD25-G4S-huRFB4-vH-huTCRd-d2-F-F2A-PAC | Raji (+), Raji-CD22-KO (1.5+), Nalm6 (-), L363 (+), U266 (1.5+), RS411 (-) |
| BCMA, CD20, MPL | 22148 | 22963 | CD8SP-BCMA-FHVH-93-G4S-hu-161-2-vL-IgCL-TCRg-6MD-F-P2A-IgHSP-CD20-vHH2-HCD25-G4S-hu-161-2-vH-IgG1-CH1-TCRd-6MD-F-F2A-PAC | Raji (3+), Nalm6 (-), L363 (1.5+), U266 (2.5+), RS411 (-), HEL 92.1.7 (+) |
| BCMA, CD20, MPL | 22149 | 22964 | CD8SP-BCMA-FHVH-93-G4S-hu-161-2-vL-IgCL-TCRb-wt2-opt-6MD-F-P2A-IgHSP-CD20-vHH2-HCD25-G4S-hu-161-2-vH-IgG1-CH1-TCRa-wt2-opt-6MD-F-F2A-PAC | Raji (3+), Nalm6 (-), L363 (+), U266 (3+), RS411 (-), HEL 92.1.7 (+/-) |
| BCMA, CD20, MPL | 22150 | 22965 | CD8SP-BCMA-FHVH-93-G4S-hu-161-2-vL-huTCRg-d5-F-P2A-IgHSP-CD20-vHH2-HCD25-G4S-hu-161-2-vH-huTCRd-d2-F-F2A-PAC | Raji (+), Nalm6 (-), L363 (+/-), U266 (+), RS411 (-), HEL 92.1.7 (-) |
| BCMA, BCMA | 22151 | 22966 | CD8SP-BCMA-Centyrin-G4S-BCMA-hu72-vL-S29G-[hTCRb-S57C]-F-P2A-SP-BCMA-hu72-vH-G32S-[hTCRa-T48C-opt]-F-F2A-PAC | L363 (2+), U266 (4+), RS411 (-) |
| BCMA, BCMA | 22152 | 22967 | CD8SP-BCMA-FHVH-33-G4S-BCMA-hu72-vL-S29G-[hTCRb-S57C]-F-P2A-SP-BCMA-hu72-vH-G32S-[hTCRa-T48C-opt]-F-F2A-PAC | L363 (2+), U266 (4.5+), RS411 (-) |
| BCMA, CD20 | 22153 | 22968 | CD8SP-BCMA-FHVH-93-G4S-BCMA-hu72-vL-S29G-IgCL-TCRg-6MD-F-P2A-IgHSP-CD20-vHH2-HCD25-G4S-BCMA-hu72-vH-G32S-IgG1-CH1-TCRd-6MD-F-F2A-PAC | Raji (2.5+), Nalm6 (1.5+), L363 (2+), RS411 (-) |
| BCMA, CD20 | 22154 | 22969 | CD8SP-BCMA-FHVH-93-G4S-BCMA-hu72-vL-S29G-IgCL-TCRb-wt2-opt-6MD-F-P2A-IgHSP-CD20-vHH2-HCD25-G4S-BCMA-hu72-vH-G32S-IgG1-CH1-TCRa-wt2-opt-6MD-F-F2A-PAC | Raji (4+), Nalm6 (+), L363 (2+), RS411 (-) |
| BCMA, CD20 | 22155 | 22970 | CD8SP-BCMA-FHVH-93-G4S-BCMA-hu72-vL-S29G-huTCRg-d5-F-P2A-IgHSP-CD20-vHH2-HCD25-G4S-BCMA-hu72-vH-G32S-huTCRd-d2-F-F2A-PAC | Raji (2+), Nalm6 (1.5+), L363 (1.5+), RS411 (-) |
| BCMA, CD20 | 22156 | 22971 | CD8SP-BCMA-Centyrin-G4S-CD20-2F2-vL-[hTCRb-S57C]-F-P2A-SP-CD20-2F2-vH-[hTCRa-T48C-opt]-F-F2A-PAC | Raji (1.5+), Nalm6 (-), L363 (+), RS411 (-) |
| BCMA, CD20 | 22157 | 22972 | CD8SP-BCMA-FHVH-33-G4S-CD20-2F2-vL-[hTCRb-S57C]-F-P2A-SP-CD20-2F2-vH-[hTCRa-T48C-opt]-F-F2A-PAC | Raji (+), Nalm6 (+/-), L363 (1.5+), RS411 (-) |
| BCMA, CD20 | 22158 | 22973 | CD8SP-BCMA-FHVH-93-G4S-CD20-2F2-vL-IgCL-TCRb-wt2-opt-6MD-F-P2A-IgHSP-CD20-vHH2-HCD25-G4S-CD20-2F2-vH-IgG1-CH1-TCRa-wt2-opt-6MD-F-F2A-PAC | Raji (3+), Nalm6 (+), L363 (1.5+), RS411 (-) |
| BCMA, CD20 | 22159 | 22974 | CD8SP-BCMA-FHVH-93-G4S-CD20-2F2-vL-huTCRg-d5-F-P2A-IgHSP-CD20-vHH2-HCD25-G4S-CD20-2F2-vH-huTCRd-d2-F-F2A-PAC | Raji (3+), Nalm6 (+/-), L363 (+/-), RS411 (-) |
| BCMA, CD20 | 22160 | 22975 | CD8SP-BCMA-FHVH-93-G4S-HuLuc64-vL-huTCRg-d5-F-P2A-IgHSP-CD20-vHH2-HCD25-G4S-CD19-hu-mROO5-1-vH-huTCRd-d2-F-F2A-PAC | Raji (2+), Raji-CD19-KO (1.5+), Nalm6 (+), L363 (+), U266 (3+), RS411 (-) |
| BCMA, CD20, CD19 | 22161 | 22976 | CD8SP-BCMA-FHVH-93-G4S-hu-mROO5-vL-[hTCRb-S57C]-F-P2A-IgHSP-CD20-VHH-USC1-2HCD26-G4S-CD19-hu-mROO5-1-vH-[hTCRa-T48C-opt]-F-F2A-PAC | Raji (+/-), Raji-CD19-KO (+/-), Nalm6 (+/-), L363 (-), RS411 (-) |
| CD19, PD1 | 22162 | 22977 | CD8SP-CD19-hu-mROO5-1-vL-[hTCRb-S57C]-F-P2A-IgHSP-PD1-vHH-USC-707-G4S-CD19-hu-mROO5-1-vH-[hTCRa-T48C-opt]-F-F2A-PAC | Raji (5.5+), Nalm6 (5+), RS411 (2.5+) |
| CD19, CD20, Album in | 22163 | 22978 | CD8SP-Alb8-vHH-MMP14X3-hu-mROO5-vL-[hTCRb-S57C]-F-P2A-IgHSP-CD20-VHH-USC1-2HCD26-G4S-CD19-hu-mROO5-1-vH-[hTCRa-T48C-opt]-F-F2A-PAC | Raji (4+), Raji-CD19-KO (4.5+), Raji + 5% Human Serum Albumin (2+), Raji + 10% Human Serum Albumin (3+), Raji + 25% Human Serum Albumin (+), |
| CD19, CD 123 | 22164 | 22979 | CD8SP-CD19-hu-mROO5-1-vL-[hTCRb-S57C]-F-P2A-IgHSP-CD123-USC-3-vHH-G4S-CD19-hu-mROO5-1-vH-[hTCRa-T48C-opt]-F-F2A-PAC | Raji (6+), L428 (3+) |
| BCMA, CD20, CD19 | 22165 | 22980 | CD8SP-BCMA-FHVH-93-G4S-hu-mROO5-vL-[hTCRb-S57C]-F-P2A-IgHSP-CD20-VHH-USC1-2HCD26-G4S-CD19-hu-mROO5-1-vH-[hTCRa-T48C-opt]-F-F2A-PAC | Raji (+), L363 (+) |
| MUC1 6, CD19, CD20 | 22166 | 22981 | CD8SP-MUC16-VHH-USC1-R3MU5-G4S-hu-mROO5-vL-[hTCRa-CSDVP]-F-F2A-IgHSP-CD20-vHH2-HCD25-G4S-CD19-hu-mROO5-1-vH-[hTCRb-KACIAH]-F-P2A-PAC | SKOV-3 (2+), Raji (2+), Raji-CD19-KO (2+), Nalm6 (3+), RS411 (2.5+) |
| MUC1 6, CD19, CD20 | 22167 | 22982 | CD8SP-MUC16-VHH-USC2-R3MU5-G4S-hu-mROO5-vL-[hTCRa-CSDVP]-F-F2A-IgHSP-CD20-vHH2-HCD25-G4S-CD19-hu-mROO5-1-vH-[hTCRb-KACIAH]-F-P2A-PAC | SKOV-3 (1.5+), Raji (+), Raji-CD19-KO (+), Nalm6 (1.5+), RS411 (1.5+) |
| IL13R a2, CD19, CD20 | 22168 | 22983 | CD8SP-IL13Ra2-vHH-USC2-C13-G4S-hu-mROO5-vL-[hTCRa-CSDVP]-F-F2A-IgHSP-CD20-vHH2-HCD25-G4S-CD19-hu-mROO5-1-vH-[hTCRb-KACIAH]-F-P2A-PAC | U-87 MG (3.5+), Raji (3+), Raji-CD19-KO (2+), Nalm6 (6+), RS411 (5.5+) |
| IL13R A, CD19, CD20 | 22169 | 22984 | CD8SP-IL13Ra2-vHH-USC1-Cl-G4S-hu-mROO5-vL-[hTCRa-CSDVP]-F-F2A-IgHSP-CD20-vHH2-HCD25-G4S-CD19-hu-mROO5-1-vH-[hTCRb-KACIAH]-F-P2A-PAC | Raji (3+), Raji-CD19-KO (4+), Nalm6 (4.5+), L363 (-), RS411 (2+), U-87 MG (3+) |
| CD19, Fc | 22170 | 22985 | CD8SP-CD19-hu-mROO5-1-vL-[hTCRb-S57C]-F-P2A-IgHSP-CD16A-V158-FL-v2-G4S-CD19-hu-mROO5-1-vH-[hTCRa-T48C-opt]-F-F2A-PAC | Raji (6+), Raji-CD19-KO (-), SKOV-3 (-), SKOV-3 + 1 µg/mL Herceptin (5.5+) |
| CD19, CD20, Fc | 22171 | 22986 | CD8SP-CD16A-V158-G4S-hu-mROO5-vL-[hTCRb-KACIAH]-F-P2A-IgHSP-CD20-vHH2-HCD25-G4S-CD19-hu-mROO5-1-vH-[hTCRa-CSDVP]-F-F2A-PAC | Raji (3.5+), Raji-CD19-KO (3+), Nalm6 (5+), RS411 (4+) |
| CD19, Fc | 22172 | 22987 | CD8SP-CD16A-V158-G4S-hu-mROO5-vL-[hTCRb-S57C]-F-P2A-SP-CD19-hu-mROO5-1-vH-[hTCRa-T48C-opt]-F-F2A-PAC | Raji (4.5+), Raji-CD19-KO (-), Raji-CD19-KO+ Rituximab (2.5+) |
| CD22, CD20, Fc | 22173 | 22988 | CD8SP-CD16A-V158-G4S-huRFB4-vL-[hTCRb-KACIAH]-F-P2A-IgHSP-CD20-vHH2-HCD25-G4S-huRFB4-vH-[hTCRa-CSDVP]-F-F2A-PAC | Raji (3+), Raji-CD19-KO (2+), Raji-CD22-KO (3+), Nalm6 (+), L363 (-), SKOV-3 (-), Raji-CD19-KO + Rituximab (2+), SKOV-3 + Herceptin (4+) |
| BCMA, CD19, Fc | 22174 | 22989 | CD8SP-BCMA-FHVH-93-G4S-hu-mROO5-vL-[hTCRb-S57C]-F-P2A-IgHSP-CD16A-V158-FL-v2-G4S-CD19-hu-mROO5-1-vH-[hTCRa-T48C-opt]-F-F2A-PAC | Raji (3.5+), Raji-CD19-KO (1.5+), Nalm6 (3+), L363 (2.5+), U266 (3+), RS411 (2+), SKOV-3 (-), Raji-CD19-KO + Rituximab (2+), Raji-CD19-KO Herceptin (1.5+), SKOV-3 + Herceptin (4+) |
| CD20, CD19, Fc | 22175 | 22990 | CD8SP-CD20-VHH-2HCD26-USC1-G4S-hu-mROO5-vL-[hTCRb-S57C]-F-P2A-IgHSP-CD16A-V158-FL-v2-G4S-CD19-hu-mROO5-1-vH-[hTCRa-T48C-opt]-F-F2A-PAC | Raji (5+), Raji-CD19-KO (4.5+), Nalm6 (4+), L363 (-), RS411 (2.5+), SKOV-3 (-), Raji-CD19-KO + Rituximab (3.5+), Raji-CD19-KO Herceptin (4+), SKOV-3 + Herceptin (4+) |
| CD20, Fc | 22176 | 22991 | CD8SP-CD16A-V158-G4S-CD20-2F2-vL-[hTCRb-KACIAH]-F-P2A-IgHSP-CD20-vHH2-HCD25-G4S-CD20-2F2-vH-[hTCRa-CSDVP]-F-F2A-PAC | Raji (3+), Nalm6 (+), SKOV-3 (-), SKOV-3 + Herceptin (4+) |
| CD19, CD20, NKG2 D-L | 22177 | 22992 | CD8SP-NKG2D-G4Sx3-NKG2D-G4S-hu-mROO5-vL-[hTCRb-KACIAH]-F-P2A-IgHSP-CD20-vHH2-HCD25-G4S-CD 19-hu-mROO5-1-vH-[hTCRa-CSDVP]-F-F2A-PAC | Raji (2.5+), Raji-CD19-KO (2+), Nalm6 (3+), L363 (+), SKOV-3 (2+) |
| PSMA, CD20, CD19 | 22178 | 22993 | CD8SP-PSMA71-chVH-G4S-hu-mROO5-vL-[hTCRb-KACIAH]-F-P2A-IgHSP-CD20-vHH2-HCD25-G4S-CD19-hu-mROO5-1-vH-[hTCRa-CSDVP]-F-F2A-PAC | Raji (4.5+), Raji-CD19-KO (5+), Nalm6 (5+), L363 (+/-), RS411 (+), LNCaP (5+) |
| CD19, PSMA | 22179 | 22994 | CD8SP-CD19-hu-mROO5-1-vL-[hTCRa-CSDVP]-F-F2A-PSMA28v2-chVH-G4S-CD19-hu-mROO5-1-vH-[hTCRb-KACIAH]-F-P2A-PAC | Raji (5+), Raji-CD19-KO (-), L363 (+/-), RS411 (+), LNCaP (6+) |
| CD19, PSMA | 22180 | 22995 | CD8SP-CD19-hu-mROO5-1-vL-[hTCRb-KACIAH]-F-P2A-IgHSP-PSMA28v2-chVH-G4S-CD19-hu-mROO5-1-vH-[hTCRa-CSDVP]-F-F2A-PAC | Raji (5+), Raji-CD19-KO (+/-), L363 (+/-), RS411 (+), LNCaP (7+) |
| CD19, PSMA | 22181 | 22996 | CD8SP-CD19-hu-mROO5-1-vL-[hTCRb-S57C]-F-P2A-PSMA28v2-chVH-G4S-CD19-hu-mROO5-1-vH-[hTCRa-T48C-opt]-F-F2A-PAC | Raji (5+), Raji-CD19-KO (-), LNCaP (4+) |
| PSMA, CD19 | 22182 | 22997 | CD8SP-PSMA-USC76-chVH-G4S-hu-mROO5-vL-[hTCRb-S57C]-F-P2A-SP-CD19-hu-mROO5-1-vH-[hTCRa-T48C-opt]-F-F2A-PAC | Raji (5+), LNCaP (3.5+) |
| PSMA, CD19 | 22183 | 22998 | CD8SP-PSMA-USC104-chVH-G4S-hu-mROO5-vL-[hTCRb-S57C]-F-P2A-SP-CD19-hu-mROO5-1-vH-[hTCRa-T48C-opt]-F-F2A-PAC | Raji (5+), LNCaP (3.5+) |
| PSMA, CD19 | 22184 | 22999 | CD8SP-PSMA-USC101-chVH-G4S-hu-mROO5-vL-[hTCRb-S57C]-F-P2A-SP-CD19-hu-mROO5-1-vH-[hTCRa-T48C-opt]-F-F2A-PAC | Raji (3.5+), LNCaP (3.5+) |
| CD19, PSMA | 22185 | 23000 | CD8SP-CD19-hu-mROO5-1-vL-[hTCRb-S57C]-F-P2A-IgHSP-PSMA-USC-30-chVH-G4S-CD19-hu-mROO5-1-vH-[hTCRa-T48C-opt]-F-F2A-PAC | Raji (5+), LNCaP (5+), Huh 7 (+), KMH2 (+/-) |
| CD19, PSMA | 22186 | 23001 | CD8SP-CD19-hu-mROO5-1-vL-[hTCRb-S57C]-F-P2A-IgHSP-PSMA-USC-29-chVH-G4S-CD19-hu-mROO5-1-vH-[hTCRa-T48C-opt]-F-F2A-PAC | Raji (2+), LNCaP (5+), Huh 7 (2+), KMH2 (2+) |
| CD19, PSMA | 22187 | 23002 | CD8SP-CD19-hu-mROO5-1-vL-IgCL-TCRb-wt2-opt-6MD-F-P2A-PSMA28v2-chVH-G4S-CD19-hu-mROO5-1-vH-IgG1-CH1-TCRa-wt2-opt-6MD-F-F2A-PAC | Raji (4+), Raji-CD19-KO (4.5+), LNCaP (4+) |
| CD19, PSMA | 22188 | 23003 | CD8SP-CD19-hu-mROO5-1-vL-huTCRg-d5-F-P2A-PSMA28v2-chVH-G4S-CD19-hu-mROO5-1-vH-huTCRd-d2-F-F2A-PAC | Raji (2.5+), Raji-CD19-KO (-), Nalm6 (2+), LNCaP (3+) |
| CD19, PSMA | 22189 | 23004 | CD8SP-CD19-hu-mROO5-1-vL-[hTCRb-S57C-opt]-F-P2A-PSMA28v2-chVH-G4S-CD19-hu-mROO5-1-vH-IgG1-CH1-TCRa-wt2-opt-6MD-F-F2A-PAC | Raji (1.5+), Raji-CD19-KO (-), Nalm6 (+), LNCaP (+) |
| CD19, PSMA | 22190 | 23005 | CD8SP-CD19-hu-mROO5-1-vL-[hTCRb-S57C-opt]-F-P2A-IgHSP-PSMA28v2-chVH-G4S-CD19-hu-mROO5-1-vH-IgG1-CH1-TCRa-wt2-opt-6MD-F-F2A-PAC | Raji (3+), Raji-CD19-KO (2+), Nalm6 (+), LNCaP (5+) |
| CD19, Cl channel | 22191 | 23006 | CD8SP-CD19-hu-mROO5-1-vL-[hTCRb-S57C]-F-P2A-IgHSP-CLTX23-G4S-CD19-hu-mROO5-1-vH-[hTCRa-T48C-opt]-F-F2A-PAC | Raji (3+), Raji-CD19-KO (-), Nalm6 (4+), L363 (-), RS411 (2+) |
| CD19, CD20, Cl Channel | 22192 | 23007 | CD8SP-CLTX-G4S-hu-mROO5-vL-[hTCRa-CSDVP]-F-F2A-IgHSP-CD20-vHH2-HCD25-G4S-CD19-hu-niROO5-1-vH-[hTCRb-KACIAH]-F-P2A-PAC | Raji (4+), Raji-CD19-KO (2.5+), Nalm6 (+), L363 (-), RS411 (3+) |
| CD19, Cl Channel | 22193 | 23008 | CD8SP-CD19-hu-mROO5-1-vL-[hTCRb-S57C]-F-P2A-IgHSP-CLTX23-G4S-CD19-hu-mROO5-1-vH-[hTCRa-T48C-opt]-F-F2A-PAC | Raji (+), Raji-CD19-KO (-), Nalm6 (+), L363 (-), RS411 (-) |
| CD22, HER2 | 22194 | 23009 | CD8SP-CD22-FHVH-24-IgCL-TCRg-6MD-F-P2A-Her2-affi-IgG1-CH1-TCRd-6MD-F-F2A-PAC | SKOV-3 (-), MCF-7 (-), Raji (4+) |
| CD19, HER2 | 22195 | 23010 | CD8SP-CD19-hu-mROO5-1-vL-[hTCRb-S57C]-F-P2A-IgHSP-Her2-Dar1-G4S-CD19-hu-mROO5-1-vH-[hTCRa-T48C-opt]-F-F2A-PAC | Raji (4+), Raji-CD19-KO (-), Nalm6 (7+), L363 (-), SKOV-3 (4+), MCF-7 (5.5+), MDA-MB-231 (5.5+), PC-3 (6+) |
| CD19, HER2 | 22196 | 23011 | CD8SP-CD19-hu-mROO5-1-vL-[hTCRb-S57C]-F-P2A-IgHSP-Her2-47D5-vHH-G4S-CD19-hu-mROO5-1-vH-[hTCRa-T48C-opt]-F-F2A-PAC | Raji (3.5+), Raji-CD19-KO (-), SKOV-3 (7+) |
| CD19, HER2 | 22197 | 23012 | CD8SP-CD19-hu-mROO5-1-vL-[hTCRb-S57C]-F-P2A-IgHSP-Her2-Dar1-G4S-CD19-hu-mROO5-1-vH-[hTCRa-T48C-opt]-F-F2A-PAC | Raji (2+), Raji-CD19-KO (-), SKOV-3 (5+) |
| HER3, BCMA | 22198 | 23013 | Her3-affi-IgCL-TCRg-6MD-F-P2A-Bcu-IgHSP-BCMA-FHVH-93-IgG1-CH1-TCRd-6MD-F-F2A-PAC | SKOV-3 (3+), MCF-7 (5.5+), L363 (2.5+) |
| CD19, HER3 | 22199 | 23014 | CD8SP-CD19-hu-mROO5-1-vL-[hTCRb-S57C]-F-P2A-IgHSP-Her3-AFFI-G4S-CD19-hu-mROO5-1-vH-[hTCRa-T48C-opt]-F-F2A-PAC | Raji (5+), Raji-CD19-KO (-), Nalm6 (7+), L363 (-), SKOV-3 (-) |
| MIR1, CD20 | 22200 | 23015 | MC7G5-TCRb-Vb-[hTCRb-S57C]-F-P2A-IgHSP-CD20-vHH2-HCD25-G4S-MC7G6-TCRa-Va-[hTCRa-T48C-opt]-F-F2A-PAC | Raji (+), Nalm6 (-), L363 (-), RS411 (-) |
| BCMA, CD20, HMB-PP | 22201 | 23016 | CD8SP-BCMA-FHVH-93-G4S-TCR-Vg9-F-P2A-IgHSP-CD20-vHH2-HCD25-G4S-TCR-Vd2-F-F2A-PAC | Raji (2.5+), Raji-CD19-KO (2+), Nalm6 (+/-), L363 (1.5+), RS411 (-) |
| CD20, HMB-PP | 22202 | 23017 | CD8SP-TCR-Vg9-F-P2A-IgHSP-CD20-vHH2-HCD25-G4S-TCR-Vd2-F-F2A-PAC | Raji (3+) |
| BCMA, CD20 | 22203 | 23018 | CD8SP-BCMA-FHVH-93-G4S-hu-mROO5-vL-[hTCRb-KACIAH]-F-P2A-IgHSP-CD20-vHH2-HCD25-G4S-Her2-huMab4D5-D98W-vH-[hTCRa-CSDVP]-F-F2A-PAC | SKOV-3 (-), Raji (4.5+), L363 (4+) |
| CD20 | 22204 | 23019 | CD8SP-CD19-hu-mROO5-1-vL-[hTCRa-CSDVP]-F-F2A-IgHSP-CD20-vHH2-HCD25-G4S-Her2-huMab4D5-D98W-vH-[hTCRb-KACIAH]-F-P2A-PAC | SKOV-3 (-), Raji (3+) |
| CD20 | 22205 | 23020 | MC7G5-TCRb-Vb-[hTCRb-S57C]-F-P2A-IgHSP-CD20-vHH2-HCD25-G4S-CD 19-hu-mROO5-1-vH-[hTCRa-T48C-opt]-F-F2A-PAC | Raji (5+) |
| BCMA, CD20 | 22206 | 23021 | CD8SP-BCMA-FHVH-93-G4S-hu-mROO5-vL-[hTCRb-S57C]-F-P2A-IgHSP-CD20-VHH-USC1-2HCD26-G4S-AFP-Va-14-3-AI-[hTCRa-T48C]-F-F2A-PAC | Raji (6+) |
| CD19 | 22207 | 23022 | CD8SP-CD19-hu-mROO5-1-vL-IgCL-TCRg-6MD-F-P2A-SP-CD19-hu-mROO5-1-vH-huTCR-delta-F-F2A-PAC | Raji (5+) |

### SAR Constructs Comprising Epitopes

[0831] A panel of unispecific, bispecific and multispecific SAR constructs comprising one or more epitope tags joined to the N-terminus domain of the encoded antigen binding domains (e.g., vL, vH, AABD etc.) via a short flexible Gly-Ser linker or protease cleavable linkers (Table 19) were generated. The SEQ ID of these exemplary constructs are providedd in the Table 47. The constructs were expressed in JNG cells and showed significant activity upon exposure to their target antigen expressing cells, thereby demonstrating that the attachment of the epitope tag does not interfere with antigen binding ability of the antigen binding domains. More importantly many constructs showed binding to Rituximab as measured by flow cytometry and reduced survival when cultured with Rituximab in the absence and in the presence of complement. Similarly, the construct with SEQ ID NO: 22247 and 22248 and showed binding to Herceptin as measured by flow cytometry. JNG cells expressing the constructs with SEQ ID NO: 22247 and 22248 showed cytotoxicity when exposed to Herceptin (Trastuzumab), T-DM1 (Kadcyla. Trastuzumab emtansine) and Enhertu. The immune cells expressing Ritx2 epitope tagged SARs (SEQ ID NO: 22209) are purified using flow cytometry and or MACS using Rituximab. The immune cells expressing Herceptin mimotag tagged SARs (SEQ ID NO: 22247 and 22248) are purified using flow cytometry and or MACS using Herceptin. Furthermore, immune cells (e.g., T cells) expressing SARs (SEQ ID NO: 22247 and 22248) are depleted upon administration of Herceptin, T-DM1 or Enhertu to the subjects reconstituted with these SAR-expressing cells. The dose and frequency of administration of these antibodies is known in the art

TABLE 47

UNISPECIFIC, BISPECIFIC AND BIPARATOPIC SARs WITH EPITOPE TAGS AND PROTEASE CLEAVABLE LINKERS

| ANTIGEN | SEQ ID NO (DNA) | SEQ ID NO (PRT) | Constructs Name | NFAT-GFP ASSAY |
|---|---|---|---|---|
| CD19, CD20 | 22209 | 23024 | CD8SP-RitX2-G4S-hu-mROO5-vL-[hTCRb-KACIAH]-F-P2A-IgHSP-CD20-vHH2-HCD25-G4S-CD19-hu-mROO5-1-vH-[hTCRa-CSDVP]-F-F2A-PAC | Raji (2+), Raji-CD19-KO (1.5+),Nalm6 (2+) |
| CD19, CD20 | 22210 | 23025 | CD8SP-Herceptin-Mimotag-G4S-hu-mROO5-vL-[hTCRb-KACIAH]-F-P2A-IgHSP-CD20-vHH2-HCD25-G4S-CD 19-hu-mROO5-1-vH-[hTCRa-CSDVP]-F-F2A-PAC | Raji (2+), Raji-CD19-KO (1.5+),Nalm6 (+) |
| CD19 | 22211 | 23026 | CD8SP-CD19-hu-mROO5-1-vL-[hTCRb-S57C]-F-P2A-IgHSP-Herceptin-Mimotag-G4S-CD19-hu-mROO5-1-vH-[hTCRa-T48C-opt]-F-F2A-PAC | Raji (2+), Raji-CD19-KO (-) |
| CD19, CD20 | 22212 | 23027 | CD8SP-R8-G4S-hu-mROO5-vL-[hTCRb-KACIAH]-F-P2A-IgHSP-CD20-vHH2-HCD25-G4S-CD19-hu-mROO5-1-vH-[hTCRa-CSDVP]-F-F2A-PAC | Raji (6+), Raji-CD19-KO (6+) |
| CD19, CD20 | 22213 | 23028 | CD8SP-RitX2-MMP14-1-hu-mROO5-vL-[hTCRb-KACIAH]-F-P2A-IgHSP-CD20-vHH2-HCD25-G4S-CD19-hu-mROO5-1-vH-[hTCRa-CSDVP]-F-F2A-PAC | Raji (1.5+) |
| CD19, CD20 | 22214 | 23029 | CD8SP-RitX2-MMP9x2-hu-mROO5-vL-[hTCRb-KACIAH]-F-P2A-IgHSP-CD20-vHH2-HCD25-G4S-CD19-hu-mROO5-1-vH-[hTCRa-CSDVP]-F-F2A-PAC | Raji (+) |
| CD19, CD20 | 22215 | 23030 | CD8SP-RitX2-Cathepsin-S-hu-mROO5-vL-[hTCRb-KACIAH]-F-P2A-IgHSP-CD20-vHH2-HCD25-G4S-CD19-hu-mROO5-1-vH-[hTCRa-CSDVP]-F-F2A-PAC | Raji (3+), Raji-CD19-KO (3+) |
| CD19, CD20 | 22216 | 23031 | CD8SP-Herceptin-Mimotag-MMP9x2-hu-mROO5-vL-[hTCRb-KACIAH]-F-P2A-IgHSP-CD20-vHH2-HCD25-G4S-CD 19-hu-mROO5-1-vH-[hTCRa-CSDVP]-F-F2A-PAC | Raji (4.5+) |
| BCMA, CD19, CD20 | 22217 | 23032 | CD8SP-BCMA-FHVH-93-Cathepsin-S-hu-mROO5-vL-[hTCRb-KACIAH]-F-P2A-IgHSP-CD20-VHH-USC1-2HCD26-G4S-CD19-hu-mROO5-1-vH-[hTCRa-T48C-opt]-F-F2A-PAC | Raji (+), Raji-CD19-KO (3+), Nalm6 (4+), L363 (3+), U266 (4+), RS411 (1.5+) |
| CD19, CD20 | 22218 | 23033 | CD8SP-R5pLtag-G4S-hu-mROO5-vL-[hTCRb-KACIAH]-F-P2A-IgHSP-CD20-vHH2-HCD25-G4S-CD19-hu-mROO5-1-vH-[hTCRa-CSDVP]-F-F2A-PAC | Raji (3+) |
| CD19 | 22219 | 23034 | CD8SP-CD19-hu-mROO5-1-vL-[hTCRb-S57C]-F-P2A-IgHSP-R8-G4S-CD19-hu-mROO5-1-vH-[hTCRa-T48C-opt]-F-F2A-PAC | Raji (+/-) |
| BCMA, CD19, CD20 | 22220 | 23035 | CD8SP-BCMA-FHVH-93-MMP14-1-hu-mROO5-vL-[hTCRb-KACIAH]-F-P2A-IgHSP-CD20-VHH-USC1-2HCD26-G4S-CD19-hu-mROO5-1-vH-[hTCRa-T48C-opt]-F-F2A-PAC | Raji (-), Raji-CD19-KO (+), Nalm6 (+/-), L363 (+/-), U266 (+), RS411 (-) |
| BCMA, CD20, CD19 | 22221 | 23036 | CD8SP-BCMA-FHVH-93-MMP9x2-hu-mROO5-vL-[hTCRb-KACIAH]-F-P2A-IgHSP-CD20-VHH-USC1-2HCD26-G4S-CD19-hu-mROO5-1-vH-[hTCRa-T48C-opt]-F-F2A-PAC | Raji (-), Raji-CD19-KO (1.5+), Nalm6 (+), L363 (+), U266 (2+), RS411 (+) |
| CD19, CD20 | 22222 | 23037 | CD8SP-Herceptin-Mimotag-Cathepsin-S-hu-mROO5-vL-[hTCRb-KACIAH]-F-P2A-IgHSP-CD20-vHH2-HCD25-G4S-CD19-hu-mROO5-1-vH-[hTCRa-CSDVP]-F-F2A-PAC | Raji (2+) |
| CD19 | 22223 | 23038 | CD8SP-CD19-hu-mROO5-1-vL-[hTCRb-S57C]-F-P2A-IgHSP-Herceptin-Mimotag-MMP1-CD19-hu-mROO5-1-vH-[hTCRa-T48C-opt]-F-F2A-PAC | Raji (3+) |
| CD19, BCMA | 22224 | 23039 | CD8SP-CD19-hu-mROO5-1-vL-[hTCRb-S57C]-F-P2A-IgHSP-BCMA917-vHH-E59D-MMP14-2-CD19-hu-mROO5-1-vH-[hTCRa-T48C-opt]-F-F2A-PAC | Raji (+), Raji-CD19-KO (2+), Nalm6 (2.5+), L363 (2+), U266 (4+), RS411 (1.5+) |
| CD19, BCMA | 22225 | 23040 | CD8SP-CD19-hu-mROO5-1-vL-[hTCRb-S57C]-F-P2A-IgHSP-BCMA917-vHH-E59D-MMP1-CD19-hu-mROO5-1-vH-[hTCRa-T48C-opt]-F-F2A-PAC | Raji (1.5+), Raji-CD19-KO (4+), Nalm6 (3+), L363 (3+), U266 (5+), RS411 (2+) |
| BCMA, CD20, CD19 | 22226 | 23041 | CD8SP-BCMA-FHVH-93-MMP9x2-hu-mROO5-vL-[hTCRb-KACIAH]-F-P2A-IgHSP-CD20-VHH-USC1-2HCD26-G4S-CD19-hu-mROO5-1-vH-[hTCRa-T48C-opt]-F-F2A-PAC | Raji (+/-), Raji-CD19-KO (1.5+), Nalm6 (+), L363 (+), U266 (2.5+), RS411 (+/-) |
| CD19 | 22227 | 23042 | CD8SP-CD19-hu-mROO5-1-vL-[hTCRb-S57C]-F-P2A-IgHSP-Herceptin-Mimotag-MMP14-2-CD19-hu-mROO5-1-vH-[hTCRa-T48C-opt]-F-F2A-PAC | Raji (4+) |
| CD19 | 22228 | 23043 | CD8SP-CD19-hu-mROO5-1-vL-[hTCRb-S57C]-F-P2A-IgHSP-R5pL-tag-G4S-CD19-hu-mROO5-1-vH-[hTCRa-T48C-opt]-F-F2A-PAC | Raji (2+) |
| BCMA, CD19, CD20 | 22229 | 23044 | CD8SP-BCMA-FHVH-93-MMP14-1-hu-mROO5-vL-[hTCRb-KACIAH]-F-P2A-IgHSP-CD20-VHH-USC1-2HCD26-G4S-CD19-hu-mROO5-1-vH-[hTCRa-T48C-opt]-F-F2A-PAC | Raji (3+), Raji-CD19-KO (5+), Nalm6 (3.5+), L363 (3.5+), U266 (6+), RS411 (2+) |
| CD19 | 22230 | 23045 | CD8SP-CD19-hu-mROO5-1-vL-[hTCRb-S57C]-F-P2A-IgHSP-R5pLx2-Qbend-G4S-CD19-hu-mROO5-1-vH-[hTCRa-T48C-opt]-F-F2A-PAC | Raji (4+), Raji-CD19-KO (-) |
| CD19, CD20 | 22231 | 23046 | CDSSP-Herceptin-Mimotag-MMP14-1-hu-mROO5-vL-[hTCRb-KACIAH]-F-P2A-IgHSP-CD20-vHH2-HCD25-G4S-CD19-hu-mROO5-1-vH-[hTCRa-CSDVP]-F-F2A-PAC | Raji (3.5+), Raji-CD19-KO (4.5+) |
| CD19 | 22233 | 23048 | CD8SP-CD19-hu-mROO5-1-vL-[hTCRb-S57C]-F-P2A-IgHSP-RitX2-G4S-CD19-hu-mROO5-1-vH-[hTCRa-T48C-opt]-F-F2A-PAC | Raji (2.5+) |
| CD19 | 22234 | 23049 | CD8SP-CD19-hu-mROO5-1-vL-[hTCRb-S57C]-F-P2A-IgHSP-HercepMimotopx3-citux-Mimotope 1-G4S-CD19-hu-mROO5-1-vH-[hTCRa-T48C-opt]-F-F2A-PAC | Raji (+/-) |
| CD19 | 22235 | 23050 | CD8SP-CD19-hu-mROO5-1-vL-[hTCRb-S57C]-F-P2A-IgHSP-Panitumab-tag1-G4S-CD19-hu-mROO5-1-vH-[hTCRa-T48C-opt]-F-F2A-PAC | Raji (6+) |
| CD19 | 22236 | 23051 | CD8SP-CD19-hu-mROO5-1-vL-[hTCRb-S57C]-F-P2A-IgHSP-Panitumab-tag2-citux-Mimotope 1-G4S-CD19-hu-mROO5-1-vH-[hTCRa-T48C-opt]-F-F2A-PAC | Raji (4+) |
| CD19 | 22237 | 23052 | CD8SP-CD19-hu-mROO5-1-vL-[hTCRb-S57C]-F-P2A-IgHSP-Panitumab-tag3-citux-Mimotope 1-G4S-CD19-hu-mROO5-1-vH-[hTCRa-T48C-opt]-F-F2A-PAC | Raji (5+) |
| CD19, CD20 | 22238 | 23053 | CD8SP-CD19-hu-mROO5-1-vL-[hTCRb-S57C]-F-P2A-IgH-SP-IgSP-HercepMimotopx3-CD20-VHH-USC1-2HCD26-G4S-CD19-hu-mROO5-1-vH-[hTCRa-T48C-opt]-F-F2A-PAC | Raji (+) |
| CD19 | 22239 | 23054 | CD8SP-RitX2-G4S-hu-mROO5-1-vL-[hTCRb-S57C]-F-P2A-IgHSP-Herceptin-Mimotag-G4S-CD19-hu-mRO05-1-vH-[hTCRa-T48C-opt]-F-F2A-PAC | Raji (+) |
| CD19 | 22240 | 23055 | CD8SP-CD19-hu-mROO5-1-vL-[hTCRb-S57C]-F-P2A-IgSP-RituxGAtag-Herceptin-Mimotag-G4S-CD19-hu-mROO5-1-vH-[hTCRa-T48C-opt]-F-F2A-PAC | Raji (3+) |
| CD19 | 22241 | 23056 | CD8SP-CD19-hu-mROO5-1-vL-[hTCRb-S57C]-F-P2A-IgHSP-RitxGA4-G4S-CD19-hu-mROO5-1-vH-[hTCRa-T48C-opt]-F-F2A-PAC | Raji (4+) |
| CD19 | 22242 | 23057 | CD8SP-CD19-hu-mROO5-1-vL-[hTCRb-S57C]-F-P2A-IgHSP-Cituximab-mimotopx2-G4S-CD19-hu-mROO5-1-vH-[hTCRa-T48C-opt]-F-F2A-PAC | Raji (5.5+) |
| CD19-CD20-Rituximab | 22243 | 23058 | CD8SP-R5pL-tag-G4S-hu-mROO5-vL-[hTCRb-KACIAH]-F-P2A-IgHSP-CD20-vHH2-HCD25-G4S-CD19-hu-mROO5-1-vH-[hTCRa-CSDVP]-F-F2A-PAC | Raji (3+) |
| CD 19-Rituximab | 22244 | 23059 | CD8SP-CD19-hu-mROO5-1-vL-[hTCRb-S57C]-F-P2A-IgHSP-R8-G4S-CD19-u-mROO5-1-vH-[hTCRa-T48C-opt]-F-F2A-PAC | Raji (+/-) |
| BCMA-CD19 | 22245 | 23060 | CD8SP-BCMA-FHVH-93-MMP14-1-hu-mROO5-vL-[hTCRb-KACIAH]-F-P2A-IgHSP-CD20-VHH-USC1-2HCD26-G4S-CD19-hu-mROO5-1-vH-[hTCRa-T48C-opt]-F-F2A-PAC | Raji (-), Raji-CD19-KO (+), Nalm6 (+/-), L363 (+/-), U266 (+), |
| BCMA-CD20 | 22246 | 23061 | CD8SP-BCMA-FHVH-93-MMP9x2-hu-mROO5-vL-[hTCRb-KACIAH]-F-P2A-IgHSP-CD20-VHH-USC1-2HCD26-G4S-CD19-hu-mROO5-1-vH-[hTCRa-T48C-opt]-F-F2A-PAC | Raji (-), Raji-CD19-KO (1.5+), Nalm6 (+), L363 (+), U266 (2+) |
| CD19-Herceptin | 22247 | 23062 | CD8SP-Herceptin-Mimotag-Cathepsin-S-hu-mROO5-vL-[hTCRb-KACIAH]-F-P2A-IgHSP-CD20-vHH2-HCD25-G4S-CD19-hu-mROO5-1-vH-[hTCRa-CSDVP]-F-F2A-PAC | Raji (2+) |
| CD 19-HER2 | 22248 | 23063 | CD8SP-CD19-hu-mROO5-1-vL-[hTCRb-S57C]-F-P2A-IgHSP-Herceptin-Mimotag-MMP1-CD19-hu-mROO5-1-vH-[hTCRa-T48C-opt]-F-F2A-PAC | Raji (3+) |
| CD 19-BCMA | 22249 | 23064 | CD8SP-CD19-hu-mROO5-1-vL-[hTCRb-S57C]-F-P2A-IgHSP-BCMA917-vHH-E59D-MMP14-2-CD19-hu-mROO5-1-vH-[hTCRa-T48C-opt]-F-F2A-PAC | Raji (+), Raji-CD19-KO (2+), Nalm6 (2.5+), L363 (2+), U266 (4+), RS411 (+) |
| CD 19-BCMA | 22250 | 23065 | CD8SP-CD19-hu-mROO5-1-vL-[hTCRb-S57C]-F-P2A-IgHSP-BCMA917-vHH-E59D-MMP1-CD19-hu-mROO5-1-vH-[hTCRa-T48C-opt]-F-F2A-PAC | Raji (1.5+), Raji-CD19-KO (4+), Nalm6 (3+), L363 (3+), U266 (5+), RS411 (2+) |

### SARS With Adaptor Binding Domains

[0832] A panel of double chain SARs on the backbone of SIR and Ab-TCR constructs were generated comprising different adaptor binding domains. An exemplary SAR construct with SEQ ID NO: 22286 comprised an engineered NKG2D-YA domain attached to the N-terminus of the encoded IgCL fragment of a SAR with the backbone of an Ab-TCR (Table 48). The construct with SEQ ID NO: 22287 encodes an NKG2D-YA-G4Sx3-NKG2D-YA domain attached to the encoded hu-mROO5-1 vH fragment of an Ab-TCR via a G4S linker. The constructs were expressed in JNG cells and showed robust induction of GFP upon exposure to CD19+ and BCMA+ Raji cells. More importantly, JNG cells showed induction of GFP when exposed to LNCaP cells only in the presence of a SAR-adaptor PSMA-USC76-chVH-G4S-ULBP2-S3 (SEQ ID NO: 23114) that comprises a PSMA targeted chVH fused via a G4S linker to a non-natural ULBP2-S3 ligand that binds specifically to NKG2D-YA (Table 48). Essentially similar results were obtained with construct with SEQ ID NO: 22288 (Table 48). However, the construct with SEQ ID NO: 22289 which encodes for NKG2D-YA that is fused directly to TCRb constant chain without an Ig linker failed to show GFP induction in response to PSMA-USC76-chVH-G4S-ULBP2-S3.

[0833] The SAR construct represented by SEQ ID NO: 22292 encodes for a D domain (Afo3) capable of binding to a p26 domain attached to the N-terminus of the encoded vL fragment of a hu-mROO5-1 based SIR. The JNG cells expressing this construct showed robust induction of GFP when exposed to L428 cells (CD123⁺) but only in the presence of SAR adaptor bc40-p26-CD123-cg06 (SEQ ID NO: 23120) that comprises a p26 domain fused to a D domain targeting CD123 (Table 48).

[0834] The bispecific CD19xCD20 SAR construct represented by SEQ ID NO: 22293 also encodes a RZIP leucine zipper domain, which binds to the leucine zippe domain EZIP, that is attached to the N-terminus of the encoded vL fragment of a hu-mR005-1-based CD19-targeted SIR. The construct also encodes for a CD20-VHH-USC1-2HCD26 domain attached to the hu-mROO5-1 vH domain. The JNG cells expressing this construct showed robust induction of GFP when exposed to L363 cells (BCMA⁺) but only in the presence of SAR adaptor BCMA-FHVH-74-EZIP (SEQ ID NO: 23119) that comprises a BCMA-FHVH-74 domain fused to a leucine zipper EZIP domain (Table 48). Furthermore, the JNG cells could be redirected to LNCaP (PSMA+) cells in the presence of the SAR adaptor CD8SP-PSMA-USC76-chVH-EZIP (SEQ ID NO: 23118) (Table 48). Weaker results were obtained with the construct with SEQ ID NO: 22294 in which the RZIP domain is attached directly to a truncated TCR chain [hTCRb-wt-opt2-6MD] with a short GS linker and without an Ig linker or a long linker. These results again demonstrate the requirement for an Ig linker, a variable domain (e.g., vL, vH, Va, Vb, Vg, Vd) or a long linker (>25 amino acids) when an AABD is operationally linked to a TCR constant chain in a SAR.

[0835] The SAR adaptors for the preceding experiments were generated by transient transfection of their respective expression constructs in 293FT cells and supernatants containing the secreted adaptor proteins were collected 48-72 hours post-transfection and frozen until use.

[0836] Additional SAR constructs are generated comprising two or more adaptors that are either attached to two separate chains of a double chain SAR or attached in tandem to one of the chains via an optional short linker (e.g., G4S linker). These constructs are also shown to bind to and respond to their respective target antigen expressing cells in the presence of the appropriate SAR adaptor.

[0837] Additional constructs are generated by fusing one or more adaptors to the N-terminus of an encoded scFv of a 2^{nd} generation CAR, TFPε, TFPγ or TFPδ. These constructs are also shown to bind to and respond to their respective target antigen expressing cells in the presence of their SAR adaptors. These results demonstrate that bispecific and multispecific SARs encoding one or more adaptors (e.g., leucine zipper domains, D domains etc.) can be generated by fusing the adaptor to the N-terminus or near the N-terminus of the vL, vH, Va, Vb, Vg, Vd, scFv, or AABD domains comprising a CAR, SIR, Ab-TCR, AABD-TCR, TFP or TCR.

TABLE 48

SARS WITH ADAPTOR BINDING DOMAINS

| ANTIGEN | SEQ ID NO (DNA) | SEQ ID NO (PRT) | Constructs Name | NFAT-GFP ASSAY |
|---|---|---|---|---|
| CD20-CD19, ULBP2-S3 | 22286 | 23101 | CD8SP-NKG2D-YA-IgCL-TCRg-6MD-F-P2A-IgHSP-CD20-vHH2-HCD25-G4S-CD19-hu-mROO5-1-vH-IgG1-CH1-TCRd-6MD-F-F2A-PAC | Raji (+), LNCaP (-), LNCaP with PSMA-USC76-chVH-G4S-ULBP2-S3 (+) |
| BCMA-CD19, ULBP2-S3 | 22287 | 23102 | CD8SP-BCMA-FHVH-93-G4S-hu-mROO5-vL-IgCL-TCRb-wt2-opt-6MD-F-P2A-IgH-SP-NKG2D-YA-G4Sx3-NKG2D-YA-G4S-CD19-hu-mROO5-1-vH-IgG1-CH1-TCRa-wt2-opt-6MD-F-F2A-PAC | Raji (3+), L363 (+/-), LNCaP (-), LNCaP with PSMA-USC76-chVH-G4S-ULBP2-S3 (+) |
| CD20, ULBP2-S3 | 22288 | 23103 | CD8SP-NKG2D-YA-IgCL-TCRg-6MD-F-P2A-IgHSP-CD20-vHH2-HCD25-G4S-NKG2D-AF-Y119F-IgG1-CH1-TCRd-6MD-F-F2A-PAC | Raji (3+), LNCaP (-), LNCaP with PSMA-USC76-chVH-G4S-ULBP2-S3 (+), |
| ULBP2-S3 | 22289 | 23104 | CD8SP-NKG2D-YA-[hTCRb-S57C]-F-P2A-SP-NKG2D-AF-[hTCRa-T48C-opt]-F-F2A-PAC | Raji (-), LNCaP (-), LNCaP + PSMA-USC76-chVH-G4S-ULBP2-S3 (-), |
| CD19, p26 | 22292 | 23107 | CD8SP-Af03-G4S-hu-mROO5-vL-[hTCRb-S57C]-F-P2A-SP-CD19-hu-mROO5-1-vH-[hTCRa-T48C-opt]-F-F2A-PAC | L428 (-), L428 with bc40-p26-CD123-cg06 (+3) |
| CD19, CD20, RZIP | 22293 | 23108 | CD8SP-CD8SP-R1-Rzip-G4S-hu-mROO5-vL-[hTCRb-S57C]-F-P2A-IgHSP-CD20-VHH-USC1-2HCD26-G4S-CD19-hu-mROO5-1-vH-[hTCRa-T48C-opt]-F-F2A-PAC | LnCAP (-), LnCAP with PSMA-USC76-chVH-EZIP (+5.5), L363 (-), L363 with BCMA-FHVH-74-EZIP (+3) |
| CD22, RZIP | 22294 | 23109 | CD8SP-CD22-FHVH-24-GS-[TCRa-wt-opt2-6MD]-F-F2A-CD8SP-R1-RZip-GS-[hTCRb-wt-opt2-6MD]-F-P2A-PAC | L363 (-), LNCaP (-), LNCaP with PSMA-USC76-chVH-EZIP (+1) |

### SARS Comprising Autoantigens

[0838] An exemplary SAR comprising the autoantigen Dsg3 is CD8SP-Dsg3-EC1-EC2-L693-IgCL-TCRb-wt2-opt-6MD-F-P2A-IgHSP-CD20-vHH2-HCD25-G4S-CD19-hu-mROO5-1-vH-IgG1-CH1-TCRa-wt2-opt-6MD-F-F2A-PAC (SEQ ID NO: 22307). This JNG expressing this SAR construct showed increased GFP induction when exposed to Raji cells expressing a membrane anchored scFv targeting Dsg3 as compared to GFP induction observed with the parental Raji cells. Additional exemplary SAR comprising different domains of Dsg3 are represented by SEQ ID NO: 22308-22312. T cells expressing these SARs are used to deplete Dsg3 autoantibody producing B cells and plasma cells in a patient with pemphigus vulgaris. Similarly, T cells expressing SARs targeting Dsg1 can be generated using the design of the above constructs and can be used to deplete Dsg1 autoantibodies producing B and plasma cells in a subject with pemphigus foliaceus (PF).

### SARs Comprising Ligands

[0839] Exemplary bispecific SARs on the backbone of CD19 targeted SIR and comprising the receptor binding domain of the ligands 4-1BB (SEQ ID NO: 22252) and APRIL (SEQ ID NO: 22253-22254) were generated and expressed in JNG cells. The cells retained the ability to respond to Raji cells (CD19+) upon co-culture as measured by GFP induction.

### SARs Comprising Single Variable Domain of TCR (svd-TCR)

[0840] Exemplary bispecific SARs on the backbone of CD19 targeted SIR and comprising svd-TCR targeting an HLA-A*02:01 in complex with a human NY-ESO-1 157 peptide (SEQ ID NO: 21461) and a MAGE-A2 peptide (SEQ ID NO: 21464) were generated and expressed in JNG cells by transient infection with the corresponding lentiviruses and without further drug selection. The SEQ ID NO of these constructs is represented by SEQ ID NO: 22256-22257 and 22258-22262, respectively. The cells showed the ability to respond to Raji cells (CD19⁺/CD20⁺) and HepG2 cells (HLA-A*02:01/MAGE-A3⁺ and HLA-A*02:01/NY-ESO-1⁺) upon co-culture as measured by GFP induction (Table 49). The cells are also tested for binding to NY-ESO-1 peptide/HLA-A02:01 tetramers and MAGE-A02:01 peptide/HLA-A02:01 tetramers by flow cytometry.

[0841] Additional SAR constructs are generated comprising two or more svd-TCR that are either attached to two separate chains of a double chain SAR or attached in tandem to one of the chains via an optional short linker (e.g., G4S linker). These constructs are also shown to bind to and respond to their respective target antigen expressing cells.

[0842] Additional constructs are generated by fusing one or more svd-TCRs to the N-terminus of an encoded scFv of a 2^{nd} generation CAR, TFPε, TFPγ or TFPδ. These constructs are also shown to bind to and respond to their respective target antigen expressing cells. These results demonstrate that bispecific and multispecific SARs encoding one or more svd-TCR can be generated by fusing the svd-TCR to the N-terminus or near the N-terminus of the vL, vH, Va, Vb, Vg, Vd, scFv, AABD domains comprising a CAR, SIR, Ab-TCR, AABD-TCR, TFP or TCR.

TABLE 49

SARs comprising svd-TCR

| Antigen | SEQ ID NO (DNA) | SEQ ID NO (PRT) | Constructs Name | NFAT-GFP ASSAY |
|---|---|---|---|---|
| CD19, CD20, NY-ESO-1/HLA.A02:01 | 22256 | 23071 | NY-ESO-sVb-TCR-G4Sv2-hu-mROO5-vL-[hTCRb-S57C]-F-P2A-IgHSP-CD20-VHH-USC1-2HCD26-G4S-CD19-hu-mR005-1-vH-[hTCRa-T48C-opt]-F-F2A-PAC | RAJI (+/-), HepG2 (-/⁺) |
| CD19, CD20, NY-ESO-1/HLA.A02 | 22257 | 23072 | NY-ESO-sVb-TCR-G4Sv2-hu-mR005-vL-IgCL-TCRb-wt2-opt-6MD-F-P2A-IgHSP-CD20-vHH2-HCD25-G4S-CD 19-hu-mR005-1-vH-IgGl -CH 1 -TCRa-wt2-opt-6MD-F-F2A-PAC | RAJI (2+), HepG2 (-/⁺) |
| CD19, CD20, MAGE-A3/HLA.A02 | 22258 | 23073 | MAGE-A3-sVb-7-G4Sv3-hu-mR005-vL-[hTCRb-KACIAH]-F-P2A-IgHSP-CD20-vHH2-HCD25-G4S-CD19-hu-mR005-1-vH-[hTCRa-CSDVP]-F-F2A-PAC | RAJI (2.5+), HepG2 (2+) |
| CD19, CD20, MAGE-A3/HLA.A02 | 22259 | 23074 | MAGE-A3-sVb-7-G4Sv3-hu-mR005-vL-[hTCRb-S57C]-F-P2A-IgHSP-CD20-VHH-USC1-2HCD26-G4S-CD19-hu-mR005-1-vH-[hTCRa-T48C-opt]-F-F2A-PAC | RAJI (-/+), HepG2 (2+) |
| CD19, CD20, MAGE-A3/HLA.A02 | 22260 | 23075 | MAGE-A3-sVb-7-G4Sv3-hu-mR005-vL-IgCL-TCRg-6MD-F-P2A-IgHSP-CD20-vHH2-HCD25-G4S-CD19-hu-mR005-1-vH-IgG1-CH1-TCRd-6MD-F-F2A-PAC | RAJI (-/+), HepG2 (1.5+) |
| CD19, CD20, MAGE-A3/HLA.A02:01 | 22261 | 23076 | MAGE-A3-sVb-7-G4Sv3-hu-mR005-vL-IgCL-TCRb-wt2-opt-6MD-F-P2A-IgHSP-CD20-vHH2-HCD25-G4S-CD 19-hu-mR005-1-vH-IgG1-CH1-TCRa-wt2-opt-6MD-F-F2A-PAC | RAJI (+), HepG2 (1+) |
| CD19, CD20, MAGE-A3/HLA.A02:01 | 22262 | 23077 | MAGE-A3-sVb-7-G4Sv3-hu-mR005-vL-huTCRg-d5-F-P2A-IgHSP-CD20-vHH2-HCD25-G4S-CD19-hu-mROO5-1-vH-huTCRd-d2-F-F2A-Pac | RAJI (+), HepG2 (1.5+) |

### Expression of Bispecific and Multispecific SAR on the Backbones of SIR, cTCR, AABD-TCR, Ab-TCR and TFPαβ in T Cells with Impaired TCRα or TCRβ Expression

[0843] The SAR constructs on SIR, AABD-TCR and Ab-TCR backbones are also expressed in JNG cells in which the expression of TCRα, TCRβ or both has been eliminated by CRISPR/Cas9 mediated gene knock-out. In contrast to the results with SARs on the TFP backbone, it is observed that the SAR constructs on the above backbones are effectively expressed on the surface of TCRα-/-, TCRβ-/- and TCRα-/-β-/- cells at similar or higher levels as observed in the wild-type JNG cells and have robust signaling ability when exposed to their target antigen expressing cells. Essentially similar results are obtained when the SAR constructs on the SIR, cTCR, AABD-TCR, Ab-TCR and TFPαβ backbones are inserted at the TRAC or TRBC genomic loci so that they are expressed under the promoter and regulatory elements of endogenous TCRα or TCRβ genes. The insertion of SAR constructs at the TRAC and TRBC loci, which results in simultaneous disruption of these genes, is achieved using gene targeting as described in described in Knipping F et al, Molecular Therapy: Methods & Clinical Development, Vol 4, 2017 and Eyquem J et al Nature, 543(7643):113-117, 2017, respectively. An exemplary targeting construct to direct the SAR to the TRAC locus is represented by SEQ ID NO: 23. Additional targeting constructs can be generated by replacing the module encoding the SAR in this construct with module encoding a different SAR on the SIR, cTCR, Ab-TCR, AABD-TCR, TFPαβ, TFPγδ and TCR backbones using techniques known in the art. In vitro and in vivo analysis of Bispecific and multispecifc

### In Vitro and In Vivo Analysis of Bispecific and Multispecifc SARs

[0844] A panel of bispecific and multispecific SAR constructs (SEQ ID NO: 22098, 22104-22108, 22165) are expressed in T cells and tested for in vitro cytotoxicity against RAJI, RAJI-CD19-KO, NALM6 and HL60 cells. The unispecific SAR constructs with SEQ ID NO: 22101-22103 are used as controls. The bispecific and multispecific constructs are shown to possess robust cytotoxicity against both CD19+ RAJI and RAJI-CD19-KO cells as well as against NALM6 cells while the unispecific constructs are inactive against RAJI-CD19-KO cells. The SAR-T cells are tested in an in vivo model of RAJI and RAJI-CD19-KO cells xenografted in NSG mice. The bispecific and multispecific SAR-T cells show robust antitumor activity against both cell lines while the unispecific constructs are inactive against RAJI-CD19-KO cells

### Miscellaneous SAR Constructs

[0845] The bispecific constructs in which the vHH or FHVH or Centyrin or affibody or other non-immunoglobulin antigen binding domain is operably linked to the N-terminus of the vL or the vH fragment of a double chain SIR retain their activity against two or more antigens. Thus, the following bispecific constructs were positive in JNG-GFP induction assays against both RAJI WT cells that express CD19 and RAJI CD19 KO A7 cells that lack CD19 expression. These clones were also highly positive against DAUDI and RS;411cells. In contrast the corresponding unispecific constructs were negative against RAJI CD19 KO A7 cells suggesting that they are unable to recognize and signal in response to CD20 antigen that is also expressed on RAJI wild-type and RAJI CD19 KO A7 cells. Such bispecific constructs are represented by the following sequence and SEQ ID Nos. In the constructs represented by (SEQ ID NO: 4090 and SEQ ID NO: 15711), (SEQ ID NO: 4088 and SEQ ID NO: 15709) and (SEQ ID NO: 4089 and SEQ ID NO: 15710), the CD20-vHH-2HCD25 binding domain is operably linked to the N-terminus of hu-mROO5-1-vH which in turn is operably linked to [hTCRa-T48C], [hTCRb-KACIAH] or [hTCRa-CSDVP] TCR constant chains, respectively. The hu-mR005-1-vL chain in these constructs is operably linked to [hTCRb-S57C], [hTCRa-CSDVP] or [hTCRb-KACIAH] chains, respectively. Thus, in these three constructs the hu-mR005-1-vL and hu-mROO5-1-vH combine to form a Fv that targets CD19, while the AABD represented by CD20-vHH-2HCD25 targets CD20. The above results demonstrate that attachment of CD20-vHH-2HCD25 to the N-terminus of hu-mROO5-1-vH does not interfere with the ability of hu-mROO5-1-vH to combine with the hu-mR005-1-vL chain to form the Fv fragment. The above results further demonstrate that resulting Fv fragment in which the CD20-vHH-2HCD25 is operably linked to the N-terminus of hu-mROO5-1-vH still retains its ability to recognize and bind to CD19 and induce T cell signal upon binding to CD19-expresing cells.

[0846] In contrast to the above constructs, the bispecific SAR represented by CD8SP-CD20-vHH-C07-G4S-CD19-huCD19USC3-vL-[hTCRb-S57C-opt]-F-P2A-SP-huCD19USC3-vH-[hTCRa-T48C-opt]-F-F2A-PAC (SEQ ID NO: 1330 and SEQ ID NO: 12020) has the backbone of a SIR comprising the CD19-huCD19USC3-vL and CD19-huCD19USC3-vH fragments which combine to form a Fv which targets CD19. In this SAR, the AABD targeting CD20 and represented by CD20-vHH-C07 is operably linked to the N-terminus of CD19-huCD19USC3-vL chain. This SAR construct is able to induce T cell signaling and GFP expression when co-cultured with RAJI (CD19+/CD20+), RAJI CD19 KO A7 (CD19-/CD20+), DAUDI (CD20+) and RS411 (CD19+) cells. In comparison the unispecific construct CD8SP-huCD19-USC3-vL-[hTCRb-S57C]-F-P2A-SP-huCD19-USC3-vH-[hTCRa-T48C]-F-F2A-PAC (SEQ ID NO: 1244 and SEQ ID NO: 11934) is not able to induce GFP expression when co-cultured with RAJI CD19 KO A7 (CD19-/CD20+) cells. The above results demonstrate that attachment of an AABD (i.e., CD20-vHH-C07) to the N-terminus of CD19-huCD19USC3-vL via a Gly-Ser linker does not interfere with the ability of the vL fragment to combine with its complementary vH fragment (i.e., huCD19-USC3-vH) to form a Fv that can recognize the target antigen (i.e., CD19) and induce cell signaling. The above results further demonstrate that an AABD (e.g., a vHH or SVH) which is operably linked to the N-terminus of a vL fragment retains its ability to bind to its target antigen and induce T cell signaling when expressed as part of a SAR.

[0847] It was observed that JNG cells expressing the construct CD8SP-CD22-FHVH-24-[IgCL-TCRg-6MD]-F-P2A-SP-BCMA-FHVH-93-[IgG1-CH1-TCRd-6MD]-F-F2A-PAC which is represented by SEQ ID NO: 6821 and SEQ ID NO: 17511 strongly induced GFP expression when co-cultured with RAJI (CD19+) and L363 (BCMA+) suggesting that they can recognize and respond to both CD22 and BCMA. Essentially, the same results were obtained when the experiment was repeated with JNG cells expressing the construct CD8SP-CD22-FHVH-24-[IgCL-TCRb-wt-opt2-6MD]-F-P2A-SP-BCMA-FHVH-93-[IgG1-CH1-TCRa-wt-opt2-6MD]-F-F2A-PAC which has the SEQ ID NO: 6812 and SEQ ID NO:17502 respectively.

[0848] As the SARs are modular in design the sequences of different SARs described in this disclosure can be determined from their names which describe the orders of their various component modules.

### Use of SMAC Mimetics for Generation of SAR-T Cells

[0849] T cells were infected with a SAR (SEQ ID NO: 7348) with the backbone of a SIR targeting CD19 and then expanded in T cell culture medium (XVIVO medium supplanted with 10 ng/ml CD3 antibody, 10 ng/ml CD28 antibody and 100 IU recombinant human-IL2 at 37° C. in a 5% CO2 humidified incubator in the absence and presence of two different concentrations of a SMAC mimetic Birinapant (100 nM or 1 µM) for 16 days. Uninfected T cells (T-UI) and SIR-T cells were tested for cytotoxicity against RAJI target cells expressing Gluc using MATADOR Assay at E:T ratios 0.25:1 and 0.5:1 for 4 h in 384-well plate. Matador assay was performed by adding 1:100 CTZ in PBS 15 µl/well in well mode using injectors. Expansion of SAR-T cells in the presence of SMAC mimetic resulted in dose dependent increase in cell killing of RAJI cells while it has no effect on non-specific killing by the uninfected control T cells.

[0850] T cells were activated overnight with CD3/CD28 beads followed by three infections with CD19-targeted 2^{nd} generation CAR (SEQ ID No: 7343) and a CD19 targeted SIR CD8SP-hu-mROO5-1-vL-[hTCRb-S57C]-F-P2A-SP-hu-mROO5-1-vH-[hTCRa-T48C]-E02 (SEQ ID NO: 7348). Cells were expanded in XVIVO medium under standard conditions in the presence of IL2 and CD3/CD28 beads in the absence or presence of Birinapant 1 µM for 7 days and. After 7 days, cells were analyzed by flow cytometry for expression of different cell surface markers. In vitro expansion of CAR-T and SIR-T cells in the presence of Birinapant was shown to result in increase in proportion of CD8 cells, a decline in CD4 cells and increase in CD62L cells, which is a marker of naive T cells with stem like properties.

[0851] 1 × 10⁵ T cells expanded for 7 days in the presence of Birinapant were co-cultured with 1 × 10⁵ Nalm6 cells for 48 h in 96-well plate. After 48 h, supernatant was collected and used for measurement of IFNγ, TNFα and IL-2 by ELISA. There was no significant decrease in IFNy, TNFα or IL2 secretion following treatment with Birianapant.

[0852] To test the in vivo efficacy of the different CAR-T cells, NSG mice were injected via tail vein with 0.5 × 10⁶ Nalm6 cells stably expressing heat stable luciferase LucPPE (NALM6-LucPPE) and three days later injected with 5 × 10⁶ control T cells and T cells expressing the 2^{nd} generation CAR constructs represented by SEQ ID No: 7343 and a SIR represented by SEQ ID NO: 7348. Animals were imaged weekly by bioluminescence imaging following injection of D-luciferin. There was significant tumor growth in animals given control T cells and they all died by day 40. The animals given T cells expressing SEQ ID NO: 7343 and 7348 that had been expanded for 7 days in the absence or presence of Birinapant (1 µM) cleared the disease and remained disease free until day 100 with the exception of one animal given T cells expressing SEQ ID NO 7343 that had been expanded in the presence of Birinapant. Overall, the above results demonstrate that T cells expressing SIR retain their in vitro and in vivo efficacy when expanded in the presence of Birinapant. The results further demonstrated that cells expressing LucPPE can be used for monitoring in vivo growth of cancer cells via bioluminescence imaging.

### Use of Gas-Permeable Rapid Expansion G-Rex) Cultureware for Expansion of SIR-T Cells

[0853] Primary human T cells were infected three times with CD 19-targeted 2^{nd} generation CAR (SEQ ID No: 7343) and a CD19 targeted SIR (SEQ ID NO: 7348). One set of T-CAR cells was cultured in G-Rex 6-well plates (Cat. # 80240 M, Wilson Wolf Corporation), where 1.25 million T cells were plated in each well containing 35 ml of T cell culture medium.

[0854] Fresh media was changed in G-Rex plates after every 5 days and after 3 days in cells cultured in regular culture flasks under normoxic conditions.

[0855] Fresh media was changed in G-Rex plates after every 7 days in Hypoxia experiment and after 3 days in cells cultured in regular culture flasks.

[0856] For hypoxic conditions a 4% O2 humidified incubator was used instead of 5% CO2 humidified incubator for normal conditions.

[0857] After 3 infections, cells were analyzed by flow cytometry on Day 5 with Protein L and approximately 45% of cells were found to express SIR on cell surface. Cells were pelleted and re-suspended in XVIVO-15 (Lonza) T-cell medium supplemented with PSA, 100 IU/ml recombinant human IL2 and Dynabeads Human T-Activator CD3/CD28 and 5% hAB serum. One set of SIR-T cells was cultured in G-Rex 6-well plates (Cat. # 80240 M, Wilson Wolf Corporation), where 1.25 million T cells were plated in each well containing 35 ml of T cell culture medium. Fresh media was changed in G-Rex plates after every 5 days. The other set of SIR-T cells were cultured in 10 ml of medium in a regular tissue culture flask. Fresh media was changed in G-Rex plates after every 5 days and after 3 days in cells cultured in regular culture flasks. After 14 days expansion, cells were tested for cytotoxicity against Nalm6-Gluc cells using Matador assay. SIR-T cells retained their cytotoxicity against target cells when grown in GRex flasks.

[0858] The cells were analyzed by flow cytometery for expresson of SIR by staining with Protein L and for presence of different T cell markers. SIR-T cells expanded in a G-Rex flask showed significantly higher expression of SIR as determined by Protein L staining (53.7% vs 46.53%) and higher proportion of CD8 cells (80.34% vs 68.37%), CCR7 cells (65.69% vs 36.34%), CD62L (62.87% vs 51.99%) and CD45RA (91.94% vs 45.91%). As CCR7+/CD45RA+/CD62L+ cells are known to possess features of stem like T cells, the above results indicate that culture of SIR-T in GRex flasks results in expansion of cells with immunophenotype of stem like T cells (Tscm) and prevent their terminal differentiation. The results further demonstrate that expansion of SIR-T cells in GRex flasks results in preferential expansion of CD8 cells.

[0859] Control T cells or SIR-T cells grown in regular flask or G-Rex 6-well plate were cultured with Nalm6-hGLuc 100 K/well/100 ul in 96-well plate U-bottom in XVIVO medium with no additional component. After 48 h co-culture, supernatant was collected and used for ELISA. SIR-T cells expanded in GRex plates were shown to produce more IFNy, TNFα and IL2 when cultured with NALM6 cells expressing their target antigen (e.g., CD19) as compared to SIR-T cells expanded in regular flask. In addition, the baseline (i.e., in the absence of NALM6 cells) production of IFNγ and TNFα was lower in SIR-T cells expanded in GREx flask suggesting low tonic signaling.

### In Vivo Comparison of SIR-T Cells Expanded in Regular Flask and GRex Flasks

[0860] SIR-T cells from the preceding experiment that were expanded in regular T75 flask or GRex flask were compared for in vivo efficacy using a Nalm6-LucPPe xenograft model in NSG mice. For this purpose, 0.5 × 10⁶ Nalm6 cells expressing LucPPe were injected into NSG mice via tail vein injection. Two days later, animals received injection of increasing number of SIR-T cells (2 × 10⁶, 4 × 10⁶, 8 × 10⁶) per animal. Animals were imaged using bioluminescence imaging following injection of D-Luciferin. The animals given SIR-T cells expanded in GRex flask showed superior control of leukemia as determined by bioluminescence imaging which also resulted in improvement in survival. This experiment also demonstrate that LucPPe and other thermostable beetle luciferases can be used for in vivo monitoring of tumor growth by bioluminescence imaging following injection of D-luciferin.

[0861] The experiment is repeated by expansion of Ab-TCR-T cells, TFP-T, TAC-T cells targeting CD19. It is observed that expansion of Ab-TCR-T and TFP-T cells under GRex flasks confer superior expansion, retention of T stem cell phenotype and superior control of tumor in vivo. Finally, the experiment is repeated by expansion of bispecific and multispecific SIR-T, Ab-TCR-T and TFP-T and again expansion using GRex flasks is shown to result in not only superior expansion but also superior in vitro and in vivo characteristics.

### Expansion in G-Rex Plates Under Hypoxic Conditions

[0862] The experiment in the preceding section was repeated using a CD19-targeted 2^{nd} generation CAR (SEQ ID No: 7343) and a CD19 targeted SIR (SEQ ID NO: 7348). T cells were infected three times with the lentiviral vectors encoding the SIR and CAR and then 1 million cells infected with each SIR/CAR construct were cultured in regular T75 flask or GRex flask as described in the preceding section. One set of each flasks were cultured under normal oxygenation conditions while the other set was cultured under hypoxic conditions. For hypoxic conditions a 4% O2 humidified incubator was used instead of 5% CO2 humidified incubator for normal conditions.

[0863] After 13 days of culture, cells were counted and analyzed by flow cytometry. Expansion of cells under hypoxic conditions in normal tissue culture flasks led to lower level of expansion. Thus, the uninfected T cells (T-UI), CAR-T and SIR-T cultured in regular flask expanded from 1 million to 6, 6 and 9 million cells, respectively, under normoxic conditions but expanded to 4.4, 5.2 and 6 million cells. respectively under hypoxic conditions. In contrast, expansion in GRex flasks led to 80, 85, 84 million cells, respectively, under normoxic conditions and 70, 70 and 72 million cells, respectively, under hypoxic conditions. Thus, expansion in GREx flasks not only leads to much greater expansion of CAR-T and SIR-T cells but also results in significant expansion even under hypoxic conditions thereby allowing production of sufficient cells for clinical administration. This point is important as failure to produce sufficient number of CAR-T and SIR-T cells is a major cause of manufacturing failure in CAR-T and SIR-T field

[0864] Further expansion of CAR-T and SIR-T in GREX flask under hypoxia resulted in higher proportion of T cells expressing the CAR and SIR, higher percentage of CD8+ cells and higher percentage of cells expressing the markers associated with stem like T cells (i.e., CD45RA, CCR7 and CD62L).

[0865] The cells expanded under different conditions were tested for cytotoxicity against NALM6-cells expressing Gluc using the Matador assay. All cell populations were shown to demonstrate cytotoxicity. The supernatant from the different cell populations were tested for cytokine production upon co-culture with NALM6 cells. All cell populations were shown to produce IFNy, TNFα and IL2 upon co-culture with NALM6 cells.

[0866] Finally, the different cell populations were compared for in vivo efficacy in a NALM6 xenograft model using NSG mice. The experiment was performed as in the preceding example by injecting 0.5 million NALM6-LucPPE cells via tail vein followed 2 days later with 2 million CAR-T or SIR-T cells grown under normoxic or hypoxic conditions in GREX flasks. The results showed that SIR-T cells expanded in GREX flask under hypoxic conditions performed equally well as those expanded under normal conditions while CAR-T cells expanded under hypoxic conditions performed worse than those expanded under normoxic conditions.

### Comparative Analysis of Mesothelin (MSLN) SARs With Different Antigen Binding Domains

[0867] Mesothelin is highly expressed in several cancers but also shows low level expression on normal healthy tissues. To reduce affinity tuned SARs targeting MSLN, several mutants of MSLN specific humanized antibody MSLN-hu22A10 and MSLN-7D9 were generated. The SEQ ID NO of the vL, vH fragments and their CDR regions are provided in Table 39. The different mutant and wild-type vL and vH fragments were assembled to make SAR constructs on the backbone of double chain SIR. The name, chain composition and SEQ ID of the different SAR constructs are provided in Table 50. JNG cells were generating expressing the different SAR constructs targeting MSLN cloned in the pCCLc-MNDU3-WPRE vector (SEQ ID NO: 4). In case of constructs co-expressing PAC, cells were also selected with Puromycin. Cells were then tested for GFP transduction following incubation with and SKOV3 (MSLN-high), MCF7 (MSLN-low), PC3 (MSLN-medium), MDA-MB-231 (MSLN low), LNCaP (MSLN low), Huh-7 (MSLN-low) and RAJI (MSLN-ve) cell lines, respectively. As shown in the Table 50, different MSLN SAR cells showed varying level of GFP induction upon co-culture with the target cell lines with different levels of MSLN expression. The JNG cells expressing the SAR with SEQ ID NO(DNA): 21873 and SEQ ID NO (PRT): 22688 showed the strongest GFP induction in response to SKOV-3 and MDA-MB-231 cell lines that express high levels of MSLN but also showed modest GFP induction when co-cultured PC3 cells that express low to moderate amounts of MSLN but did not show GFP induction on co-culture with MCF7 cells that express low levels of MSLN. This SAR comprises hu22A10-N31S-vL and hu22A10-F27Y-vH fragments. The SEQ ID NO of these fragments and their CDR1-3 are provided in Table 39. The SAR with SEQ ID NO: 22691 with similar but slightly weaker. This SAR also showed significant GFP induction when co-cultured with PC3 cells showing moderate levels of MSLN. This SAR comprise hu22A10-N31S-vL and wild-type hu22A10-vH fragments. The SAR with SEQ ID NO (PRT): 22687, 22692 showed weaker but sufficient GFP induction with SKOV3 and none to negligible GFP induction with PC3 cell line. The SAR with SEQ ID NO:22694 showed the lowest GFP induction among the panel against SKOV-3 cells. This SAR comprises MSLN-hu22A10-Y96W-vL and wild-type MSLN-hu22A10-vH fragments.

[0868] These results demonstrate that it is possible to generate affinity tuned and sensitivity modified MSLN targeted SARs by incorporating different mutations in the vL and vH fragments. The SARs with activity against moderate MSLN expressing cells (e.g., PC3) may be more suitable if disease relapse due to antigen escape is a concern. In contrast, the MSLN SAR with negligible or no activity against moderate MSLN expressing cells (e.g., PC3 cells) may be more suitable for debilitated patients or where safety is the primary concern.

[0869] These vL and vH fragments are used to generate a diverse panel of MSLN targeting unispecific, bispecific and multispecific SARs whose SEQ ID NO: are provided in SEQ ID NO: 22540-22581. Additional mutants of MSLN-hu22A10 can be generated and can be used in alternate embodiment of the disclosure. The SEQ ID NO of other MSLN targeted vL, vH, scFv fragments baseds are also provided in Table 3 and 39. These vL, vH and scFv fragments are used to generate a diverse panel of MSLN targeting unispecific, bispecific and multispecific SARs.

[0870] In one embodiment, the disclosure provides a MSLN-targeted SAR, which when expressed in JNG cells causes less than 10% induction of GFP when the JNG cells expressing the SAR are co-cultured for 24 hours with PC3 cells. In one embodiment, the disclosure provides a MSLN-targeted SAR, which when expressed in JNG cells causes less than 10% induction of GFP when co-cultured for 24 hours with a MSLN negative cell line. In one embodiment, the disclosure provides a MSLN-targeted SAR, which when expressed in JNG cells cause more than 20% induction of GFP when co-cultured for 24 hours with SKOV3 cells.

[0871] T cells expressing the different SAR constructs targeting MSLN are generated and demonstrate in vitro cytotoxicity against PC3 and SKOV3 cells using Matador assay. The SAR-T cells are also shown to induce cytokine production (TNFα, IFNγ, and IL2) when exposed to target cells. The T cells expressing the SAR with SEQ ID NO: 22686-22695 are tested for in vivo anti-tumor activity against a SKOV-3 xenograft model using NSG immunodeficient mice. The corresponding 2^{nd} generation CARs on the BBz background are used as controls. T cells expressing the SAR with SEQ ID NO: 22685-22695 show effective tumor control as measured by bioluminescence imaging and result in improved animal survival. The T cells expressing the SARs with SEQ ID NO: 22685-22695 also show superior in vivo activity as compared to the 2^{nd} generation CARs comprising the 4-1BB costimulatory domain and CD3z activation domain.

TABLE 50

| MSLN targeting SARs | | | |
|---|---|---|---|
| SEQ ID NO (DNA) | SEQ ID NO (PRT) | Constructs Name | NFAT-GFP ASSAY |
| 21871 | 22686 | CD8SP-MSLN-hu22A10-vL-[hTCRb-S57C]-F-P2A-SP-MSLN-hu22A10-vH-[hTCRa-T48C-opt]-F-F2A-PAC | SKOV-3 (2+) |
| 21872 | 22687 | CD8SP-MSLN-hu22A10-vL-Y96W-[hTCRb-S57C]-F-P2A-SP-MSLN-hu22A10-F27Y-vH-[hTCRa-T48C-opt]-F-F2A-PAC | SKOV-3 (1.5+), MCF-7 (-), PC-3 (-), MDA-MB-231 (2+) |
| 21873 | 22688 | CD8SP-MSLN-hu22A10-vL-N31 S-[hTCRb-S57C]-F-P2A-SP-MSLN-hu22A10-F27Y-vH-[hTCRa-T48C-opt]-F-F2A-PAC | SKOV-3 (5+), MCF-7 (-), PC-3 (3+), MDA-MB-231 (5+) |
| 21874 | 22689 | CD8SP-MSLN-hu22A10-vL-[hTCRb-S57C]-F-P2A-SP-MSLN-hu22A10-F27Y-vH-[hTCRa-T48C-opt]-F-F2A-PAC | SKOV-3 (3+) |
| 21876 | 22691 | CD8SP-MSLN-hu22A10-vL-N31 S-[hTCRβ-S57C]-F-P2A-SP-MSLN-hu22A10-vH-[hTCRa-T48C-opt]-F-F2A-PAC | Raji (-), SKOV-3 (2.5+), MDA-MB-231 (2.5+), MCF-7 (-), PC-3 (2+), LNCaP (-), Huh-7 (-) |
| 21877 | 22692 | CD8SP-MSLN-hu22A10-vL-Y96W-[hTCRβ-S57C]-F-P2A-SP-MSLN-hu22A10-vH-[hTCRα-T48C-opt]-F-F2A-PAC | Raji (-), SKOV-3 (1.5+), MDA-MB-231 (+), MCF-7 (-), PC-3 (+), LNCaP (-), Huh-7 (-) |
| 21878 | 22693 | CD8SP-MSLN-hu22A10-vL-N31 S-[hTCRβ-S57C]-F-P2A-SP-MSLN-hu22A10-vH-[hTCRα-T48C-opt]-F-F2A-PAC | SKOV-3 (2.5+) |
| 21879 | 22694 | CD8SP-MSLN-hu22A10-vL-Y96W-[hTCRβ-S57C]-F-P2A-SP-MSLN-hu22A10-vH-[hTCRα-T48C-opt]-F-F2A-PAC | SKOV-3 (+) |
| 21880 | 22695 | CD8SP-MSLN-7D9-vH-[hTCRβ-S57C]-F-P2ASP-MSLN-7D9-vL-[hTCRα-T48C-opt]-F-F2A-PAC | Raji (-), SKOV-3 (1.5+), MCF-7 (-), PC-3 (+), LNCaP (-), MDA-MB-231 (-), Huh-7 (-) |

[0872] T cells expressing the above MSLN SARs are shown to induce cytotoxicity in MSLN-expressing SKOV3 cells using Matador assay and induce cytokine production (e.g., TNFα, IFNγ, IL-2 etc.).

[0873] Next, the SAR-T cells are tested in a SKOV3 xenograft model in NSG mice. For this purpose, 1 × 10⁶ SKOV3-Luc cells are injected subcutaneously followed a week later by injection of intravenous injection of 3 × 10⁶ SAR-expressing T cells. Mice given SAR-T cells show varying level of tumor inhibition and improvement in survival. Mice given SAR-T with SEQ ID NO: 10315, 10384, 10453,10522, 10591 and 10660 show tumor inhibition and improvement in survival. Mice given SAR-T with SEQ ID NO: 10311, 10380, 10449, 10518, 10587 and 10656 show weak protection.

### Comparison of BCMA SARs

[0874] The BCMA SAR CD8SP-BCMA-hu72-vL-[hTCRb-S57C]-F-P2A-SP-BCMA-hu72-vH-[hTCRa-T48C-opt] (SEQ ID NO: 1473) with the backbone of double chain SIR was selected for further optimization by mutagenesis of its vL and vH chains. The mutant constructs were cloned in the lentiviral vector with or without a puromycin resistance gene. The nucleic acid and amino acid SEQ ID NO: of the different constructs are represented by SEQ ID NO (DNA): 21843-21870 and SEQ ID NO (PRT): 22658-22685, respectively. The constructs were expressed in JNG cells using lentiviral mediated gene transfer. In the case of constructs carrying puromycin resistance gene, the JNG cells were selected with puromycin to generate stably transduced cells. The JNG cells expressing the different SAR constructs were compared for their ability to induce GFP expression upon overnight co-culture with L363 cells which express BCMA. The different constructs showed varying level of NFAT driven GFP induction. The SAR constructs represented by SEQ ID NOs: 21843-21853, 21861, 21862 and 21870 showed consistently higher GFP induction as compared to constructs represented by SEQ ID NO: 21854-21860, 21863-21869. The highest GFP induction was seen with the constructs SP-BCMA-hu72-vL-S29G-[hTCRb-S57C]-F-P2A-SP-BCMA-hu72-vH-G32S-[hTCRa-T48C-opt] (SEQ ID NO: 21853) and SP-BCMA-hu72-vL-I27L-[hTCRb-S57C]-F-P2A-SP-BCMA-hu72-vH-S64T-[hTCRa-T48C-opt] (SEQ ID NO: 21852), respectively. JNG cells expressing these constructs also showed no background GFP induction reflecting lack of tonic signaling. In addition, JNG cells expressing these constructs showed no GFP induction upon co-culture with HL60 and THP-1 cell lines that do not express BCMA. These constructs have S29G (SEQ ID NO: 10934) and I27L (SEQ ID NO: 10933) mutations in their vL regions and G32S (SEQ ID NO: 11179) and S64T (SEQ ID NO: 11173) mutations in their vH regions. The scFv comprising S29G and G32S is represented by SEQ ID NO: 11422.

[0875] A number of unispecific and bispecific SARs constructs on different backbones (e.g., 2^{nd} generation CAR, SIR, Ab-TCR, zSIR, TFPε, TFPγ, TFPδ etc) comprising the above mutations are represented by SEQ ID NO: 7409-7753, 7892-8374 and can be used to generate a diverse immune response.

[0876] T cells are generated to express the following BCMA SARs constructs and are shown to induce cytotoxicity in BCMA-expressing L363 cells using Matador assay and to induce cytokine production (e.g., TNFα, IFNγ, IL-2 etc.) when co-cultured with L363 cells.

[0877] Next, the SAR-T cells are tested in a L363 xenograft model in NSG mice. For this purpose, 0.5 × 10⁶ L363-Luc cells are injected i.v. via tail vein followed 3 days later by intravenous injection of 2 × 10⁶ SAR-expressing T cells. Mice given SAR-T cells show varying level of tumor inhibition and improvement in survival. Mice given SAR-T with SEQ ID NO: 21852 and 21853 show superior disease control and prolongation of survival as compared to mice given control T cells.

[0878] Bispecific and biparatopic SAR constructs targeting BCMA and CD20 were constructed on the backbone of SAR with SEQ ID NO: 21853. These constructs are represented by SEQ ID NO (DNA): 22151-22155 and SEQ ID NO (PRT): 22966-22970. These SAR constructs were expressed in JNG cells and tested for induction of GFP upon overnight co-culture with a panel of cell lines expressing BCMA or CD20 or both. The bispecific and biparatopic constructs with SEQ ID NO: 22151-22152 showed GFP induction when co-cultured with the BCMA-expressing L363 (BCMA+) and U266 cells but did not show GFP induction when co-cultured with NALM6 cells that lack BCMA but express low level of CD20 (Table C2). In contrast, the bispecific SAR constructs with SEQ ID NO: 22153-22155 showed GFP induction with L363, U266, NALM6 and RAJI cells but showed negletible non-specific GFP induction when co-cultued with RS:411 cells that lack both BCMA and CD20 expression. Thus, T cells expressing the SAR constructs with SEQ ID NO: 22153-22155 can recognize more than one antigen and respond robustly with induction of NFAT signaling pathway.

[0879] The T cells expressing the bispecific and multispecific SAR constructs are tested for in vivo efficacy using a panel of cell lines expressing different antigens using xenograft model in NSG mice. The T cells expressing the bispecific and multispecific SAR constructs are shown to possess in vivo activity against a diverse panel of cell lines that express one or more of the antigens targeted by them. The T cells expressing the bispecific and multispecific SAR constructs are also shown to possess activity against cell lines that have down-regulated or lost the expression of one or more of their target antigens as long as they continue to express at least one of the antigens targeted by the SAR.

### Comparison of Her2 SARs

[0880] JNG cells were generating expressing the different SAR constructs targeting Her2 cloned in the pCCLc-MNDU3-WPRE vector (SEQ ID NO: 4). JNG cells were infected with lentiviral vectors encoding the different SAR constructs targeting Her2 with the backbone of double chain SIRs. The vL and vH fragments of these constructs were derived from Herceptin or one of its variants. In case of constructs co-expressing PAC, cells were also selected with Puromycin. Cells were then tested for GFP transduction following incubation with and SKOV3 (Her2-high), MCF7 (Her2-medium), PC3 (Her2-low) and MDA-MB-231 (Her2 low) cell lines, respectively. As shown in the Table 51, different Her2 SAR constructs showed varying level of GFP induction. The SAR constructs with SEQ ID NO: 21895 and 21897 in which the vL fragment of huMab4D5 or its mutant is attached to TCRb constant chain or one of its variants (KACIAH), showed strong GFP induction when co-cultured with Her2-high and Her2-low expressing cell lines. In contrast, the SAR constructs with SEQ ID NO: 21894, 21896, 21898 and 21899 showed modest activity against Her2 high expressing cell lines but low to negligible activity against Her2 low expressing cell lines. These results demonstrate that it is possible to modify the sensitivity of Her targeted SARs by incorporating different mutations in the vL and vH fragments and by attaching them to different TCR constant chains.

[0881] The SEQ ID NO of the exemplary vL, vH and scFv fragments based on humanized Her2 4D5 antibody and its variants are provided in Table 3. These vL and vH fragments are used to generate a diverse panel of Her2 targeting unispecific, bispecific and multispecific SARs whose SEQ ID NO: are provided in SEQ ID NO: 8858-8926 and 21683-21703. Additional mutants of 4D5 are known in the art and can be used in alternate embodiment of the disclosure. The SEQ ID NO of other Her2 targeted vL, vH, scFv fragments based on Her2-USC-1516 and Her2 FRP5 antibodies are also provided in Table 3. These vL, vH and scFv fragments are used to generate a diverse panel of Her2 targeting unispecific, bispecific and multispecific SARs provided in Table 36 (SEQ ID NO: 8927-8995 and 8651-8719).

[0882] In one embodiment, the disclosure provides a Her2-targeted SAR, which when expressed in JNG cells causes less than 10% induction of GFP when the JNG cells expressing the SAR are co-cultured for 24 hours with MDA-MB-231. In one embodiment, the disclosure provides a Her2-targeted SAR, which when expressed in JNG cells causes less than 10% induction of GFP when co-cultured for 24 hours with a Her2 negative cell line. In one embodiment, the disclosure provides a Her2-targeted SAR, which when expressed in JNG cells cause more than 20% induction of GFP when co-cultured for 24 hours with SKOV3 cells.

[0883] T cells expressing the different SAR constructs targeting Her2 are generated and demonstrate in vitro cytotoxicity against MCF7 and SKOV3 cells using Matador assay. The SAR-T cells are also shown to induce cytokine production (TNFα, IFNγ, and IL2) when exposed to target cells. The SAR-T cells also show in vivo anti-tumor activity when tested in a xenograft model using NSG immunodeficient mice.

TABLE 51

Her2 targeting SARs

| SEQ ID NO (DNA) | SEQ ID NO (PRT) | Constructs Name | NFAT-GFP ASSAY |
|---|---|---|---|
| 21894 | 22709 | CD8SP-Her2-huMab4D5-H91A-vL-[hTCRa-T48C]-F-F2A-SP-Her2-huMab4D5-D98W-vH-[hTCRb-S57C-opt1] | SKOV-3 (5.5+), MCF-7 (3.5+), PC-3 (+/-), MDA-MB-231 (-) |
| 21895 | 22710 | CD8SP-Her2-huMab4D5-H91A-vL-V5-[hTCRβ-KACIAH]-F-P2A-IgHSP-Hercep-Hu4D5_vH-MYC-[hTCRa-CSDVP]-F-F2A-PAC | SKOV-3 (7+), MCF-7 (7+), PC-3 (8+), MDA-MB-231 (7+) |
| 21896 | 22711 | CD8SP-Her2-huMab4D5-D98W-vL-[hTCRa-T48C]-F-F2A-SP-Her2-huMab4D5-D98A-F100A-Y102V-vH-[hTCRb-S57C-opt1] | SKOV-3 (7+), MCF-7 (5+), PC-3 (+/-), MDA-MB-231 (-), SKOV-3+ Herceptin (+/-) |
| 21897 | 22712 | Hercep-Hu4D5_vL-V5-[hTCR0-KACIAH]-F-P2A-IgHSP-Her2-huMab4D5-D98A-F100AY102V-vH-MYC-[hTCRa-CSDVP]-F-F2A-PAC | SKOV-3 (4.5+), MCF-7 (4.5+), PC-3 (6+), MDA-MB-231 (5+) |
| 21898 | 22713 | CD8SP-Hercep-Hu4D5-vL-[hTCRa-T48C]-F-F2A-SP-Her2-huMab4D5-D98A-F100A-Y102V-vH-[hTCRb-S57C-opt1] | SKOV-3 (3.5+) |

### PSMA SARs

[0884] JNG cells were generating expressing the different SAR constructs targeting PSMA cloned in the pCCLc-MNDU3-WPRE vector (SEQ ID NO: 4). The cells were tested for binding to PSMA-ECD-GGS-NLuc (SEQ ID NO: 11995) and JNG cells expressing all the SAR constructs showed binding to PSMA-ECD-GGS-NLuc (SEQ ID NO: 11995). The cells also showed binding to Protein L by flow cytometry. The JNG cells expressing the SAR constructs were then tested for induction of GFP expression upon over-night co-culture with LNCaP cells. All the constructs showed GFP robust induction.

[0885] T cells were generated expressing the following SAR constructs by lentiviral mediated gene transduction. T cells showed expression of the SAR constructs on cell surface as measured by flow cytometry. The ability of SAR-T cells to induced cytotoxicy of the LNCaP-LucPPe target cells was demonstrated using Matador assay. For this purpose, LNCaP cells were stably transduced with a thermostable variant of bettle luciferase (LucPPe-146-1H2; SEQ ID NO: 17) using lentiviral mediated gene transfer. The T cells were tested in vivo using an LNCaP-LucPPE xenograft model in NSG mice. LNCaP-LucPPe cells 1 × 10⁶ in 100 µL of Matrigel and culture medium mixture (1:1, v/v) were implanted subcutaneously into the right thigh of 5-week-old male NSG mice (n =6). Seventeen days later, 3 × 10⁶ of PSMA-SAR T cells were injected intravenously via tail vein injection. Tumor growth was measured by in vivo bioluminescence imaging (BLI) following injection of D-luciferin. The T cells expressing SARs with SEQ ID NO: 9694, 9763, 9832 and 9901 showed effective control of tumor as measured by in vivo bioluminescence imaging and tumor volume measurement using a caliper. This resulted in improvement in survival. In particular, animals given 2^{nd} generation CAR-T with SEQ ID NO: 9758 showed minimum control of tumor while animals given T-cells given SAR with the backbone of double chain SIR (e.g., SEQ ID NO:9762, 9901 and 9970) showed statistically significant and effective tumor control. Effective tumor control was also seen using SAR-T constructs in which the [hTCRb-S57C] and [hTCRa-T48C] modules in the constructs with SEQ ID NO:9762, 9901 and 9970 were replaced by [hTCRb-KACIAH] and [hTCRa-CSDVP] modules, respectively. Further, effective control was seen in SAR-T cells expressing the construct CD8SP-hu-PSMA-J591-vL-[hTCRb-KACIAH]-F-P2A-SP-hu-PSMA-J591-vH-[hTCRa-CSDVP]-F-F2A-K13-opt (SEQ ID NO: 21485) which coexpressed the K13 module (SEQ ID NO: 1317).

[0886] Approximately 197 days after the injection of SAR-T cells, blood samples were collected from surviving mice. The presence of circulating human T cells was confirmed by staining with an antibody against human CD3 and flow cytometry. Expression of SAR on T cells was confirmed by staining with APC-conjugated Protein-L and flow cytometry. Surviving animals were rechallenged with subcutaneous injecton of fresh LNCaP cancer cells as before. The mice given SAR-T cells were able to reject LNCaP cells when rechallenged even 200 days later, suggesting long-term immunity. Furthermore, there was an increase in the percentage of SAR-T cells, as measured by flow cytometry, in the animals upon rechallenge with LNCaP cells. In contrast, mice which had not been administered SAR-T cells were used as controls and showed progressive tumor growth.

[0887] In addition to its expression on cancer cells, PSMA is also expressed at low level on normal cells. Therefore, to develop SARs that can recognize and repond to target cells with different levels of PSMA. a panel of SARs on different backbones and with different vL and vH fragments are generated and stably expressed in JNG cells. The JNG cells expressing the different SAR constructs are tested against LNCaP (PSMA-Hi), KMH2 (PSMA-low) and Huh-7 (PSMA-low) cell lines in co-culture assay. The results are shown in Table 52. The SAR constructs with SEQ ID NO: 21882, 21884, 21886, 21887, and 21892 showed modest GFP induction when cultured with LNCaP cells that express high levels of PSMA but showed negligible GFP induction with KMH2 and Huh-7 cells that show low levels of PSMA. SAR constructs with SEQ ID NO: 21888-21891 show weak activity even against LNCaP cells. The SAR construct with SEQ ID NO: 21885 with shorter TCRγ (huTCRg-d7) and TCRδ (huTCRd-d2) chains showed high NFAT-driven GFPactivity against LNCaP cells but was also active against KMH2 and Huh-7 cells that express low levels of PSMA. The SAR construct with SEQ ID NO: 21884 with huTCRg-d12 chain showed weaker activity as compared to SAR with SEQ ID NO: 21885. The SAR construct with SEQ ID NO: 21886 with deleted TCRa (hTCRa-d17) and TCRb (hTCRb-d17) constant chains showed relatively high GFP induction when co-cultured with LNCaP cells while having negligible activity against Huh-7 and KMH2 cell lines. Thus, depending on the level of PSMA expression in a patient’s cancer, different SAR constructs with different backbones, constant chains and antigen binding domains can be selected to maximize efficacy and safety. Thus, the SAR with SEQ ID NO: 21885 may have activity against PSMA-low expressing tumors, it may also have on-target off-tumor toxicity against normal healthy tissues. In contrast, SAR with SEQ ID NO: 21886 and 21892 may miss some low PSMA expressing tumors but may offer better safety profile. Furthermore, the SAR constructs with shorter TCR constant chains not only retain their signaling activity but, in addition, may possess higher signaling activity. The SAR constructs with the shorter TCR constant chains also have the advantage of smaller size which in turn results in higher titer of the viral vector (e.g., lentiviral vector) encoding these constructs.

[0888] Athough the above experiments are conducted with SARs with puromycin resistance gene (PAC), the results are also applicable to constructs lacking this optional module. Finally, the vL and vH fragments used in the construction of the above constructs can be also used to generate additional SAR constructs with different backbones and with additional binding modules (e.g., AABD) to generate a diverse panel of unispecific, bispecific, multispecific and universal SAR constructs. The SEQ ID NO of the vL, vH and scFv fragments targeting PSMA are provided in Table 3. The SEQ ID NO of exemplary exemplary unispecific, bispecific and multispecific SAR constructs targeting PSMA alone or in combination with other antigens are provided in SEQ ID NO (DNA): 9686-10030 (Table 36) and in SEQ ID NO (DNA): 21662-21682. These SAR constructs can be tested further using assays described in this disclosure and can be used to generate a diverse immune response against PSMA expressing cancers.

[0889] The disclosure provides SARs on the backbones of 2^{nd} generation CAR, SIR, cTCR, AbTCR, TFPs, which when expressed in immune cells (e.g., T cells or NK cells etc.) can selectively target PSMA-high expressing cancer cells while sparing the PSMA-low expressing normal cells. The disclosure also provides a convenient method for screening of SARs with differential sensitivity towards tumors with different level of expression of PSMA (e.g., PSMA high and PSMA low tumors). In one embodiment, the disclosure provides a PSMA-targeted SAR, which when expressed in JNG cells causes less than 10% induction of GFP when the JNG cells expressing the SAR are co-cultured for 24 hours with Huh-7 cells. In one embodiment, the disclosure provides a PSMA-targeted SAR, which when expressed in JNG cells cause less than 10% induction of GFP when co-cultured for 24 hours with a PSMA negative cell line (e.g., a cell line in which both PSMA alleles are knocked out using CRISPR/Cas9). In one embodiment, the disclosure provides a PSMA-targeted SAR, which when expressed in JNG cells cause more than 20% induction of GFP when co-cultured for 24 hours with LNCaP cells.

TABLE 52

GENERATING A DIVERSE PANEL OF SARS AGAINST PSMA

| SEQ ID NO (DNA) | SEQ ID NO (PRT) | SAR constructs Name | NFAT-GFP ASSAY |
|---|---|---|---|
| 21882 | 22697 | CD8SP-hu-PSMA-2-J591-vL-[hTCRb-S57C]-F-P2A-SP-PSMA-3-J591-Y27F-E31D-vH-[hTCRa-T48C-opt]-F-F2A-PAC | LNCaP (3+), PC-3 (-), KMH2 (-), Huh-7 (-) |
| 21883 | 22698 | CD8SP-hu-PSMA-J591-vL-[hTCRb-S57C]-F-P2A-SP-PSMA-3-J591-Y27F-E31D-vH-[hTCRa-T48C-opt]-F-F2A-PAC | LNCaP (6+), PC-3 (+/-), KMH2 (-), Huh-7 (-) |
| 21884 | 22699 | CD8SP-hu-PSMA-J591-vL-huTCRg-d12-F-P2A-SP-hu-PSMA-J591-vH-huTCRd-d2-F-F2A-PAC | LNCaP (2+), Huh-7 (-), KMH2 (-) |
| 21885 | 22700 | CD8SP-hu-PSMA-J591-vL-huTCRg-d7-F-P2A-SP-hu-PSMA-J591-vH-huTCRd-d2-F-F2A-PAC | LNCaP (6+), Huh-7 (2+), KMH2 (2+) |
| 21886 | 22701 | CD8SP-hu-PSMA-J591-vL-hu-TCRb-d17-F-P2A-IgHSP-hu-PSMA-J591-vH-hu-TCRa-d17-F-F2A-PAC | LNCaP (4+), Huh-7 (-), KMH2 (-) |
| 21887 | 22702 | CD8SP-hu-PSMA-J591-vL-hu-TCRb-S57C-d14-F-P2A-SP-hu-PSMA-J591-vH-hu-TCRa-d17-F-F2A-PAC | LNCaP (3+), Huh-7 (-), KMH2 (-) |
| 21888 | 22703 | CD8SP-hu-PSMA-3-J591-Y91A-vL-[hTCRb-S57C]-F-P2ASP-PSMA-3-J591-Y27F-E31D-vH-[hTCRa-T48C-opt]-F-F2A-PAC | LNCaP (-), Huh-7 (-), KMH2 (-) |
| 21889 | 22704 | CD8SP-RitX2-G4S-hu-PSMA-J591-vL-[hTCRb-S57C]-F-P2A-SP-PSMA-3-J591-Y27F-E31D-vH-[hTCRa-T48C-opt]-F-F2A-PAC | LNCaP (+/-) |
| 21890 | 22705 | CD8SP-RitX2-G4S-hu-PSMA-J591-vL-[hTCRb-S57C]-F-P2A-SP-PSMA-3-J591-Y27F-E31D-vH-[hTCRa-T48C-opt]-F-F2A-PAC | LNCaP (-) |
| 21891 | 22706 | CD8SP-RitxGAx2-RitX2-G4S-hu-PSMA-J591-vL-[hTCRb-S57C]-F-P2A-SP-hu-PSMA-J591-vH-[hTCRa-T48C-opt]-F-F2A-PAC | LNCaP (+/-) |
| 21892 | 22707 | CD8SP-hu-PSMA-J591-vL-[hTCRb-S57C]-F-P2A-SP-hu-PSMA-J591-vH-[hTCRa-T48C-opt]-F-F2A-PAC | LNCaP (3+), Huh-7 (-), KMH2 (-) |

### Comparison of SIR With Different Deletion Mutants of TCR Chains

[0890] JNG cells were infected with lentiviral vectors encoding the following deletion constructs targeting CD19 and based on hu-mROO5-1 vL and vH fragments that are linked to wild type and different deletion mutants of TCRa and TCRb chains and TCRg and TCRd chains. The cells were incubated with RAJI cells and induction of GFP expression was measured by flow cytometry (Table 53). However, constructs with deletion mutants of TCRα, β, γ and δ chains showed significant GFP induction upon coculture with RAJI cells. In particular, the construct with SEQ ID NO: 22641 with deletion of both TCRα and TCRβ showed significant GFP induction. Similarly, the constructs deletion of TCRγ and TCRδ chains with SEQ ID NO: 22651 and 22652 showed significant residual activity. These deletion mutants can be used to generate SAR with varying levels of strength and activity. These mutants can also result in higher titer of the viral vectors.

TABLE 53

DELETION MUTAGENESIS OF TCR CONSTANT CHAINS

| SEQ ID NO (DNA) | SEQ ID NO (PRT) | Name of Construct | Jurkat-NFAT ASSA Y |
|---|---|---|---|
| 21813 | 22628 | CD19-hu-mROO5-1-vL-hTCRb-d6-F-P2A-SP-CD19-hu-mROO5-l-vH-hTCRa-T48C-opt-F-F2A-PAC | Raji (5+) |
| 21814 | 22629 | CD19-hu-mROO5-1-vL-hTCRb-d2-F-P2A-SP-CD 19-hu-mR005-1-vH-hTCRa-T48C-opt-F-F2A-PAC | Raji (6+) |
| 21815 | 22630 | CD 19-hu-mR005 -1 -vL-hTCRb-dl 7-F-P2A-SP-CD 19-hu-mR005-1-vH-hTCRa-T48C-opt-F-F2A-PAC | Raji (4+) |
| 21816 | 22631 | CD19-hu-mROO5-1-vL-hTCRb-d4-F-P2A-SP-CD 19-hu-mROO5-1-vH-hTCRa-T48C-opt-F-F2A-PAC | Raji (6+) |
| 21817 | 22632 | CD19-hu-mROO5-1-vL-hTCRb-d9-F-P2A-SP-CD 19-hu-mR005-1-vH-hTCRa-T48C-opt-F-F2A-PAC | Raji (5+) |
| 21818 | 22633 | CD 19-hu-mROO5-1-vL-hTCRb-d14-F-P2A-SP-CD 19-hu-mR005-1-vH-hTCRa-T48C-opt-F-F2A-PAC | Raji (4+) |
| 21819 | 22634 | CD19-hu-mR005-1-vL-hTCRb-S57C-F-P2A-SP-CD 19-hu-mR005-1-vH-hTCRa-T48C-opt-d17-F-F2A-PAC | Raji (4+) |
| 21820 | 22635 | CD19-hu-mR005-1-vL-hTCRb-S57C-F-P2A-SP-CD 19-hu-mR005-1-vH-hTCRa-d6-F-F2A-PAC | Raji (2.5+) |
| 21821 | 22636 | CD19-hu-mR005-1-vL-hTCRb-S57C-F-P2A-SP-CD 19-hu-mR005-1-vH-hTCRa-d13-T48C-optF-F2A-PAC | Raji (4+) |
| 21822 | 22637 | CD19-hu-mROO5-1-vL-hTCRb-d9-F-P2A-SP-CD 19-hu-mR005-1-vH-hTCRa-d10-F-F2A-PAC | Raji (6.5+) |
| 21823 | 22638 | CD 19-hu-mROO5-1-vL-hTCRb-d2-F-P2A-SP-CD 19-hu-mROO5-1-vH-hTCRa-d6-F-F2A-P AC | Raji (6.5+) |
| 21824 | 22639 | CD 19-hu-mROO5-1-vL-hTCRb-d4-F-P2A-SP-CD 19-hu-mROO5-1-vH-hTCRa-d6-F-F2A-P AC | Raji (6+) |
| 21825 | 22640 | CD 19-hu-mROO5-1-vL-hTCRb-d6-F-P2A-SP-CD 19-hu-mROO5-1-vH-hTCRa-d6-F-F2A-P AC | Raji (6+) |
| 21826 | 22641 | CD19-hu-mROO5-1-vL-hTCRb-d17-F-P2A-SP-CD19-hu-mROO5-1-vH-hTCRa-d17-F-F2A-PAC | Raji (6.5+) |
| 21827 | 22642 | CD19-hu-mROO5-I-vL-hTCRb-d17-F-P2A-SP-CD19-hu-mROO5-1-vH-hTCRa-d26-T48C-opt-F-F2A-PAC | Raji (+) |
| 21828 | 22643 | CD19-hu-mROO5-1-vL-hTCRb-d17-F-P2A-SP-CD19-hu-mROO5-1-vH-hTCRa-d32-T48C-opt-F-F2A-PAC | Raji (2+) |
| 21829 | 22644 | CD19-hu-mROO5-1-vL-hTCRb-d17-F-P2A-SP-CD19-hu-mROO5-1-vH-hTCRa-d37-T48C-opt-F-F2A-PAC | Raji (+/-) |
| 21830 | 22645 | CD19-hu-mROO5-1-vL-hTCRb-d17-F-P2A-SP-CD19-hu-mROO5-1-vH-hTCRa-d46-T48C-opt-F-F2A-PAC | Raji (2+) |
| 21831 | 22646 | CD19-hu-mROO5-1-vL-hTCRb-d17-F-P2A-SP-CD19-hu-mROO5-1-vH-hTCRa-d52-F-F2A-PAC | Raji (2+) |
| 21832 | 22647 | CD19-hu-mROO5-1-vL-hTCRb-d41-S57C-F-P2A-SP-CD 19-hu-mROO5-1-vH-hTCRa-d32-T48C-opt-F-F2A-PAC | Raji (+) |
| 21833 | 22648 | CD19-hu-mROO5-1-vL-hTCRb-d50-S57C-F-P2A-SP-CD19-hu-mROO5-1-vH-hTCRa-d37-T48C-opt-F-F2A-PAC | Raji (-) |
| 21834 | 22649 | CD19-hu-mROO5-1-vL-hTCRb-d55-S57C-F-P2A-SP-CD19-hu-mROO5-1-vH-hTCRa-d46-T48C-opt-F-F2A-PAC | Raji (-) |
| 21835 | 22650 | CD 19-hu-mROO5-1-vL-hTCRb-d63-F-P2A-SP-CD 19-hu-mROO5-1-vH-hTCRa-d52-F-F2A-PAC | Raji (-) |
| 21836 | 22651 | CD 19-hu-mROO5-1-vL-huTCRg-d5-F-P2A-SP-CD 19-hu-mROO5-1-vH-huTCRd-d2-F-F2A-PAC | Raji (6+) |
| 21837 | 22652 | CD 19-hu-mROO5-1-vL-huTCRg-d7-F-P2A-SP-CD 19-hu-mROO5-1-vH-huTCRd-d2-F-F2A-PAC | Raji (5+) |
| 21838 | 22653 | CD8SP-CD19-hu-mROO5-1-vL-huTCRg-d12-F-P2A-SP-CD19-hu-mROO5-1-vH-huTCRd-d2-F-F2A-P AC | Raji (+) |
| 21839 | 22654 | CD 19-hu-mROO5-1-vL-huTCRg-d7-F-P2A-SP-CD 19-hu-mROO5-1-vH-huTCRd-d8-F-F2A-PAC | Raji (+/-) |
| 21840 | 22655 | CD8SP-CD19-hu-mROO5-1-vL-huTCRg-d12-F-P2A-SP-CD19-hu-mROO5-1-vH-huTCRd-d13-F-F2A-PAC | Raji (-) |

[0891] Use of universal SAR-T cells expressing CD16 as the antigen binding domain. Daudi cells expressing luciferase are injected intraperitoneally (i.p.; 0.3 × 10⁶ cells/mouse) in NSG mice (Jackson Laboratory). Some mice receive rituximab (150 mg) i.p. Human T cells (1 × 10⁷) expressing CD8SP-hu-mROO5-1-vL-[hTCRb-S57C]-F-P2A-IgSP-Apa-CD16-V158-v2-G4Sx3v2-hu-mROO5-1-vH-[hTCRa-T48C] (SEQ ID NO: 4725) SAR are injected four days after Daudi inoculation. Control mice receive tissue culture medium instead of rituximab or T cells. Rituximab injection is repeated weekly for 4 weeks, with no further T lymphocyte injection. All mice receive intraperitoneal injections of 1,000-2,000 IU of IL-2 twice a week for 4 weeks. Mice receiving rituximab plus SAR-T cells show reduced tumor growth.

### Use of SARs Containing RZIP Domain

[0892] T cells expressing an exemplary SAR containing RZIP CD8SP-hu-mROO5-1-vL-[hTCRb-S57C]-F-P2A-IgSP-Apa-RZIP-G4Sx3v2-hu-mROO5-1-vH-[hTCRa-T48C] (SEQ ID NO: 4345) are generated and administered to a patient with B-cell lymphoma at dose of 5 million cells/Kg. The patient is also administered purified CD8SP-CD20-2F2-vL-Gly-Ser-Linker-CD20-2F2-vH-G4S-EZIP (SEQ ID NO: 12033) and CD8SP-CD22-5-(vH-vL)-G4S-EZIP (SEQ ID NO: 12146) targeting CD20 and CD22 by intravenous continuous infusion at rate of 1-100 µg/day. The dose is started at 1 µg/day and then adjusted based on tolerability and development of symptoms of CRS.

### Use of SARs Containing E4 Domain

[0893] T cells expressing an exemplary SAR containing E4 CD8SP-hu-mROO5-1-vL-[hTCRb-S57C]-F-P2A-IgSP-Apa-E4-G4Sx3v2-hu-mROO5-1-vH-[hTCRa-T48C] (SEQ ID NO: 4472) are generated and administered to a patient with B-cell lymphoma at dose of 5 million cells/Kg. The patient is also administered purified CD8SP-CD20-2F2-vL-Gly-Ser-Linker-CD20-2F2-vH-G4S-K4 (SEQ ID NO: 12291) and CD8SP-CD22-h10F4v2-vL-Gly-Ser-Linker-CD22-h10F4v2-vH-G4S-K4 (SEQ ID NO: 12293) targeting CD20 and CD22 by intravenous continuous infusion at rate of 1-100 µg/day. The dose is started at 1 µg/day and then adjusted based on tolerability and development of symptoms of CRS.

[0894] Use of in vitro and vivo selection to select SARs with desired properties. A pool of SARs targeting CD19 listed in Table 35 are targeted to the TRAC locus in T cells using TRAC gRNA essentially as described by Eyquem J et al (Nature, 543(7643):113-117, 2017). The targeting vector also carry DNA barcodes located downstream of the stop codon of the SAR inserts. An exemplary construct for targeting a SAR to TRAC locus is TRAC-5-SA-F2A-CD8SP-CD19-vHH-048-G4Sx3-R1-hu-mR005-1-vL-[hTCRb-S 57C]-F -P2A-IgSP-Apa-CD20-vHH-2HCD25-G4Sx3v2-hu-mR005-1-vH-[hTCRa-T48C]-STOP-pA-Del-Exon1-TRAC-3 (SEQ ID NO: 23). Other SAR constructs based on Ab-TCR, cTCR and TFP backbone can be designed to target the TRAC locus as described in PCT/US2018/053247, which is incorporated in its entirety herein by reference. The TRAC-targeting construct encoding a SAR based on TFP backbones also coexpress the constant chains of TCRα or functional variant thereof as described in PCT/US2018/053247, which is incorporated in its entirety herein by reference. T cells can be derived from peripheral blood. In an alternate embodiment, T cells are derived from a single clone of iPSC or hematopoietic stem cells using techniques known in the art. T cells expressing the pool of SARs are co-cultured with RAJI cells in vitro for 1 to 21 days. Aliquotes of the SAR-T cell pools are collected before the culture with the target cells and on different days after co-culture. Samples are subjected to next generation sequencing to determine the relative frequency of different SARs following exposure to the target cells. Bioinformatics analyses is used to determine the SARs that are associated with better proliferative response following co-culture with the target cells. Essentially a similar approach is used to determine the SARs that confer higher proliferative potential on T cells in vivo and/or persist long term in vivo and/or are present at higher frequency when normalized for their frequency in the starting T cell population in surviving animals as compared to animals that succumb to tumor challenge. In alternate embodimentof the disclosure essentially a similar approach is used on human clinical samples to identify SARs that are associated with different properties and/or outcomes including but not limited to better long term survival, lower incidence of cytokine release syndrome, lower neurotoxicity and/or higher long term persistence. Such SARs can be subsequently used, either singly or in various combinations, to develop different SAR subpools, containing SARs targeting the same or different antigen binding domains, with diverse properties for the treatment of different disease conditions and different patients. In other enablements, the SAR-T cells are exposed to their target cell line and then sorted into different sets based on the degree of intracellular IFNγ as determined by flow cytometry. The frequency of different SARs in the low vs high IFNγ population is determined by next generation sequencing and normalized to their frequency in the control SAR-T cell population, i.e., SAR-T cells that have not been exposed to the target cell line or are exposed to a cell line that does not express the targe of SARs. From this analysis, SARs that are associated with different levels of IFNγ production can be determined. A similar approach is used to screen for and select SARs with any or a combination of desired properties or attributes including but not limited to, lower TNFα production, lower expression of exhaustion markers, lower expression of markers of terminal differentiation and/or higher expression of markers of cytotoxicity.

[0895] Use of autologous SAR-T cells for adoptive cell therapy. SAR-T cells of the disclosure can be used for adoptive cell therapy. As an example, patients with relapsed Acute Lymphocytic Leukemia (ALL), Chronic Lymphocytic Leukemia (CLL), or high-risk intermediate grade B-cell lymphomas may receive immunotherapy with adoptively transferred autologous SAR-T cells targeting CD19. A leukapheresis product collected from each patient undergoes selection of CD3-positive T lymphocytes using the CliniMACS Prodigy®) System from Miltenyi Biotec and following the manufacturer’s recommendations. The T lymphocytes are optionally enriched for Pgp-positive T cells using Flow sorting following staining with Pgp antibodies, MACS following staining with Pgp antibodies or Photodynamic selection following exposure to TH9402 plus light. Cells are transduced with clinical grade CD8SP-hu-mROO5-1-vL-[hTCRb-S57C]-F-P2A-IgSP-Apa-CD20-vHH-2HCD25-G4Sx3v2-hu-mROO5-1-vH-[hTCRa-T48C] (SEQ ID NO: 4091) and then selection and expansion of the SAR-T cells occur in a GRex flask under hypoxic conditions. After the resulting cell products have undergone quality control testing (including sterility and tumor specific cytotoxicity tests), they are cryopreserved. Meanwhile, following leukapheresis, study participants commence with lymphodepletive chemotherapy (30 mg/m²/day fludarabine plus 500 mg/m²/day cyclophosphamide × 3 days). One day after completion of their lymphodepleting regimen, the previously stored SAR-T cell product is transported, thawed and infused at the patient’s bedside. The study participant receives SAR-transduced lymphocytes infused intravenously followed by high-dose (720,000 IU/kg) IL-2 (Aldesleukin; Prometheus, San Diego, CA) every 8 hours to tolerance. The dose of SAR-T product varies from 1 × 10⁴ SAR+ve CD3 cells/kg to 5 × 10⁹ SAR+ve CD3 cells/kg as per the study protocol. The SAR-T product may be administered in a single infusion or split infusions. Research participants can be pre-medicated at least 30 minutes prior to T cell infusion with 15 mg/kg of acetaminophen P.O. (max. 650 mg.) and diphenhydramine 0.5-1 mg/kg I.V. (max dose 50 mg). The study participant may optionally receive dailiy injections of human IL-2. Clinical and laboratory correlative follow-up studies can then be performed at the physician’s discretion, and may include quantitative RT-PCR studies for the presence of CD19-expressing ALL/lymphoma cells and/or the adoptively transferred T cells; FDG-PET and/or CT scans; bone marrow examination for disease specific pathologic evaluation; lymph node biopsy; and/or long-term follow up per the guidelines set forth by the FDA’s Biologic Response Modifiers Advisory Committee that apply to gene transfer studies. Essentially a similar approach can be used to treat other diseases using autologous immune cells (e.g., T cells) that have been engineered to express the SAR of the disclosure where the SAR targets an antigen or antigens expressed on the disease causing or disease-associated cells.

[0896] Use of autologous SAR-T cells targeting multiple antigens for adoptive cell therapy. Patients many different diseases, including infectious diseases (e.g., HIV1, EBV, CMV, HTLV1, etc), degenerative diseases (e.g., Alzheimer’s disease), autoimmune disease (e.g., pemphigous vulgaris), allergic diseases (e.g., chronic idiopathic urticarial) and multiple cancers are enrolled in an IRB approved phase I clinical trial of immunotherapy with adoptively transferred autologous SAR-T cells targeting different disease causing or disease associated antigens. The SAR for different diseases are selected based on the known expression of their target antigen in the disease causing or disease associated cells. Where possible, the expression of the SAR target on the disease causing or disease associated cells is confirmed by binding with ABD-GGS-NLuc fusion protein in which the antigen binding domain of SAR fused to non-secretory form of NLuc protein via a flexible linker. Alternatively, immunohistochemistry or flow cytometry using commercially available antibodies is used to confirm the expression of the SAR target on disease causing or disease associated cells. T cells are collected from the subject using leukopheresis, transduced with the appropriate SAR encoding lentivirus vector and expanded ex vivo using CD3/CD28 beads in a GRex flask with Birinapat. After the resulting cell products have undergone quality control testing (including sterility and tumor specific cytotoxicity tests), they are cryopreserved. Meanwhile, study participants commence with lymphodepletive chemotherapy (30 mg/m²/day fludarabine plus 500 mg/m²/day cyclophosphamide x 3 days). One day after completion of their lymphodepleting regimen, the study participant receives transduced lymphocytes infused intravenously followed by high -dose (720,000 IU/kg) IL-2 (Aldesleukin; Prometheus, San Diego, CA) every 8 hours to tolerance. The previously stored SAR-T cell product is transported, thawed and infused at the patient’s bedside. The dose of SAR-T product varies from 1 × 10⁴ SAR+ve CD3 cells/kg to 5 × 10⁹ SAR+ve CD3 cells/kg as per the study protocol. The SAR-T product may be administered in a single infusion or split infusions. Research participants can be pre-medicated at least 30 minutes prior to T cell infusion with 15 mg/kg of acetaminophen P.O. (max. 650 mg.) and diphenhydramine 0.5-1 mg/kg I.V. (max dose 50 mg). The study participant may optionally receive dailiy injections of human IL-2. Clinical and laboratory correlative follow-up studies can then be performed at the physician’s discretion.

[0897] Use of allogeneic SAR-T cells for adoptive cells therapy. Patients with relapsed Acute Lymphocytic Leukemia or high-risk intermediate grade B-cell lymphomas who have undergone an allogeneic bone marrow transplant may receive immunotherapy with adoptively transferred allogeneic SAR-T cells. A leukapheresis product collected from the donor (same donor as used for the allogeneic transplant) undergoes selection of CD3 positive T lymphocytes using the CliniMACS Prodigy® System from Miltenyi Biotec and following the manufacturer’s recommendations. The expression of TRAC and β2M is eliminated by CRISP9 mediated knock-out using techniques known in the art and T cells lacking cell surface expression of TCR/CD3 complex and HLA are selected. Cells are activate using a CD3 and CD28 magnetic bead-based artificial antigen presenting cells and transduced with clinical grade CD20-SIR virus (e.g., CD8SP-MC7G5-Vb-[hTCRb-S57C]-F-P2A-IgSP-Apa-CD20-vHH-2HCD25-G4Sx3v2-MC7G5-Va-[hTCRa-T48C](SEQ ID NO: 3503]. Cells are expanded for 9-12 days in a closed system. After the resulting cell products have undergone quality control testing (including sterility and tumor specific cytotoxicity tests), they are cryopreserved. Meanwhile, study participants commence with lymphodepletive chemotherapy (30 mg/m²/day fludarabine plus 500 mg/m²/day cyclophosphamide x 3 days). One day after completion of their lymphodepleting regimen, the study participant receives transduced lymphocytes infused intravenously followed by high -dose (720,000 IU/kg) IL-2 (Aldesleukin; Prometheus, San Diego, CA) every 8 hours to tolerance. The SAR-T cell product is transported, thawed and infused at the patient’s bedside. The dose of SAR-T product may vary from 1 × 10⁴ SAR+ve CD3 cells/kg to 5 × 10⁹ SAR+ve CD3 cells/kg as per the study protocol. The SAR product may be administered in a single infusion or split infusions. Research participants can be pre-medicated at least 30 minutes prior to SAR-T cell infusion with 15 mg/kg of acetaminophen P.O. (max. 650 mg.) and diphenhydramine 0.5-1 mg/kg I.V. (max dose 50 mg). Clinical and laboratory correlative follow-up studies can then be performed at the physician’s discretion, and may include quantitative RT-PCR studies for the presence of CD20-expressing ALL/lymphoma cells and/or the adoptively transferred T cells; FDG-PET and/or CT scans; bone marrow examination for disease specific pathologic evaluation; lymph node biopsy; and/or long-term follow up per the guidelines set forth by the FDA’s Biologic Response Modifiers Advisory Committee that apply to gene transfer studies. Use of immunosuppressive drugs is also at the discretion of the physician. Essentially a similar approach can be used to treat other diseases using allogeneic immune cells (e.g., T cells) expressing the SAR of the disclosure where the SAR targets an antigen or antigens expressed on the disease causing or disease-associated cells. Essentially a similar protocol is used to test other SAR constructs listed in Tables 25-36.

[0898] SAR-T Cell Hepatic Arterial Infusion. In addition to intravenous infusion, SAR-T cells can be infused intra-arterially to provide high concentration of SAR-T cells in a local area or organ involved with a disease.

[0899] Intraperitoneal administration of SAR-T cells. SAR-T cells can also be administered intraperitoneally, essentially as described in Koneru M et al (Journal of Translational Medicine; 2015; 13:102).

[0900] Use of SAR-T cells for intratumoral injection. SAR-T cells can also be administered intra-tumorally, essentially as described in Brown CE, et al, Clin Cancer Res. 2015 September 15; 21(18): 4062-4072.

[0901] Use of SAR-T cells for ex-vivo purging of bone marrow or peripheral blood stem cell preparation prior to transplant. SAR T cells can be used to purge the bone marrow or peripheral blood stem cell preparation of cancer cells prior to stem cell transplant.

[0902] Use of SAR targeting PSMA for treatment of a patient with prostate cancer.

[0903] A patient with prostate cancer is administered Mozibil to mobilize lymphocytes and then undergoes apheresis. The T cells are purified and used to manufacture SAR-T cell product in GRex flask after transduction with a lentiviral vector expressing the SAR construct CD8SP-hu-PSMA-J591-vL-[hTCRb-S57C]-F-P2A-SP-hu-PSMA-J591-vH-[hTCRa-T48C] (SEQ ID NO: 9763). The subject receives lymphodepleting chemotherapy followed by infusion of the SAR-T cell product at dose of 5 million SAR-T cells/Kg.

### Use of SAR Targeting BCMA for Treatment of a Patient With Myeloma

[0904] A patient with myeloma undergoes apheresis. The T cells are purified and used to manufacture SAR-T cell product in GRex flask under hypoxic conditions after transduction with a lentiviral vector expressing the SAR construct CD8SP-BCMA-hu-USC82-S29G-vL-[hTCRb-S57C]-F-P2A-SP-BCMA-hu-USC73-G32S-vH-[hTCRa-T48C] (SEQ ID NO: 8314). The subject receives lymphodepleting chemotherapy followed by infusion of the SAR-T cell product at dose of 5 million SAR-T cells/Kg. Essentially similar procedure is used to administer other SAR-T cell products targeting BCMA (e.g., SEQ ID NO: 7415-7418, 7427.

### Use of Allogeneic SAR-T Cell Product

[0905] An allogeneic SAR-T product is generated by targeting the SAR construct TRAC-5-SA-F2A-CD8SP-CD19-vHH-048-G4Sx3-R1-hu-mROO5-1-vL-[hTCRb-S57C]-F-P2A-IgSP-Apa-CD20-vHH-2HCD25-G4Sx3v2-hu-mROO5-1-vH-[hTCRa-T48C]-STOP-pA-Del-Exon1-TRAC-3 (SEQ ID NO: 23) to the TRAC locus using techniques known in the arta. The expression of β2M is also eliminated using Cas9 mediated gene disruption using techniques known in the art. The allogeneic product is administered to a patient with B-cell ALL after lymphodepleting chemotherapy.

### Use of SAR Targeting MSLN for Treatment of a Patient With Ovarian Cancer

[0906] A patient with ovarian cancer undergoes apheresis. The T cells are purified and used to manufacture SAR-T cell product in GRex flask under hypoxic conditions after transduction with a lentiviral vector expressing the SAR construct CD8SP-MSLN-hu22A10-vL-Y96W-[hTCRb-S57C]-F-P2A-SP-MSLN-hu22A10-vH-[hTCRa-T48C] (SEQ ID NO: 10660). The subject receives lymphodepleting chemotherapy followed by infusion of the SAR-T cell product at dose of 5 million SAR-T cells/Kg. Essentially similar procedure is used to administer other SAR-T cell products targeting MSLN (SEQ ID NO: 10591, 10453, 10384-85 etc.).

[0907] T cells expressing ROR1 SARs induce cytotoxicity in ROR1-expressing cells. Human peripheral blood T cells isolated using CD3 magnetic beads are infected with lentiviruses expressing the SAR constructs (SEQ ID NO: 19065-19271) targeting ROR1. SAR-T cells are expanded in vitro for 10-14 days. A549 cells stably expressing GLuc are cocultured with T cells expressing the different CARs at an E:T ratio of 10:1 for 4 hours. SAR-T cells mediated induction of lysis of target cells is assayed using the Matador assay by measurement of GLuc activity. The in vivo activity of the SARs is demonstrated using a xenograft model in NSG mice.

[0908] T cells expressing CD229 SARs induce cytotoxicity in CD229-expressing cells. Human peripheral blood T cells isolated using CD3 magnetic beads are infected with lentiviruses expressing the SAR constructs (SEQ ID NO: 19883-20091) targeting CD229. SAR-T cells are expanded in vitro for 10-14 days. RAJI target cells stably expressing GLuc are cocultured with T cells expressing the different CARs at an E:T ratio of 10:1 for 4 hours. SAR-T cells mediated induction of lysis of target cells is assayed using the Matador assay by measurement of GLuc activity. The in vivo activity of the SARs is demonstrated using a xenograft model in NSG mice.

[0909] T cells expressing Toso SARs induce cytotoxicity in Toso-expressing cells. Human peripheral blood T cells isolated using CD3 magnetic beads are infected with lentiviruses expressing the SAR constructs (SEQ ID NO: 19686-19720) targeting Toso. SAR-T cells are expanded in vitro for 10-14 days. Target cells stably expressing GLuc are cocultured with T cells expressing the different CARs at an E:T ratio of 10:1 for 4 hours. SAR-T cells mediated induction of lysis of target cells is assayed using the Matador assay by measurement of GLuc activity. The in vivo activity of the SARs is demonstrated using a xenograft model in NSG mice.

[0910] T cells expressing SARS-CoV2 SARs induce cytotoxicity in Toso-expressing cells. Human peripheral blood T cells isolated using CD3 magnetic beads are infected with lentiviruses expressing the SAR constructs targeting SARS-Cov2 RBD. SAR-T cells are expanded in vitro for 10-14 days. K562 cells stably expressing GLuc and membrane bound form of RBD are cocultured with T cells expressing the different CARs at an E:T ratio of 10:1 for 4 hours. SAR-T cells mediated induction of lysis of target cells is assayed using the Matador assay by measurement of GLuc activity.

[0911] Essentially a similar procedure is used to demonstrate the in vitro and in vivo activity of other SARs of the disclosure targeting other antigens.

1. At least one recombinant polynucleotide encoding at least one synthetic antigen receptor (SAR) polypeptide, the at least one SAR polypeptide comprising:
a) a first module comprising one or more autonomous antigen binding domains (AABDs) or fragments thereof selected from the group of:
i) a single vH domain (SVH) or a fragment thereof;
ii) a single vL domain (SVL) or a fragment thereof;
iii) a vHH domain or a fragment thereof;
iv) a single domain antibody or a fragment thereof;
v) a single variable domain of a TCR (svd-TCR) or a fragment thereof;
vi) a non-immunoglobulin antigen binding scaffold selected from a DARPIN, an affibody, an affilis, an adnectin, an affitin, an obody, an repebody, an fynomer, an alphabody, an avimer, an atrimer, an centyrin, an pronecti, an anticalins, an kunitz domain, an Armadillo repeat protein and a D domain, or a fragment of any of the foregoing-,
vii) a ligand-binding domain of a receptor or a fragment thereof;
viii) a receptor-binding domain of a ligand;
ix) an autoantigen or a fragment thereof;
x) an adaptor binding domain or a fragment thereof; and
xi) an Fc binding domain or a fragment thereof;
b) a second module comprising vL (V_{L}), vH (V_{H}), Va/Vα, Vb1 (Vβ1), Vb2 (Vβ2), Vg (Vγ), Vd (Vδ), scFv, scTCR, lg linker domain or a combination thereof;
c) an optional third module comprising an extracellular domain, a connecting peptide or a hinge domain;
d) a fourth module that comprises a transmembrane domain; and
e) an optional fifth module comprising one or more intracellular signaling domains; where the first, second, optional third, fourth and the optional fifth modules are operationally linked via one or more optional linkers.
.

2. A recombinant polynucleotide encoding a SAR polypeptide of claim 1, where the one or more AABDs are attached via an optional linker to the N-terminus or near the N-terminus of
1) a first polypeptide chain comprising a vH, Va, Vg or an Ig linker domain fragment operably linked via an optional linker to a first T cell receptor constant chain fragment comprising a first connecting peptide operably linked to a first transmembrane domain of a first TCR subunit; and
2) a second polypeptide chain comprising a vL, Vb, Vd or an Ig linker domain operably linked via an optional linker to a second T cell receptor constant chain fragment comprising a second connecting peptide operably linked to a second transmembrane domain of a second TCR subunit;
wherein the first TCR constant chain fragment and the second TCR constant chain fragment form a T cell receptor module (TCRM) that is capable of recruiting at least one TCR-associated signaling module when expressed in a T cell.

3. The at least one recombinant polynucleotide encoding at least one SAR polypeptide of claim 2, wherein the encoded vH, Va, or Vg of the first antigen-binding domain and the vL, Vb or Vd of the second antigen-binding domain form an antigen-binding module that specifically binds to a target antigen.

4. The at least one recombinant polynucleotide encoding at least one SAR polypeptide of claim 1, wherein the AABD, vL, vH, Va, Vb, Vg, Vd and/or Ig linker domain is a fully human, humanized, chimeric or a non-human domain.

5. The at least one recombinant polynucleotide encoding at least one SAR polypeptide of claim 1, wherein the encoded Ig linker domain comprises a polypeptide with SEQ ID NO: 11832-11865 or a fragment or variant thereof with at least 70% sequence homology to a polypeptide having the sequence of SEQ ID NO: 11832-11865.

6. The at least one recombinant polynucleotide encoding at least one SAR polypeptide of claim 1, wherein the encoded optional linker domain comprises a polypeptide with SEQ ID NO: 11832-11865, 11714-11730 or a fragment or a variant thereof with at least 70% sequence homology to a polypeptide having the sequence of SEQ ID NO: 11832-11865, 11714-11730 or a domain that is between 25 to 500 amino acids in length.

7. The at least one recombinant polynucleotide encoding at least one SAR polypeptide of claim 1, comprising a partial or entire extacellular, transmbrane and intracellular domains of a polypeptide capable of being recruited to a T cell receptor module (TCRM).

8. The at least one recombinant polynucleotide encoding at least one SAR polypeptide of claim 1, comprising the extacellular, transmbrane and intracellular domains of a polypeptide selected from the group of CD3δ, CD3ε, CD3γ and CD3ζ or a fragment thereof with at leasst 70% sequence homology to a polypeptide having the sequence of any one of SEQ ID NO: 11903 to 11906.

9. The at least one recombinant polynucleotide encoding at least one SAR polypeptide of claim 2, wherein the encoded T cell receptor constant chain fragment comprises a polypeptide or a fragment thereof having at least 70% sequence homology to a polypeptide having the sequence of any one of SEQ ID NO: 11732-11830.

10. The at least one recombinant polynucleotide encoding at least one SAR of claim 2, wherein the encoded T cell receptor constant chain comprises a connecting peptide or a fragment thereof having at least 70% sequence homology to a connecting peptide having the sequence of any one of SEQ ID NO: 11867-11875.

11. The at least one recombinant polynucleotide encoding at least one SAR polypeptide of claim 1, comprising a transmembrane domain or a fragment thereof having at least 70% sequence homology to a transmembrane domain having a sequence of any one of SEQ ID NO: 11877-11881 or 23332-23334.

12. The at least one recombinant polynucleotide encoding at least one SAR polypeptide of claim 1, wherein the intracellular domain contains a cytosolic domain or a fragment thereof with at least 70% sequence homology to a polypeptide having the sequence of any one of SEQ ID NO: 11883-11886, 11785, or 23335-23337.

13. The at least one recombinant polynucleotide encoding at least one SAR polypeptide of claim 1 which has the backbone of a first generation CAR, a second generation CAR, a third generation CAR, a single chain SIR, a one and a half chain SIR, a double chain SIR, a zSIR, a single chain cTCR, a one and a half chain cTCR, a double chain cTCR, an Ab-TCR, an AABD-TCR, a TFPε, a TFPγ, a TFPδ, a TFPαβ, a TFPγδ, a Tri-TAC, a single chain TCR, a double chain TCR or an HLA-independent TCR.

14. The at least one recombinant polynucleotide encoding at least one SAR polypetpide of claim 1, wherein the SAR can bind to:
i) at least one antigen; and/or
ii) at least one epitope of one or more than antigen(s).

15. The at least one recombinant polynucleotide encoding at least one SAR polypeptide of claim 1, where the encoded two or more AABDs bind to:
i) at least one antigen; and/or
ii) at least one epitope of one or more than antigen(s).

16. The at least one recombinant polynucleotide encoding at least one SAR polypeptide of claim 1, wherein the encoded one or more antigen binding domains bind to at least one antigen selected from the group of CD5; CD19; CD123; CD22; CD30; CD171; CS1 (also referred to as CD2 subset 1, CRACC, SLAMF7, CD319, and 19A24); C-type lectin-like molecule-1 (CLL-1 or CLECL1 ); CD33; epidermal growth factor receptor variant III (EGFRviii); ganglioside G2 (GD2); ganglioside GD3 (aNeu5Ac(2-8)aNeu5Ac(2-3)bDGalp(I-4 )bDGlcp(I-I)Cer); TNF receptor family member B cell maturation (BCMA); Tn antigen ((Tn Ag) or (GaINAca-Ser/Thr)); prostate-specific membrane antigen (PSMA); Receptor tyrosine kinase-like orphan receptor 1 (ROR1); Fms Like Tyrosine Kinase 3 (FLT3); Tumor-associated glycoprotein 72 (TAG72); CD38; CD44v6; a glycosylated CD43 epitope expressed on acute leukemia or lymphoma but not on hematopoietic progenitors, a glycosylated CD43 epitope expressed on non-hematopoietic cancers, Carcinoembryonic antigen (CEA); Epithelial cell adhesion molecule (EPCAM); B7H3 (CD276); KIT (CD117); Interleukin-13 receptor subunit alpha-2 (IL-13Ra2 or CD213A2); Mesothelin; Interleukin 11 receptor alpha (IL-IIRa); prostate stem cell antigen (PSCA); Protease Serine 21 (Testisin or PRSS21); vascular endothelial growth factor receptor 2 (VEGFR2); Lewis(Y) antigen; CD24; Platelet-derived growth factor receptor beta (PDGFR-beta); Stage-specific embryonic antigen-4 (SSEA-4); CD20; Folate receptor alpha (FRa or FR1); Folate receptor beta (FRb); Receptor tyrosine-protein kinase ERBB2 (Her2/neu); Mucin 1, cell surface associated (MUC1); epidermal growth factor receptor (EGFR); neural cell adhesion molecule (NCAM); Prostase; prostatic acid phosphatase (PAP); elongation factor 2 mutated (ELF2M); Ephrin B2; fibroblast activation protein alpha (FAP); insulin-like growth factor 1 receptor (IGF-I receptor); carbonic anhydrase IX (CAIX); Proteasome (Prosome, Macropain) Subunit, Beta Type, 9 (LMP2); glycoprotein 100 (gp100); oncogene fusion protein consisting of breakpoint cluster region (BCR); Abelson murine leukemia viral oncogene homolog 1 (Abl) (bcr-abl); tyrosinase; ephrin type-A receptor 2 (EphA2); sialyl Lewis adhesion molecule (sLe); ganglioside GM3 (aNeu5Ac(2-3)bDClalp(I- 4)bDGIcp(l-1)Cer); transglutaminase 5 (TGS5); high molecular weight-melanoma associated antigen (HMWMAA); o-acetyl-GD2 ganglioside (OAcGD2); tumor endothelial marker 1 (TEM1/CD248); tumor endothelial marker 7-related (TEM7R); claudin 6 (CLDN6); thyroid stimulating hormone receptor (TSHR); G protein coupled receptor class C group 5, member D (GPRC5D); chromosome X open reading frame 61 (CXORF61); CD97; CD179a; anaplastic lymphoma kinase (ALK); Polysialic acid; placenta-specific 1 (PLAC1); hexasaccharide portion of globoH glycoceramide (GloboH); mammary gland differentiation antigen (NY-BR-1); uroplakin 2 (UPK2); Hepatitis A virus cellular receptor 1 (HAVCR1); adrenoceptor beta 3 (ADRB3); pannexin 3 (PANX3); G protein-coupled receptor 20 (GPR20); lymphocyte antigen 6 complex, locus K 9 (LY6K); Olfactory receptor 51E2 (OR51E2); TCR Gamma Alternate Reading Frame Protein (TARP); Wilms tumor protein (WT1); Cancer/testis antigen 1 (NY-ESO-1); Cancer/testis antigen 2 (LAGE-1 a); Melanoma-associated antigen 1 (MAGE-A1); ETS translocation-variant gene 6, located on chromosome 12p (ETV6-AML); sperm protein 17 (SPA17); X Antigen Family, Member IA (XAGEI); angiopoietin-binding cell surface receptor 2 (Tie 2); melanoma cancer testis antigen-1 (MAD-CT-1); melanoma cancer testis antigen-2 (MAD-CT-2); Fos-related antigen 1; tumor protein p53 (p53); p53 mutant; prostein; survivin; telomerase; prostate carcinoma tumor antigen-1 (PCT A-1 or Galectin 8), melanoma antigen recognized by T cells 1 (MelanA or MARTI); Rat sarcoma (Ras) mutant; human Telomerase reverse transcriptase (hTERT); sarcoma translocation breakpoints; melanoma inhibitor of apoptosis (ML-IAP); ERG (transmembrane protease, serine 2 (TMPRSS2) ETS fusion gene); N-Acetyl glucosaminyl-transferase V (NA17); paired box protein Pax-3 (PAX3); Androgen receptor; Cyclin BI; v-myc avian myelocytomatosis viral oncogene neuroblastoma derived homolog (MYCN); Ras Homolog Family Member C (RhoC); Tyrosinase-related protein 2 (TRP-2); Cytochrome P450 IB 1 (CYPIB 1); CCCTC-Binding Factor (Zinc Finger Protein)-Like (BORIS or Brother of the Regulator oflmprinted Sites), Squamous Cell Carcinoma Antigen Recognized By T Cells 3 (SART3); Paired box protein Pax-5 (PAX5); proacrosin binding protein sp32 (OY-TESI); lymphocyte-specific protein tyrosine kinase (LCK); A kinase anchor protein 4 (AKAP-4); synovial sarcoma, X breakpoint 2 (SSX2); Receptor for Advanced Glycation Endproducts (RAGE-1); renal ubiquitous 1 (RUI); renal ubiquitous 2 (RU2); legumain; human papilloma virus E6 (HPV E6); human papilloma virus E7 (HPV E7); intestinal carboxyl esterase; heat shock protein 70-2 mutated (mut hsp70-2); CD79a; CD79b; CD72; Leukocyte-associated immunoglobulin-like receptor 1 (LAIRI); Fc fragment of IgA receptor (FCAR or CD89); Leukocyte immunoglobulin-like receptor subfamily A member 2 (LILRA2); CD300 molecule-like family member f (CD300LF); C-type lectin domain family 12 member A (CLEC12A); bone marrow stromal cell antigen 2 (BST2); EGF-like module-containing mucin-like hormone receptor-like 2 (EMR2); lymphocyte antigen 75 (LY75); Glypican-3 (GPC3); Fc receptor-like 5 (FCRL5); immunoglobulin lambda-like polypeptide 1 (IGLLI); MPL; Biotin; c-MYC epitope Tag; CD34; LAMP1 TROP2; GFRalpha4; CDH17; CDH6; NYBR1; CDH19; CD200R,; Slea (CA19.9; Sialyl Lewis Antigen); Fucosyl-GM1; PTK7; gpNMB; CDH1-CD324; DLL3; CD276/B7H3; IL11 Ra; IL13Ra2; CD179b-IGL11; TCRgamma-delta; NKG2D; CD32 (FCGR2A),; Tn ag; Tim1-/HVCR1; CSF2RA (GM-CSFR-alpha); TGFbetaR2; Lews Ag; TCR-beta1 chain; TCR-beta2 chain; TCR-gamma chain; TCR-delta chain; FITC; Leutenizing hormone receptor (LHR); Follicle stimulating hormone receptor (FSHR); Gonadotropin Hormone receptor (CGHR or GR); CCR4; GD3; SLAMF6; SLAMF4; HIV1 envelope glycoprotein; HTLV1-Tax; CMV pp65; EBV-EBNA3c; KSHV K8.1; KSHV-gH; influenza A hemagglutinin (HA); GAD; PDL1; Guanylyl cyclase C (GCC); auto antibody to desmoglein 3 (Dsg3); auto antibody to desmoglein 1 (Dsg1); HLA; HLA-A; HLA-A2; HLA-B; HLA-C; HLA-DP; HLA-DM; HLA-DOA; HLA-DOB; HLA-DQ; HLA-DR; HLA-G; IgE, CD99; Ras G12V; Tissue Factor 1 (TF1); AFP; GPRC5D; Claudin18.2 (CLD18A2 or CLDN18A.2); P-glycoprotein; STEAP1; Liv1; Nectin-4; Cripto; gpA33; BST1/CD157; low conductance chloride channel (LCCC); TAJ/TROY; MPL (TPO-R); KIR3DL2; CD32b; CD229; Toso; GPC3; BAFF-R; MR1; CMV-pp65/MHC complex; and NYESO-1/MHC complex.

17. The at least one recombinant polynucleotide encoding at least one SAR of claim 1, wherein the encoded SAR polypeptide comprises one or more antigen binding domains selected from the group consisting of:
(i) a heavy chain variable region (vH) comprising a sequence as set forth in any of SEQ ID Nos: 10978-11214 or sequences with at least 70% identity thereto or sequences with at least 70% identity in the three complementarity determining regions (CDRs) to the sequences set forth in any one or more of SEQ ID NOS: 10978-11214 and 23148-23161 or sequences with less than 3 substitutions in the three CDRs of the sequences set forth in any one or more of SEQ ID NOS: 10978-11214 and 23148-23161 or sequences that bind to the same target antigens or the same epitopes on the target antigens as the sequences set forth in any one or more of SEQ ID NOS: 10978-11214 and 23148-23161 and which encodes a polypeptide that binds to its antigen;
(ii) a light chain variable region (vL) comprising a sequence as set forth in any one of SEQ ID NO: 10736-10972 or sequences with at least 70% identity to sequences set forth in any one or more of SEQ ID NOS: 10736-10972 and 23136-23147 or sequences with at least 70% identity in the three complementarity determining regions (CDRs) to the sequences set forth in any one or more of SEQ ID NOS: 10736-10972 and 23136-23147 or sequences with less than 3 substitutions in the three CDRs of the sequences set forth in any one or more of SEQ ID NOS: 10736-10972 and 23136-23147 or sequences that bind to the same target antigens or the same epitopes on the target antigens as the sequences set forth in any one or more of SEQ ID NOS: 10736-10972 and 23136-23147 and which encodes a polypeptide that binds to its antigen;
(iii) a single chain variable fragment (scFv) comprising a sequence as set forth in any one SEQ ID NO: 11220-11456 or sequences with at least 70% identity thereto and which encodes a polypeptide that binds to its antigen;
(iv) a camelid VHH domain comprising a sequence as set forth in any one of SEQ ID NO: SEQ ID NOS: 11524-11525, 11530-11531, 11549-11575, 11576-11592 and 23163-23173 or sequences with at least 70% identity to sequences set forth in any one or more of SEQ ID NOS: 11520-11592 and 23163-23173 and or sequences with at least 70% identity in the three complementarity determining regions (CDRs) to the sequences set forth in any one or more of SEQ ID NOS: 11524-11525, 11530-11531, 11549-11575, 11576-11592 and 23163-23173 or sequences with less than 3 substitutions in the three CDRs of the sequences set forth in any one or more of SEQ ID NOS: 11524-11525, 11530-11531, 11549-11575, 11576-11592 and 23163-23173 or sequences that bind to the same target antigens or the same epitopes on the target antigens as the sequences set forth in any one or more of SEQ ID NOS: 11524-11525, 11530-11531, 11549-11575, 11576-11592 and 23163-23173 and which encodes a polypeptide that binds to its antigen;
(v) a non-immunoglobulin scaffold encoded by a polynucleotide of any one of SEQ ID NOS: 11662-11673 or sequences with at least 70% identity to sequences set forth in any one or more of SEQ ID NOS: 11662-11673 or sequences that bind to the same target antigens or the same epitopes on the target antigens as the sequences set forth in any one or more of SEQ ID NOS: 11662-11673;
(vi) the ligand binding domain of a receptor comprising a sequence as set forth in any one of SEQ ID NO:11674-11691 or sequences with at least 70% identity thereto and which encodes a polypeptide that binds to its cognate;
(vii) the receptor binding domain of a ligand comprising a sequence as set forth in any one of SEQ ID NO 11692 to 11702, 22391-22392, 22402-22404 or sequences with at least 70% identity thereto and which encodes a polypeptide that binds to its cognate;
(viii) a single vH domain comprising a sequence as set forth in any one of SEQ ID NO: SEQ ID NOS: 11519-11523, 11526-11529, 11532-11548, 11644-11645 and 23174 or sequences with at least 70% identity to sequences set forth in any one or more of SEQ ID NOS: 11519-11523, 11526-11529, 11532-11548, 11644-11645 and 23174 and or sequences with 70% identity in the three complementarity determining regions (CDRs) to the sequences set forth in any one or more of SEQ ID NOS: 11519-11523, 11526-11529, 11532-11548, 11644-11645 and 23174 or sequences with less than 3 substitutions in the three CDRs of the sequences set forth in any one or more of SEQ ID NOS: 11519-11523, 11526-11529, 11532-11548, 11644-11645 and 23174 or sequences that bind to the same target antigens or the same epitopes on the target antigens as the sequences set forth in any one or more of SEQ ID NOS: 11519-11523, 11526-11529, 11532-11548, 11644-11645 and 23174 and which encodes a polypeptide that binds to its antigen;
(ix) an adaptor binding domain comprising a sequence as set forth in any one of SEQ ID NO 11704 to 11712, or 22383 or sequences with at least 70% identity thereto and which encodes a polypeptide that binds to its adaptor;
(x) an autoantigen comprising a sequence as set forth in any one of SEQ ID NO 11687, 22406-22407 to 11712, or 22383 or sequences with at least 70% identity thereto and which encodes a polypeptide that binds to its autoantibody or autoantibody producing cells;
(xi) a TCR variable region (Va, Vb, Vg or Vd) comprising a sequence as set forth in any of SEQ ID NOs: 22396-2239 and 11653-11660 or sequences with at least 70% identity thereto or sequences with at least 70% identity in the three complementarity determining regions (CDRs) to the sequences set forth in any one or more of SEQ ID NOS: 22396-22397 and 11653-11660 or sequences with less than 3 substitutions in the three CDRs of the sequences set forth in any one or more of SEQ ID NOS: 22396-22397 and 11653-11660 or sequences that bind to the same target antigens or the same epitopes on the target antigens as the sequences set forth in any one or more of SEQ ID NOS: 22396-22397 and 11653-11660 and which encodes a polypeptide that binds to its antigen; and
(xii) a single variable TCR domain (svd-TCR) comprising a sequence as set forth in any of SEQ ID NOs: 22399-22400 or sequences with at least 70% identity thereto or sequences with 70-99% identity in the three complementarity determining regions (CDRs) to the sequences set forth in any one or more of SEQ ID NOS: 22399-22400 or sequences with less than 3 substitutions in the three CDRs of the sequences set forth in any one or more of SEQ ID NOS: 22399-22400 or sequences that bind to the same target antigens or the same epitopes on the target antigens as the sequences set forth in any one or more of SEQ ID NOS: 22399-22400 and which encodes a polypeptide that binds to its antigen.

18. The at least one recombinant polynucleotide encoding at least one SAR polypeptide of claim 1, wherein at least one of the target antigens is expressed on blood lineage cells while at least one of the target antigens is expressed on solid tumor cells.

19. A recombinant expression system comprising the recombinant polynucleotide of claim 1 which is co-expressed with a therapeutic control, wherein the therapeutic control is selected from the group consisting of a truncated epidermal growth factor receptor (tEGFR), truncated epidermal growth factor receptor viii (tEGFRviii), truncated CD30 (tCD30), truncated BCMA (tBCMA), truncated CD19 (tCD19), CD34, thymidine kinase, cytosine deaminase, nitroreductase, xanthine-guanine phosphoribosyl transferase, human caspase 8, human caspase 9, inducible caspase 9 (icaspase9), purine nucleoside phosphorylase, linamarase/linamarin/glucose oxidase, deoxyribonucleoside kinase, horseradish peroxidase (HRP)/indole-3-acetic (IAA), Gamma-glutamylcysteine synthetase, CD20/alphaCD20, CD34/thymidine kinase chimera, dox-dependent caspase-2, mutant thymidine kinase (HSV-TKSR39), AP1903/Fas system, a chimeric cytokine receptor (CCR), 41BBL, CD40L, K13, MC159, cFLIP-L/MRITa, cFLIP-p22, HTLV1 Tax, HTLV2 Tax, HTLV2 Tax-RS mutant, FKBPx2-K13, FKBPx2-HTLV2-Tax, FKBPx2-HTLV2-Tax-RS, IL6R-304-vHH-Alb8-vHH, IL12f, PD1-4H1 scFV, PD1-5C4 scFV, PD1-4H1-Alb8-vHH, PD1-5C4-Alb8-vHH, CTLA4-lpilimumab-scFv, CTLA4-lpilimumab-Alb8-vHH, IL6-19A-scFV, IL6-19A-scFV-Alb8-vHH, sHVEM, sHVEM-Alb8-vHH, hTERT, Fx06, CD3z, CD3z-GGGS-41BB, CD3-BBz, CD3-CD28z, CD3-CD28-Lck fusion protein, shRNA targeting Brd4, chimeric antigen receptor (CAR), hTERT, heparinase, a CAR, an inhibitory CAR and combination thereof and combinations thereof.

20. At least one vector comprising the recombinant polynucleotide of claim 1, wherein the vector is selected from the group consisting of a DNA vector, an RNA vector, a plasmid, a lentivirus vector, an adenoviral vector, a retrovirus vector, a baculovirus vector, a sleeping beauty transposon vector, and a piggybac transposon vector.

21. At least one SAR polypeptide encoded by the at least one recombinant polynucleotide of claim 1.

22. A recombinant cell or a cell population that expresses the at least one recombinant polynucleotide of claim 1.

23. The cell or cell population of claim 22, wherein the cell is an immune effector cell or a stem cell that can give rise to an immune effector cell, or an induced pluripotent stem cell (iPSC) that can give rise to an immune effector cell.

24. The cell or cell population of claim 22, where the cell is an autologous cell or an allogeneic cell.

25. The cell or cell population of claim 22 with impaired or abolished functional expression of an endogenous TCR and with functional expression of a SAR polypeptide.

26. The cell or cell population of claim 22, where the SAR polypeptide is expressed from an expression cassette placed in the locus of an endogenous T cell gene.

27. The cell or cell population of claim 22, where the at least one polynucleotide is under the control of the promoter and/or regulatory elements for an endogenous T cell gene.

28. A cell or cell population of claim 26, where the endogenous T cell gene locus is TRAC locus, TRBC locus, TRGC locus and/or TRDC locus.

29. The cell or cell population of claim 26, wherein the placement of the SAR polynucleotide disrupts or abolishes the endogenous expression of a TCR comprising an endogenous TCRα chain and/or an endogenous TCRβ chain, or an endogenous TCRγ chain and/or endogenous TCRδ chain in the T cell.

30. The cell or cell population of claim 26, wherein the disruption or abolished expression of an endogenous TCR results in enhanced expression and/or activity of the non-naturally occurring immune receptor as compared to its expression and/or activity in T cells with wild-type endogenous TCR.

31. The cell or cell population of claim 30, wherein the SAR has the backbone of one or more of a SIR, a cTCR and/or an Ab-TCR.

32. The cell or cell population of claim 25, wherein the SAR polypeptide has the backbone of a TFP and the disruption or abolished expression of an endogenous TCR results in impaired expression and/or activity of the SAR as compared to its expression and/or activity in T cells with wild-type endogenous TCR.

33. The cell or cell population of claims 32, wherein the SAR polypeptide has the backbone of a TFP and the cell or cell population further expresses a sequence encoding a TCR constant chain, wherein the TCR constant chain is
i) a TCR alpha constant chain or fragment thereof, or
ii) a TCR beta constant chain or a fragment thereof, or
iii) a TCR gamma constant chain or fragment thereof, or
iv) a TCR delta constant chain or a fragment thereof, or
v) a combination of i) and ii) or iii) and iv).

34. The cell or cell population of claims 33, wherein the expression of a sequence encoding a TCR constant chain restores the expression and/or activity of the SAR polypeptide.

35. A method of making a SAR-expressing immune effector cell, comprising introducing at least one recombinant polynucleotide of claim 1 into an immune effector cell or a hematopoietic stem cell or progenitor cell that can give rise to an immune effector cell, under conditions such that the SAR polypeptide is expressed.

36. A method of expanding the SAR-expressing immune effector cells of claim 22 in a gas permeable flask under normoxic or hypoxic conditions.

37. A method of claim 36, where the SAR-expressing immune effector cells are expanded in the presence of a SMAC mimetic or a NIK agonist compound.

38. A method of providing anti-disease immunity in a subject comprising administering to the subject an effective amount of the immune effector cell or a stem cell that can give rise to an immune effector cell of claim 22, wherein the cell is an autologous T cell or an allogeneic T cell, or an autologous NKT cell or an allogeneic NKT cell or an autologous or an allogeneic hematopoietic stem cell or an autologous or an allogeneic iPSC that can give rise to an immune effector cell.

39. A method of treating or preventing a disease associated with expression of a disease-associated antigen in a subject, comprising administering to the subject an effective amount of an immune effector cell comprising a synthetic antigen receptor (SAR) polypeptide, wherein the SAR polypeptide bind to one or more disease-associated antigens selected from a group consisting of: CD5, CD19; CD123; CD22; CD23, CD30; CD171; CS-1 (also referred to as CD2 subset 1, CRACC, SLAMF7, CD319, and 19A24); C-type lectin-like molecule-1 (CLL-1 or CLECL1 ); CD33; epidermal growth factor receptor variant III (EGFRviii); ganglioside G2 (GD2); ganglioside GD3 (aNeu5Ac(2-8)aNeu5Ac(2-3)bDGalp(I-4 )bDGlcp(I-I)Cer); TNF receptor family member B cell maturation (BCMA); Tn antigen (Tn Ag) or (GaINAca-Ser/Thr)); prostate-specific membrane antigen (PSMA); Receptor tyrosine kinase-like orphan receptor 1 (ROR1); Fms Like Tyrosine Kinase 3 (FLT3); Tumor-associated glycoprotein 72 (TAG72); CD38; CD44v6; a glycosylated CD43 epitope expressed on acute leukemia or lymphoma but not on hematopoietic progenitors, a glycosylated CD43 epitope expressed on non-hematopoietic cancers, Carcinoembryonic antigen (CEA); Epithelial cell adhesion molecule (EPCAM); B7H3 (CD276); KIT (CD117); Interleukin-13 receptor subunit alpha-2 (IL-13Ra2 or CD213A2); Mesothelin; Interleukin 11 receptor alpha (IL-IIRa); prostate stem cell antigen (PSCA); Protease Serine 21 (Testisin or PRSS21); vascular endothelial growth factor receptor 2 (VEGFR2); Lewis(Y) antigen; CD24; Platelet-derived growth factor receptor beta (PDGFR-beta); Stage-specific embryonic antigen-4 (SSEA-4); CD20; Folate receptor alpha (FRa or FR1); Folate receptor beta (FRb); Receptor tyrosine-protein kinase ERBB2 (Her2/neu); Mucin 1, cell surface associated (MUC1); epidermal growth factor receptor (EGFR); neural cell adhesion molecule (NCAM); Prostase; prostatic acid phosphatase (PAP); elongation factor 2 mutated (ELF2M); Ephrin B2; fibroblast activation protein alpha (FAP); insulin-like growth factor 1 receptor (IGF-I receptor), carbonic anhydrase IX (CAIX); Proteasome (Prosome, Macropain) Subunit, Beta Type, 9 (LMP2); glycoprotein 100 (gp100); oncogene fusion protein consisting of breakpoint cluster region (BCR) and Abelson murine leukemia viral oncogene homolog 1 (Abl) (bcr-abl); tyrosinase; ephrin type-A receptor 2 (EphA2); Fucosyl GM1; sialyl Lewis adhesion molecule (sLe); ganglioside GM3 (aNeu5Ac(2-3)bDClalp(I- 4)bDGlcp(I-1 )Cer); transglutaminase 5 (TGS5); high molecular weight-melanoma associated antigen (HMWMAA); o-acetyl-GD2 ganglioside (OAcGD2); \tumor endothelial marker 1 (TEM1/CD248); tumor endothelial marker 7-related (TEM7R); claudin 6 (CLDN6); thyroid stimulating hormone receptor (TSHR); G protein coupled receptor class C group 5, member D (GPRC5D); chromosome X open reading frame 61 (CXORF61); CD97; CD179a; anaplastic lymphoma kinase (ALK); Polysialic acid; placenta-specific 1 (PLAC1); hexasaccharide portion of globoH glycoceramide (GloboH); mammary gland differentiation antigen (NY-BR-1); uroplakin 2 (UPK2); Hepatitis A virus cellular receptor 1 (HAVCR1); adrenoceptor beta 3 (ADRB3); pannexin 3 (PANX3); G protein-coupled receptor 20 (GPR20); lymphocyte antigen 6 complex, locus K 9 (LY6K); Olfactory receptor 51 E2 (OR51 E2); TCR Gamma Alternate Reading Frame Protein (TARP); Wilms tumor protein (WT1); Cancer/testis antigen 1 (NY-ES0-1); Cancer/testis antigen 2 (LAGE-1 a); Melanoma-associated antigen 1 (MAGE-A1); ETS translocation-variant gene 6, located on chromosome 12p (ETV6-AML); sperm protein 17 (SPA17); X Antigen Family, Member IA (XAGEI); angiopoietin-binding cell surface receptor 2 (Tie 2); melanoma cancer testis antigen-1 (MAD-CT-1); melanoma cancer testis antigen-2 (MAD-CT-2); Fos-related antigen 1; tumor protein p53 (p53); p53 mutant; prostein; surviving; telomerase; prostate carcinoma tumor antigen-1 (PCT A-1 or Galectin 8), melanoma antigen recognized by T cells 1 (MelanA or MARTI); Rat sarcoma (Ras) mutant; human Telomerase reverse transcriptase (hTERT); sarcoma translocation breakpoints; melanoma inhibitor of apoptosis (ML-IAP); ERG (transmembrane protease, serine 2 (TMPRSS2) ETS fusion gene); N-Acetyl glucosaminyl-transferase V (NA17); paired box protein Pax-3 (PAX3); Androgen receptor; Cyclin BI; v-myc avian myelocytomatosis viral oncogene neuroblastoma derived homolog (MYCN); Ras Homolog Family Member C (RhoC); Tyrosinase-related protein 2 (TRP-2); Cytochrome P450 IB 1 (CYPIB 1 ); CCCTC-Binding Factor (Zinc Finger Protein)-Like (BORIS or Brother of the Regulator oflmprinted Sites), Squamous Cell Carcinoma Antigen Recognized By T Cells 3 (SART3); Paired box protein Pax-5 (PAX5); proacrosin binding protein sp32 (OY-TESI); lymphocyte-specific protein tyrosine kinase (LCK); A kinase anchor protein 4 (AKAP-4); synovial sarcoma, X breakpoint 2 (SSX2); Receptor for Advanced Glycation End products (RAGE-1); renal ubiquitous 1 (RUI); renal ubiquitous 2 (RU2); legumain; human papilloma virus E6 (HPV E6); human papilloma virus E7 (HPV E7); intestinal carboxyl esterase; heat shock protein 70-2 mutated (mut hsp70-2); CD79a; CD79b; CD72; Leukocyte-associated immunoglobulin-like receptor 1 (LAIRI); Fc fragment of IgA receptor (FCAR or CD89); Leukocyte immunoglobulin-like receptor subfamily A member 2 (LILRA2); CD300 molecule-like family member f (CD300LF); C-type lectin domain family 12 member A (CLEC12A); bone marrow stromal cell antigen 2 (BST2); EGF-like module-containing mucin-like hormone receptor-like 2 (EMR2); lymphocyte antigen 75 (LY75); Glypican-3 (GPC3); Fc receptor-like 5 (FCRL5); and immunoglobulin lambda-like polypeptide 1 (IGLLI), MPL, Biotin, c-MYC epitope Tag, CD34, LAMP1 TROP2, GFRalpha4, CDH17, CDH6, NYBR1, CDH19, CD200R, Slea (CA19.9; Sialyl Lewis Antigen); Fucosyl-GM1, PTK7, gpNMB, CDH1-CD324, DLL3, CD276/B7H3, IL11Ra, IL13Ra2, CD179b-IGL11, TCRgamma-delta, NKG2D, CD32 (FCGR2A), Tim1-/HVCR1, CSF2RA (GM-CSFR-alpha), TGFbetaR2, , Lews Ag, TCR-beta1 chain, TCR-beta2 chain, TCR-gamma chain, TCR-delta chain, FITC, Leutenizing hormone receptor (LHR), Follicle stimulating hormone receptor (FSHR), Chorionic Gonadotropin Hormone receptor (CGHR), CCR4, SLAMF6, SLAMF4, HIV1 envelope glycoprotein, HTLV1-Tax, CMV pp65, EBV-EBNA3c, KSHV K8.1, KSHV-gH, influenza A hemagglutinin (HA), GAD, PDL1, Guanylyl cyclase C (GCC), auto antibody to desmoglein 3 (Dsg3) and desmoglein 1 (Dsg1), HLA, HLA-A, HLA-A2, HLA-B, HLA-C, HLA-DP, HLA-DM, HLA-DOA, HLA-DOB, HLA-DQ, HLA-DR, HLA-G, IGE, CD99, RAS G12V, Tissue Factor 1 (TF1), AFP, GPRC5D, claudin18.2 (CLD18A2 OR CLDN18A.2)), P-glycoprotein, STEAP1, LIV1, NECTIN-4, CRIPTO, GPA33, BST1/CD157, low conductance chloride channel, TAJ/TROY, MPL (TPO-R), KIR3DL2, CD32b, CD229, Toso, GPC3, MR1, NYESO-1/MHC complex, CMVpp65/MHC complex.

40. The method of claim 39, wherein the disease associated with expression of the disease associated antigen is selected from the group consisting of a proliferative disease, a precancerous condition, a cancer, and a non-cancer related indication associated with expression of the disease-associated antigen.

41. A recombinant polynucleotide encoding a SAR polypeptide, the polynucleotide comprising a sequence selected from the group consisting of SEQ ID NO: 1849-10720, 21609-21625, 21626-21659, 21662-21792. 21808, 21813-21840, 21843-21879, 21882- 21892, 21894-21899, 21901-21947, 21949-21963, 21967-21972, 21985-22085, 22087-22099, 22104-22207, 22209-22250, 22252-22254, 22256-22262, 22264-22273, 22275-22284, 22286-22296 and 22307-22312 or a sequence with at least 75% identity to the nucleotide sequence of the above.

42-44. (canceled)

The application's sequence listing, which the Patent Office published only in electronic form, follows.

SEQUENCE LISTING (23343 sequences)

SEQ ID NO: 1 - DNA, 7484 bp, Artificial Sequence
  Synthetic Polynucloetide
aatgtagtcttatgcaatactcttgtagtcttgcaacatggtaacgatgagttagcaacatgccttacaaggagagaaaaagcaccgtgcatgccgattggtggaagtaaggtggtacgatcgtgccttattaggaaggcaacagacgggtctgacatggattggacgaaccactgaattgccgcattgcagagatattgtatttaagtgcctagctcgatacataaacgggtctctctggttagaccagatctgagcctgggagctctctggctaactagggaacccactgcttaagcctcaataaagcttgccttgagtgcttcaagtagtgtgtgcccgtctgttgtgtgactctggtaactagagatccctcagacccttttagtcagtgtggaaaatctctagcagtggcgcccgaacagggacttgaaagcgaaagggaaaccagaggagctctctcgacgcaggactcggcttgctgaagcgcgcacggcaagaggcgaggggcggcgactggtgagtacgccaaaaattttgactagcggaggctagaaggagagagatgggtgcgagagcgtcagtattaagcgggggagaattagatcgcgatgggaaaaaattcggttaaggccagggggaaagaaaaaatataaattaaaacatatagtatgggcaagcagggagctagaacgattcgcagttaatcctggcctgttagaaacatcagaaggctgtagacaaatactgggacagctacaaccatcccttcagacaggatcagaagaacttagatcattatataatacagtagcaaccctctattgtgtgcatcaaaggatagagataaaagacaccaaggaagctttagacaagatagaggaagagcaaaacaaaagtaagaccaccgcacagcaagcggccgctgatcttcagacctggaggaggagatatgagggacaattggagaagtgaattatataaatataaagtagtaaaaattgaaccattaggagtagcacccaccaaggcaaagagaagagtggtgcagagagaaaaaagagcagtgggaataggagctttgttccttgggttcttgggagcagcaggaagcactatgggcgcagcgtcaatgacgctgacggtacaggccagacaattattgtctggtatagtgcagcagcagaacaatttgctgagggctattgaggcgcaacagcatctgttgcaactcacagtctggggcatcaagcagctccaggcaagaatcctggctgtggaaagatacctaaaggatcaacagctcctggggatttggggttgctctggaaaactcatttgcaccactgctgtgccttggaatgctagttggagtaataaatctctggaacagatttggaatcacacgacctggatggagtgggacagagaaattaacaattacacaagcttaatacactccttaattgaagaatcgcaaaaccagcaagaaaagaatgaacaagaattattggaattagataaatgggcaagtttgtggaattggtttaacataacaaattggctgtggtatataaaattattcataatgatagtaggaggcttggtaggtttaagaatagtttttgctgtactttctatagtgaatagagttaggcagggatattcaccattatcgtttcagacccacctcccaaccccgaggggacccgacaggcccgaaggaatagaagaagaaggtggagagagagacagagacagatccattcgattagtgaacggatctcgacggtatcggttaacttttaaaagaaaaggggggattggggggtacagtgcaggggaaagaatagtagacataatagcaacagacatacaaactaaagaattacaaaaacaaattacaaaattcaaaattttatcgataagctttgcaaagatggataaagttttaaacagagaggaatctttgcagctaatggaccttctaggtcttgaaaggagtgcctcgtgaggctccggtgcccgtcagtgggcagagcgcacatcgcccacagtccccgagaagttggggggaggggtcggcaattgaaccggtgcctagagaaggtggcgcggggtaaactgggaaagtgatgtcgtgtactggctccgcctttttcccgagggtgggggagaaccgtatataagtgcagtagtcgccgtgaacgttctttttcgcaacgggtttgccgccagaacacaggtaagtgccgtgtgtggttcccgcgggcctggcctctttacgggttatggcccttgcgtgccttgaattacttccacctggctgcagtacgtgattcttgatcccgagcttcgggttggaagtgggtgggagagttcgaggccttgcgcttaaggagccccttcgcctcgtgcttgagttgaggcctggcctgggcgctggggccgccgcgtgcgaatctggtggcaccttcgcgcctgtctcgctgctttcgataagtctctagccatttaaaatttttgatgacctgctgcgacgctttttttctggcaagatagtcttgtaaatgcgggccaagatctgcacactggtatttcggtttttggggccgcgggcggcgacggggcccgtgcgtcccagcgcacatgttcggcgaggcggggcctgcgagcgcggccaccgagaatcggacgggggtagtctcaagctggccggcctgctctggtgcctggcctcgcgccgccgtgtatcgccccgccctgggcggcaaggctggcccggtcggcaccagttgcgtgagcggaaagatggccgcttcccggccctgctgcagggagctcaaaatggaggacgcggcgctcgggagagcgggcgggtgagtcacccacacaaaggaaaagggcctttccgtcctcagccgtcgcttcatgtgactccacggagtaccgggcgccgtccaggcacctcgattagttctcgaccttttggagtacgtcgtctttaggttggggggaggggttttatgcgatggagtttccccacactgagtgggtggagactgaagttaggccagcttggcacttgatgtaattctccttggaatttgccctttttgagtttggatcttggttcattctcaagcctcagacagtggttcaaagtttttttcttccatttcaggtgtcgtgaggaattagcttggtactaatacgactcactatagggagacccaagctggctaggtaagcttgatatcgaattcctgcagcccgggggatctgctagcgtcgactccggatgatcagggccctgtacagatatcgacaatcaacctctggattacaaaatttgtgaaagattgactggtattcttaactatgttgctccttttacgctatgtggatacgctgctttaatgcctttgtatcatgctattgcttcccgtatggctttcattttctcctccttgtataaatcctggttgctgtctctttatgaggagttgtggcccgttgtcaggcaacgtggcgtggtgtgcactgtgtttgctgacgcaacccccactggttggggcattgccaccacctgtcagctcctttccgggactttcgctttccccctccctattgccacggcggaactcatcgccgcctgccttgcccgctgctggacaggggctcggctgttgggcactgacaattccgtggtgttgtcggggaagctgacgtcctttccatggctgctcgcctgtgttgccacctggattctgcgcgggacgtccttctgctacgtcccttcggccctcaatccagcggaccttccttcccgcggcctgctgccggctctgcggcctcttccgcgtcttcgccttcgccctcagacgagtcggatctccctttgggccgcctccccgcctggaattcgagctcggtacctttaagaccaatgacttacaaggcagctgtagatcttagccactttttaaaagaaaaggggggactggaagggctaattcactcccaacgaagacaagatctgctttttgcttgtactgggtctctctggttagaccagatctgagcctgggagctctctggctaactagggaacccactgcttaagcctcaataaagcttgccttgagtgcttcaagtagtgtgtgcccgtctgttgtgtgactctggtaactagagatccctcagacccttttagtcagtgtggaaaatctctagcagtagtagttcatgtcatcttattattcagtatttataacttgcaaagaaatgaatatcagagagtgagaggaacttgtttattgcagcttataatggttacaaataaagcaatagcatcacaaatttcacaaataaagcatttttttcactgcattctagttgtggtttgtccaaactcatcaatgtatcttatcatgtctggctctagctatcccgcccctaactccgcccatcccgcccctaactccgcccagttccgcccattctccgccccatggctgactaattttttttatttatgcagaggccgaggccgcctcggcctctgagctattccagaagtagtgaggaggcttttttggaggcctagggacgtacccaattcgccctatagtgagtcgtattacgcgcgctcactggccgtcgttttacaacgtcgtgactgggaaaaccctggcgttacccaacttaatcgccttgcagcacatccccctttcgccagctggcgtaatagcgaagaggcccgcaccgatcgcccttcccaacagttgcgcagcctgaatggcgaatgggacgcgccctgtagcggcgcattaagcgcggcgggtgtggtggttacgcgcagcgtgaccgctacacttgccagcgccctagcgcccgctcctttcgctttcttcccttcctttctcgccacgttcgccggctttccccgtcaagctctaaatcgggggctccctttagggttccgatttagtgctttacggcacctcgaccccaaaaaacttgattagggtgatggttcacgtagtgggccatcgccctgatagacggtttttcgccctttgacgttggagtccacgttctttaatagtggactcttgttccaaactggaacaacactcaaccctatctcggtctattcttttgatttataagggattttgccgatttcggcctattggttaaaaaatgagctgatttaacaaaaatttaacgcgaattttaacaaaatattaacgcttacaatttaggtggcacttttcggggaaatgtgcgcggaacccctatttgtttatttttctaaatacattcaaatatgtatccgctcatgagacaataaccctgataaatgcttcaataatattgaaaaaggaagagtatgagtattcaacatttccgtgtcgcccttattcccttttttgcggcattttgccttcctgtttttgctcacccagaaacgctggtgaaagtaaaagatgctgaagatcagttgggtgcacgagtgggttacatcgaactggatctcaacagcggtaagatccttgagagttttcgccccgaagaacgttttccaatgatgagcacttttaaagttctgctatgtggcgcggtattatcccgtattgacgccgggcaagagcaactcggtcgccgcatacactattctcagaatgacttggttgagtactcaccagtcacagaaaagcatcttacggatggcatgacagtaagagaattatgcagtgctgccataaccatgagtgataacactgcggccaacttacttctgacaacgatcggaggaccgaaggagctaaccgcttttttgcacaacatgggggatcatgtaactcgccttgatcgttgggaaccggagctgaatgaagccataccaaacgacgagcgtgacaccacgatgcctgtagcaatggcaacaacgttgcgcaaactattaactggcgaactacttactctagcttcccggcaacaattaatagactggatggaggcggataaagttgcaggaccacttctgcgctcggcccttccggctggctggtttattgctgataaatctggagccggtgagcgtgggtctcgcggtatcattgcagcactggggccagatggtaagccctcccgtatcgtagttatctacacgacggggagtcaggcaactatggatgaacgaaatagacagatcgctgagataggtgcctcactgattaagcattggtaactgtcagaccaagtttactcatatatactttagattgatttaaaacttcatttttaatttaaaaggatctaggtgaagatcctttttgataatctcatgaccaaaatcccttaacgtgagttttcgttccactgagcgtcagaccccgtagaaaagatcaaaggatcttcttgagatcctttttttctgcgcgtaatctgctgcttgcaaacaaaaaaaccaccgctaccagcggtggtttgtttgccggatcaagagctaccaactctttttccgaaggtaactggcttcagcagagcgcagataccaaatactgttcttctagtgtagccgtagttaggccaccacttcaagaactctgtagcaccgcctacatacctcgctctgctaatcctgttaccagtggctgctgccagtggcgataagtcgtgtcttaccgggttggactcaagacgatagttaccggataaggcgcagcggtcgggctgaacggggggttcgtgcacacagcccagcttggagcgaacgacctacaccgaactgagatacctacagcgtgagctatgagaaagcgccacgcttcccgaagggagaaaggcggacaggtatccggtaagcggcagggtcggaacaggagagcgcacgagggagcttccagggggaaacgcctggtatctttatagtcctgtcgggtttcgccacctctgacttgagcgtcgatttttgtgatgctcgtcaggggggcggagcctatggaaaaacgccagcaacgcggcctttttacggttcctggccttttgctggccttttgctcacatgttctttcctgcgttatcccctgattctgtggataaccgtattaccgcctttgagtgagctgataccgctcgccgcagccgaacgaccgagcgcagcgagtcagtgagcgaggaagcggaagagcgcccaatacgcaaaccgcctctccccgcgcgttggccgattcattaatgcagctggcacgacaggtttcccgactggaaagcgggcagtgagcgcaacgcaattaatgtgagttagctcactcattaggcaccccaggctttacactttatgcttccggctcgtatgttgtgtggaattgtgagcggataacaatttcacacaggaaacagctatgaccatgattacgccaagcgcgcaattaaccctcactaaagggaacaaaagctggagctgcaagctt

SEQ ID NO: 2 - DNA, 6883 bp, Artificial Sequence
  Synthetic Polynucloetide
aatgtagtcttatgcaatactcttgtagtcttgcaacatggtaacgatgagttagcaacatgccttacaaggagagaaaaagcaccgtgcatgccgattggtggaagtaaggtggtacgatcgtgccttattaggaaggcaacagacgggtctgacatggattggacgaaccactgaattgccgcattgcagagatattgtatttaagtgcctagctcgatacataaacgggtctctctggttagaccagatctgagcctgggagctctctggctaactagggaacccactgcttaagcctcaataaagcttgccttgagtgcttcaagtagtgtgtgcccgtctgttgtgtgactctggtaactagagatccctcagacccttttagtcagtgtggaaaatctctagcagtggcgcccgaacagggacttgaaagcgaaagggaaaccagaggagctctctcgacgcaggactcggcttgctgaagcgcgcacggcaagaggcgaggggcggcgactggtgagtacgccaaaaattttgactagcggaggctagaaggagagagatgggtgcgagagcgtcagtattaagcgggggagaattagatcgcgatgggaaaaaattcggttaaggccagggggaaagaaaaaatataaattaaaacatatagtatgggcaagcagggagctagaacgattcgcagttaatcctggcctgttagaaacatcagaaggctgtagacaaatactgggacagctacaaccatcccttcagacaggatcagaagaacttagatcattatataatacagtagcaaccctctattgtgtgcatcaaaggatagagataaaagacaccaaggaagctttagacaagatagaggaagagcaaaacaaaagtaagaccaccgcacagcaagcggccgctgatcttcagacctggaggaggagatatgagggacaattggagaagtgaattatataaatataaagtagtaaaaattgaaccattaggagtagcacccaccaaggcaaagagaagagtggtgcagagagaaaaaagagcagtgggaataggagctttgttccttgggttcttgggagcagcaggaagcactatgggcgcagcgtcaatgacgctgacggtacaggccagacaattattgtctggtatagtgcagcagcagaacaatttgctgagggctattgaggcgcaacagcatctgttgcaactcacagtctggggcatcaagcagctccaggcaagaatcctggctgtggaaagatacctaaaggatcaacagctcctggggatttggggttgctctggaaaactcatttgcaccactgctgtgccttggaatgctagttggagtaataaatctctggaacagatttggaatcacacgacctggatggagtgggacagagaaattaacaattacacaagcttaatacactccttaattgaagaatcgcaaaaccagcaagaaaagaatgaacaagaattattggaattagataaatgggcaagtttgtggaattggtttaacataacaaattggctgtggtatataaaattattcataatgatagtaggaggcttggtaggtttaagaatagtttttgctgtactttctatagtgaatagagttaggcagggatattcaccattatcgtttcagacccacctcccaaccccgaggggacccgacaggcccgaaggaatagaagaagaaggtggagagagagacagagacagatccattcgattagtgaacggatctcgacggtatcggttaacttttaaaagaaaaggggggattggggggtacagtgcaggggaaagaatagtagacataatagcaacagacatacaaactaaagaattacaaaaacaaattacaaaattcaaaattttatcgataagctttgcaaagatggataaagttttaaacagagaggaatctttgcagctaatggaccttctaggtcttgaaaggagtgcctcgtgaggctccggtgcccgtcagtgggcagagcgcacatcgcccacagtccccgagaagttggggggaggggtcggcaattgaaccggtgcctagagaaggtggcgcggggtaaactgggaaagtgatgtcgtgtactggctccgcctttttcccgagggtgggggagaaccgtatataagtgcagtagtcgccgtgaacgttctttttcgcaacgggtttgccgccagaacacaggtaagtgccgtgtgtggttcccgcgggcctggcctctttacgggttatggcccttgcgtgccttgaattacttccacctggctgcagtacgtgattcttgatcccgagcttcgggttggaagtgggtgggagagttcgaggccttgcgcttaaggagccccttcgcctcgtgcttgagttgaggcctggcctgggcgctggggccgccgcgtgcgaatctggtggcaccttcgcgcctgtctcgctgctttcgataagtctctagccatttaaaatttttgatgacctgctgcgacgctttttttctggcaagatagtcttgtaaatgcgggccaagatctgcacactggtatttcggtttttggggccgcgggcggcgacggggcccgtgcgtcccagcgcacatgttcggcgaggcggggcctgcgagcgcggccaccgagaatcggacgggggtagtctcaagctggccggcctgctctggtgcctggcctcgcgccgccgtgtatcgccccgccctgggcggcaaggctggcccggtcggcaccagttgcgtgagcggaaagatggccgcttcccggccctgctgcagggagctcaaaatggaggacgcggcgctcgggagagcgggcgggtgagtcacccacacaaaggaaaagggcctttccgtcctcagccgtcgcttcatgtgactccacggagtaccgggcgccgtccaggcacctcgattagttctcgaccttttggagtacgtcgtctttaggttggggggaggggttttatgcgatggagtttccccacactgagtgggtggagactgaagttaggccagcttggcacttgatgtaattctccttggaatttgccctttttgagtttggatcttggttcattctcaagcctcagacagtggttcaaagtttttttcttccatttcaggtgtcgtgaggaattagcttggtactaatacgactcactatagggagacccaagctggctaggtaagcttgatatcgaattcctgcagcccgggggatctgctagcgtcgacggcgaatccggactatagtgtcacctaaatgctagacgtacctttaagaccaatgacttacaaggcagctgtagatcttagccactttttaaaagaaaaggggggactggaagggctaattcactcccaacgaagacaagatctgctttttgcttgtactgggtctctctggttagaccagatctgagcctgggagctctctggctaactagggaacccactgcttaagcctcaataaagcttgccttgagtgcttcaagtagtgtgtgcccgtctgttgtgtgactctggtaactagagatccctcagacccttttagtcagtgtggaaaatctctagcagtagtagttcatgtcatcttattattcagtatttataacttgcaaagaaatgaatatcagagagtgagaggaacttgtttattgcagcttataatggttacaaataaagcaatagcatcacaaatttcacaaataaagcatttttttcactgcattctagttgtggtttgtccaaactcatcaatgtatcttatcatgtctggctctagctatcccgcccctaactccgcccatcccgcccctaactccgcccagttccgcccattctccgccccatggctgactaattttttttatttatgcagaggccgaggccgcctcggcctctgagctattccagaagtagtgaggaggcttttttggaggcctagggacgtacccaattcgccctatagtgagtcgtattacgcgcgctcactggccgtcgttttacaacgtcgtgactgggaaaaccctggcgttacccaacttaatcgccttgcagcacatccccctttcgccagctggcgtaatagcgaagaggcccgcaccgatcgcccttcccaacagttgcgcagcctgaatggcgaatgggacgcgccctgtagcggcgcattaagcgcggcgggtgtggtggttacgcgcagcgtgaccgctacacttgccagcgccctagcgcccgctcctttcgctttcttcccttcctttctcgccacgttcgccggctttccccgtcaagctctaaatcgggggctccctttagggttccgatttagtgctttacggcacctcgaccccaaaaaacttgattagggtgatggttcacgtagtgggccatcgccctgatagacggtttttcgccctttgacgttggagtccacgttctttaatagtggactcttgttccaaactggaacaacactcaaccctatctcggtctattcttttgatttataagggattttgccgatttcggcctattggttaaaaaatgagctgatttaacaaaaatttaacgcgaattttaacaaaatattaacgcttacaatttaggtggcacttttcggggaaatgtgcgcggaacccctatttgtttatttttctaaatacattcaaatatgtatccgctcatgagacaataaccctgataaatgcttcaataatattgaaaaaggaagagtatgagtattcaacatttccgtgtcgcccttattcccttttttgcggcattttgccttcctgtttttgctcacccagaaacgctggtgaaagtaaaagatgctgaagatcagttgggtgcacgagtgggttacatcgaactggatctcaacagcggtaagatccttgagagttttcgccccgaagaacgttttccaatgatgagcacttttaaagttctgctatgtggcgcggtattatcccgtattgacgccgggcaagagcaactcggtcgccgcatacactattctcagaatgacttggttgagtactcaccagtcacagaaaagcatcttacggatggcatgacagtaagagaattatgcagtgctgccataaccatgagtgataacactgcggccaacttacttctgacaacgatcggaggaccgaaggagctaaccgcttttttgcacaacatgggggatcatgtaactcgccttgatcgttgggaaccggagctgaatgaagccataccaaacgacgagcgtgacaccacgatgcctgtagcaatggcaacaacgttgcgcaaactattaactggcgaactacttactctagcttcccggcaacaattaatagactggatggaggcggataaagttgcaggaccacttctgcgctcggcccttccggctggctggtttattgctgataaatctggagccggtgagcgtgggtctcgcggtatcattgcagcactggggccagatggtaagccctcccgtatcgtagttatctacacgacggggagtcaggcaactatggatgaacgaaatagacagatcgctgagataggtgcctcactgattaagcattggtaactgtcagaccaagtttactcatatatactttagattgatttaaaacttcatttttaatttaaaaggatctaggtgaagatcctttttgataatctcatgaccaaaatcccttaacgtgagttttcgttccactgagcgtcagaccccgtagaaaagatcaaaggatcttcttgagatcctttttttctgcgcgtaatctgctgcttgcaaacaaaaaaaccaccgctaccagcggtggtttgtttgccggatcaagagctaccaactctttttccgaaggtaactggcttcagcagagcgcagataccaaatactgttcttctagtgtagccgtagttaggccaccacttcaagaactctgtagcaccgcctacatacctcgctctgctaatcctgttaccagtggctgctgccagtggcgataagtcgtgtcttaccgggttggactcaagacgatagttaccggataaggcgcagcggtcgggctgaacggggggttcgtgcacacagcccagcttggagcgaacgacctacaccgaactgagatacctacagcgtgagctatgagaaagcgccacgcttcccgaagggagaaaggcggacaggtatccggtaagcggcagggtcggaacaggagagcgcacgagggagcttccagggggaaacgcctggtatctttatagtcctgtcgggtttcgccacctctgacttgagcgtcgatttttgtgatgctcgtcaggggggcggagcctatggaaaaacgccagcaacgcggcctttttacggttcctggccttttgctggccttttgctcacatgttctttcctgcgttatcccctgattctgtggataaccgtattaccgcctttgagtgagctgataccgctcgccgcagccgaacgaccgagcgcagcgagtcagtgagcgaggaagcggaagagcgcccaatacgcaaaccgcctctccccgcgcgttggccgattcattaatgcagctggcacgacaggtttcccgactggaaagcgggcagtgagcgcaacgcaattaatgtgagttagctcactcattaggcaccccaggctttacactttatgcttccggctcgtatgttgtgtggaattgtgagcggataacaatttcacacaggaaacagctatgaccatgattacgccaagcgcgcaattaaccctcactaaagggaacaaaagctggagctgcaagctt

SEQ ID NO: 3 - DNA, 5150 bp, Artificial Sequence
  Synthetic Polynucloetide
tgaaagaccccacctgtaggtttggcaagctagcttaagtaacgccattttgcaaggcatggaaaatacataactgagaatagagaagttcagatcaaggttaggaacagagagacagcagaatatgggccaaacaggatatctgtggtaagcagttcctgccccggctcagggccaagaacagatggtccccagatgcggtcccgccctcagcagtttctagagaaccatcagatgtttccagggtgccccaaggacctgaaatgaccctgtgccttatttgaactaaccaatcagttcgcttctcgcttctgttcgcgcgcttctgctccccgagctcaataaaagagcccacaacccctcactcggcgcgccagtcctccgatagactgcgtcgcccgggtacccgtattcccaataaagcctcttgctgtttgcatccgaatcgtggactcgctgatccttgggagggtctcctcagattgattgactgcccacctcgggggtctttcatttggaggttccaccgagatttggagacccctgcccagggaccaccgacccccccgccgggaggtaagctggccagcggtcgtttcgtgtctgtctctgtctttgtgcgtgtttgtgccggcatctaatgtttgcgcctgcgtctgtactagttagctaactagctctgtatctggcggacccgtggtggaactgacgagttctgaacacccggccgcaaccctgggagacgtcccagggactttgggggccgtttttgtggcccgacctgaggaagggagtcgatgtggaatccgaccccgtcaggatatgtggttctggtaggagacgagaacctaaaacagttcccgcctccgtctgaatttttgctttcggtttggaaccgaagccgcgcgtcttgtctgctgcagcgctgcagcatcgttctgtgttgtctctgtctgactgtgtttctgtatttgtctgaaaattagggccagactgttaccactcccttaagtttgaccttaggtcactggaaagatgtcgagcggatcgctcacaaccagtcggtagatgtcaagaagagacgttgggttaccttctgctctgcagaatggccaacctttaacgtcggatggccgcgagacggcacctttaaccgagacctcatcacccaggttaagatcaaggtcttttcacctggcccgcatggacacccagaccaggtcccctacatcgtgacctgggaagccttggcttttgacccccctccctgggtcaagccctttgtacaccctaagcctccgcctcctcttcctccatccgccccgtctctcccccttgaacctcctcgttcgaccccgcctcgatcctccctttatccagccctcactccttctctaggcgccggaattagatctcctaggatccaagaattcggctcgagttcgaagggacgcgtaatgtcgacatcgataaaataaaagattttatttagtctccagaaaaaggggggaatgaaagaccccacctgtaggtttggcaagctagcttaagtaacgccattttgcaaggcatggaaaatacataactgagaatagagaagttcagatcaaggttaggaacagagagacagcagaatatgggccaaacaggatatctgtggtaagcagttcctgccccggctcagggccaagaacagatggtccccagatgcggtcccgccctcagcagtttctagagaaccatcagatgtttccagggtgccccaaggacctgaaatgaccctgtgccttatttgaactaaccaatcagttcgcttctcgcttctgttcgcgcgcttctgctccccgagctcaataaaagagcccacaacccctcactcggcgcgccagtcctccgatagactgcgtcgcccgggtacccgtgtatccaataaaccctcttgcagttgcatccgacttgtggtctcgctgttccttgggagggtctcctctgagtgattgactacccgtcagcgggggtctttcatgggtaacagtttcttgaagttggagaacaacattctgagggtaggagtcgaatattaagtaatcctgactcaattagccactgttttgaatccacatactccaatactcctgaaatagttcattatggacagcgcagaagagctggggagaattaattcgtaatcatggtcatagctgtttcctgtgtgaaattgttatccgctcacaattccacacaacatacgagccggaagcataaagtgtaaagcctggggtgcctaatgagtgagctaactcacattaattgcgttgcgctcactgcccgctttccagtcgggaaacctgtcgtgccagctgcattaatgaatcggccaacgcgcggggagaggcggtttgcgtattgggcgctcttccgcttcctcgctcactgactcgctgcgctcggtcgttcggctgcggcgagcggtatcagctcactcaaaggcggtaatacggttatccacagaatcaggggataacgcaggaaagaacatgtgagcaaaaggccagcaaaaggccaggaaccgtaaaaaggccgcgttgctggcgtttttccataggctccgcccccctgacgagcatcacaaaaatcgacgctcaagtcagaggtggcgaaacccgacaggactataaagataccaggcgtttccccctggaagctccctcgtgcgctctcctgttccgaccctgccgcttaccggatacctgtccgcctttctcccttcgggaagcgtggcgctttctcatagctcacgctgtaggtatctcagttcggtgtaggtcgttcgctccaagctgggctgtgtgcacgaaccccccgttcagcccgaccgctgcgccttatccggtaactatcgtcttgagtccaacccggtaagacacgacttatcgccactggcagcagccactggtaacaggattagcagagcgaggtatgtaggcggtgctacagagttcttgaagtggtggcctaactacggctacactagaaggacagtatttggtatctgcgctctgctgaagccagttaccttcggaaaaagagttggtagctcttgatccggcaaacaaaccaccgctggtagcggtggtttttttgtttgcaagcagcagattacgcgcagaaaaaaaggatctcaagaagatcctttgatcttttctacggggtctgacgctcagtggaacgaaaactcacgttaagggattttggtcatgagattatcaaaaaggatcttcacctagatccttttaaattaaaaatgaagttttaaatcaatctaaagtatatatgagtaaacttggtctgacagttaccaatgcttaatcagtgaggcacctatctcagcgatctgtctatttcgttcatccatagttgcctgactccccgtcgtgtagataactacgatacgggagggcttaccatctggccccagtgctgcaatgataccgcgagacccacgctcaccggctccagatttatcagcaataaaccagccagccggaagggccgagcgcagaagtggtcctgcaactttatccgcctccatccagtctattaattgttgccgggaagctagagtaagtagttcgccagttaatagtttgcgcaacgttgttgccattgctacaggcatcgtggtgtcacgctcgtcgtttggtatggcttcattcagctccggttcccaacgatcaaggcgagttacatgatcccccatgttgtgcaaaaaagcggttagctccttcggtcctccgatcgttgtcagaagtaagttggccgcagtgttatcactcatggttatggcagcactgcataattctcttactgtcatgccatccgtaagatgcttttctgtgactggtgagtactcaaccaagtcattctgagaatagtgtatgcggcgaccgagttgctcttgcccggcgtcaatacgggataataccgcgccacatagcagaactttaaaagtgctcatcattggaaaacgttcttcggggcgaaaactctcaaggatcttaccgctgttgagatccagttcgatgtaacccactcgtgcacccaactgatcttcagcatcttttactttcaccagcgtttctgggtgagcaaaaacaggaaggcaaaatgccgcaaaaaagggaataagggcgacacggaaatgttgaatactcatactcttcctttttcaatattattgaagcatttatcagggttattgtctcatgagcggatacatatttgaatgtatttagaaaaataaacaaataggggttccgcgcacatttccccgaaaagtgccacctgacgtctaagaaaccattattatcatgacattaacctataaaaataggcgtatcacgaggccctttcgtctcgcgcgtttcggtgatgacggtgaaaacctctgacacatgcagctcccggagacggtcacagcttgtctgtaagcggatgccgggagcagacaagcccgtcagggcgcgtcagcgggtgttggcgggtgtcggggctggcttaactatgcggcatcagagcagattgtactgagagtgcaccatatgcggtgtgaaataccgcacagatgcgtaaggagaaaataccgcatcaggcgccattcgccattcaggctgcgcaactgttgggaagggcgatcggtgcgggcctcttcgctattacgccagctggcgaaagggggatgtgctgcaaggcgattaagttgggtaacgccagggttttcccagtcacgacgttgtaaaacgacggcgcaaggaatggtgcatgcaaggagatggcgcccaacagtcccccggccacggggcctgccaccatacccacgccgaaacaagcgctcatgagcccgaagtggcgagcccgatcttccccatcggtgatgtcggcgatataggcgccagcaaccgcacctgtggcgccggtgatgccggccacgatgcgtccggcgtagaggcgattagtccaatttgttaaagacaggatatcagtggtccaggctctagttttgactcaacaatatcaccagctgaagcctatagagtacgagccatagataaaataaaagattttatttagtctccagaaaaaggggggaa

SEQ ID NO: 4 - DNA, 7172 bp, Artificial Sequence
  Synthetic Polynucloetide
cccgactggaaagcgggcagtgagcgcaacgcaattaatgtgagttagctcactcattaggcaccccaggctttacactttatgcttccggctcgtatgttgtgtggaattgtgagcggataacaatttcacacaggaaacagctatgaccatgattacgccaagcgcgcaattaaccctcactaaagggaacaaaagctggagctgcaagcttggccattgcatacgttgtatccatatcataatatgtacatttatattggctcatgtccaacattaccgccatgttgacattgattattgactagttattaatagtaatcaattacggggtcattagttcatagcccatatatggagttccgcgttacataacttacggtaaatggcccgcctggctgaccgcccaacgacccccgcccattgacgtcaataatgacgtatgttcccatagtaacgccaatagggactttccattgacgtcaatgggtggagtatttacggtaaactgcccacttggcagtacatcaagtgtatcatatgccaagtacgccccctattgacgtcaatgacggtaaatggcccgcctggcattatgcccagtacatgaccttatgggactttcctacttggcagtacatctacgtattagtcatcgctattaccatggtgatgcggttttggcagtacatcaatgggcgtggatagcggtttgactcacggggatttccaagtctccaccccattgacgtcaatgggagtttgttttggcaccaaaatcaacgggactttccaaaatgtcgtaacaactccgccccattgacgcaaatgggcggtaggcgtgtacggtgggaggtctatataagcagagctcgtttagtgaaccggggtctctctggttagaccagatctgagcctgggagctctctggctaactagggaacccactgcttaagcctcaataaagcttgccttgagtgcttcaagtagtgtgtgcccgtctgttgtgtgactctggtaactagagatccctcagacccttttagtcagtgtggaaaatctctagcagtggcgcccgaacagggacttgaaagcgaaagggaaaccagaggagctctctcgacgcaggactcggcttgctgaagcgcgcacggcaagaggcgaggggcggcgactggtgagtacgccaaaaattttgactagcggaggctagaaggagagagatgggtgcgagagcgtcagtattaagcgggggagaattagatcgcgatgggaaaaaattcggttaaggccagggggaaagaaaaaatataaattaaaacatatagtatgggcaagcagggagctagaacgattcgcagttaatcctggcctgttagaaacatcagaaggctgtagacaaatactgggacagctacaaccatcccttcagacaggatcagaagaacttagatcattatataatacagtagcaaccctctattgtgtgcatcaaaggatagagataaaagacaccaaggaagctttagacaagatagaggaagagcaaaacaaaagtaagaccaccgcacagcaagcggccgctgatcttcagacctggaggaggagatatgagggacaattggagaagtgaattatataaatataaagtagtaaaaattgaaccattaggagtagcacccaccaaggcaaagagaagagtggtgcagagagaaaaaagagcagtgggaataggagctttgttccttgggttcttgggagcagcaggaagcactatgggcgcagcgtcaatgacgctgacggtacaggccagacaattattgtctggtatagtgcagcagcagaacaatttgctgagggctattgaggcgcaacagcatctgttgcaactcacagtctggggcatcaagcagctccaggcaagaatcctggctgtggaaagatacctaaaggatcaacagctcctggggatttggggttgctctggaaaactcatttgcaccactgctgtgccttggaatgctagttggagtaataaatctctggaacagatttggaatcacacgacctggatggagtgggacagagaaattaacaattacacaagcttaatacactccttaattgaagaatcgcaaaaccagcaagaaaagaatgaacaagaattattggaattagataaatgggcaagtttgtggaattggtttaacataacaaattggctgtggtatataaaattattcataatgatagtaggaggcttggtaggtttaagaatagtttttgctgtactttctatagtgaatagagttaggcagggatattcaccattatcgtttcagacccacctcccaaccccgaggggacccgacaggcccgaaggaatagaagaagaaggtggagagagagacagagacagatccattcgattagtgaacggatctcgacggtatcgataagctaattcacaaatggcagtattcatccacaattttaaaagaaaaggggggattggggggtacagtgcaggggaaagaatagtagacataatagcaacagacatacaaactaaagaattacaaaaacaaattacaaaaattcaaaattttcgggtttattacagggacagcagagatccagtttgggaattagcttgatcgattagtccaatttgttaaagacaggatatcagtggtccaggctctagttttgactcaacaatatcaccagctgaagcctatagagtacgagccatagatagaataaaagattttatttagtctccagaaaaaggggggaatgaaagaccccacctgtaggtttggcaagctaggatcaaggttaggaacagagagacagcagaatatgggccaaacaggatatctgtggtaagcagttcctgccccggctcagggccaagaacagttggaacagcagaatatgggccaaacaggatatctgtggtaagcagttcctgccccggctcagggccaagaacagatggtccccagatgcggtcccgccctcagcagtttctagagaaccatcagatgtttccagggtgccccaaggacctgaaatgaccctgtgccttatttgaactaaccaatcagttcgcttctcgcttctgttcgcgcgcttctgctccccgagctcaataaaagagcccacaacccctcactcggcgcgatctagatctcgaatcgaattcgtcgactgatccgataatcaacctctggattacaaaatttgtgaaagattgactggtattcttaactatgttgctccttttacgctatgtggatacgctgctttaatgcctttgtatcatgctattgcttcccgtatggctttcattttctcctccttgtataaatcctggttgctgtctctttatgaggagttgtggcccgttgtcaggcaacgtggcgtggtgtgcactgtgtttgctgacgcaacccccactggttggggcattgccaccacctgtcagctcctttccgggactttcgctttccccctccctattgccacggcggaactcatcgccgcctgccttgcccgctgctggacaggggctcggctgttgggcactgacaattccgtggtgttgtcggggaaatcatcgtcctttccttggctgctcgcctgtgttgccacctggattctgcgcgggacgtccttctgctacgtcccttcggccctcaatccagcggaccttccttcccgcggcctgctgccggctctgcggcctcttccgcgtcttcgccttcgccctcagacgagtcggatctccctttgggccgcctccccgcatcggatcaaattcgagctcggtacctttaagaccaatgacttacaaggcagctgtagatcttagccactttttaaaagaaaaggggggactggaagggctaattcactcccaacgaagacaagatctgctttttgcttgtactgggtctctctggttagaccagatctgagcctgggagctctctggctaactagggaacccactgcttaagcctcaataaagcttgccttgagtgcttcaagtagtgtgtgcccgtctgttgtgtgactctggtaactagagatccctcagacccttttagtcagtgtggaaaatctctagcagtagtagttcatgtcatcttattattcagtatttataacttgcaaagaaatgaatatcagagagtgagaggaacttgtttattgcagcttataatggttacaaataaagcaatagcatcacaaatttcacaaataaagcatttttttcactgcattctagttgtggtttgtccaaactcatcaatgtatcttatcatgtctggctctagctatcccgcccctaactccgcccatcccgcccctaactccgcccagttccgcccattctccgccccatggctgactaattttttttatttatgcagaggccgaggccgcctcggcctctgagctattccagaagtagtgaggaggcttttttggaggcctagggacgtacccaattcgccctatagtgagtcgtattacgcgcgctcactggccgtcgttttacaacgtcgtgactgggaaaaccctggcgttacccaacttaatcgccttgcagcacatccccctttcgccagctggcgtaatagcgaagaggcccgcaccgatcgcccttcccaacagttgcgcagcctgaatggcgaatgggacgcgccctgtagcggcgcattaagcgcggcgggtgtggtggttacgcgcagcgtgaccgctacacttgccagcgccctagcgcccgctcctttcgctttcttcccttcctttctcgccacgttcgccggctttccccgtcaagctctaaatcgggggctccctttagggttccgatttagtgctttacggcacctcgaccccaaaaaacttgattagggtgatggttcacgtagtgggccatcgccctgatagacggtttttcgccctttgacgttggagtccacgttctttaatagtggactcttgttccaaactggaacaacactcaaccctatctcggtctattcttttgatttataagggattttgccgatttcggcctattggttaaaaaatgagctgatttaacaaaaatttaacgcgaattttaacaaaatattaacgcttacaatttaggtggcacttttcggggaaatgtgcgcggaacccctatttgtttatttttctaaatacattcaaatatgtatccgctcatgagacaataaccctgataaatgcttcaataatattgaaaaaggaagagtatgagtattcaacatttccgtgtcgcccttattcccttttttgcggcattttgccttcctgtttttgctcacccagaaacgctggtgaaagtaaaagatgctgaagatcagttgggtgcacgagtgggttacatcgaactggatctcaacagcggtaagatccttgagagttttcgccccgaagaacgttttccaatgatgagcacttttaaagttctgctatgtggcgcggtattatcccgtattgacgccgggcaagagcaactcggtcgccgcatacactattctcagaatgacttggttgagtactcaccagtcacagaaaagcatcttacggatggcatgacagtaagagaattatgcagtgctgccataaccatgagtgataacactgcggccaacttacttctgacaacgatcggaggaccgaaggagctaaccgcttttttgcacaacatgggggatcatgtaactcgccttgatcgttgggaaccggagctgaatgaagccataccaaacgacgagcgtgacaccacgatgcctgtagcaatggcaacaacgttgcgcaaactattaactggcgaactacttactctagcttcccggcaacaattaatagactggatggaggcggataaagttgcaggaccacttctgcgctcggcccttccggctggctggtttattgctgataaatctggagccggtgagcgtgggtctcgcggtatcattgcagcactggggccagatggtaagccctcccgtatcgtagttatctacacgacggggagtcaggcaactatggatgaacgaaatagacagatcgctgagataggtgcctcactgattaagcattggtaactgtcagaccaagtttactcatatatactttagattgatttaaaacttcatttttaatttaaaaggatctaggtgaagatcctttttgataatctcatgaccaaaatcccttaacgtgagttttcgttccactgagcgtcagaccccgtagaaaagatcaaaggatcttcttgagatcctttttttctgcgcgtaatctgctgcttgcaaacaaaaaaaccaccgctaccagcggtggtttgtttgccggatcaagagctaccaactctttttccgaaggtaactggcttcagcagagcgcagataccaaatactgttcttctagtgtagccgtagttaggccaccacttcaagaactctgtagcaccgcctacatacctcgctctgctaatcctgttaccagtggctgctgccagtggcgataagtcgtgtcttaccgggttggactcaagacgatagttaccggataaggcgcagcggtcgggctgaacggggggttcgtgcacacagcccagcttggagcgaacgacctacaccgaactgagatacctacagcgtgagctatgagaaagcgccacgcttcccgaagggagaaaggcggacaggtatccggtaagcggcagggtcggaacaggagagcgcacgagggagcttccagggggaaacgcctggtatctttatagtcctgtcgggtttcgccacctctgacttgagcgtcgatttttgtgatgctcgtcaggggggcggagcctatggaaaaacgccagcaacgcggcctttttacggttcctggccttttgctggccttttgctcacatgttctttcctgcgttatcccctgattctgtggataaccgtattaccgcctttgagtgagctgataccgctcgccgcagccgaacgaccgagcgcagcgagtcagtgagcgaggaagcggaagagcgcccaatacgcaaaccgcctctccccgcgcgttggccgattcattaatgcagctggcacgacaggttt

SEQ ID NO: 5 - DNA, 7181 bp, Artificial Sequence
  Synthetic Polynucloetide
cccgactggaaagcgggcagtgagcgcaacgcaattaatgtgagttagctcactcattaggcaccccaggctttacactttatgcttccggctcgtatgttgtgtggaattgtgagcggataacaatttcacacaggaaacagctatgaccatgattacgccaagcgcgcaattaaccctcactaaagggaacaaaagctggagctgcaagcttggccattgcatacgttgtatccatatcataatatgtacatttatattggctcatgtccaacattaccgccatgttgacattgattattgactagttattaatagtaatcaattacggggtcattagttcatagcccatatatggagttccgcgttacataacttacggtaaatggcccgcctggctgaccgcccaacgacccccgcccattgacgtcaataatgacgtatgttcccatagtaacgccaatagggactttccattgacgtcaatgggtggagtatttacggtaaactgcccacttggcagtacatcaagtgtatcatatgccaagtacgccccctattgacgtcaatgacggtaaatggcccgcctggcattatgcccagtacatgaccttatgggactttcctacttggcagtacatctacgtattagtcatcgctattaccatggtgatgcggttttggcagtacatcaatgggcgtggatagcggtttgactcacggggatttccaagtctccaccccattgacgtcaatgggagtttgttttggcaccaaaatcaacgggactttccaaaatgtcgtaacaactccgccccattgacgcaaatgggcggtaggcgtgtacggtgggaggtctatataagcagagctcgtttagtgaaccggggtctctctggttagaccagatctgagcctgggagctctctggctaactagggaacccactgcttaagcctcaataaagcttgccttgagtgcttcaagtagtgtgtgcccgtctgttgtgtgactctggtaactagagatccctcagacccttttagtcagtgtggaaaatctctagcagtggcgcccgaacagggacttgaaagcgaaagggaaaccagaggagctctctcgacgcaggactcggcttgctgaagcgcgcacggcaagaggcgaggggcggcgactggtgagtacgccaaaaattttgactagcggaggctagaaggagagagatgggtgcgagagcgtcagtattaagcgggggagaattagatcgcgatgggaaaaaattcggttaaggccagggggaaagaaaaaatataaattaaaacatatagtatgggcaagcagggagctagaacgattcgcagttaatcctggcctgttagaaacatcagaaggctgtagacaaatactgggacagctacaaccatcccttcagacaggatcagaagaacttagatcattatataatacagtagcaaccctctattgtgtgcatcaaaggatagagataaaagacaccaaggaagctttagacaagatagaggaagagcaaaacaaaagtaagaccaccgcacagcaagcggccgctgatcttcagacctggaggaggagatatgagggacaattggagaagtgaattatataaatataaagtagtaaaaattgaaccattaggagtagcacccaccaaggcaaagagaagagtggtgcagagagaaaaaagagcagtgggaataggagctttgttccttgggttcttgggagcagcaggaagcactatgggcgcagcgtcaatgacgctgacggtacaggccagacaattattgtctggtatagtgcagcagcagaacaatttgctgagggctattgaggcgcaacagcatctgttgcaactcacagtctggggcatcaagcagctccaggcaagaatcctggctgtggaaagatacctaaaggatcaacagctcctggggatttggggttgctctggaaaactcatttgcaccactgctgtgccttggaatgctagttggagtaataaatctctggaacagatttggaatcacacgacctggatggagtgggacagagaaattaacaattacacaagcttaatacactccttaattgaagaatcgcaaaaccagcaagaaaagaatgaacaagaattattggaattagataaatgggcaagtttgtggaattggtttaacataacaaattggctgtggtatataaaattattcataatgatagtaggaggcttggtaggtttaagaatagtttttgctgtactttctatagtgaatagagttaggcagggatattcaccattatcgtttcagacccacctcccaaccccgaggggacccgacaggcccgaaggaatagaagaagaaggtggagagagagacagagacagatccattcgattagtgaacggatctcgacggtatcgataagctaattcacaaatggcagtattcatccacaattttaaaagaaaaggggggattggggggtacagtgcaggggaaagaatagtagacataatagcaacagacatacaaactaaagaattacaaaaacaaattacaaaaattcaaaattttcgggtttattacagggacagcagagatccagtttgggaattagcttgatcgattagtccaatttgttaaagacaggatatcagtggtccaggctctagttttgactcaacaatatcaccagctgaagcctatagagtacgagccatagatagaataaaagattttatttagtctccagaaaaaggggggaatgaaagaccccacctgtaggtttggcaagctaggatcaaggttaggaacagagagacagcagaatatgggccaaacaggatatctgtggtaagcagttcctgccccggctcagggccaagaacagttggaacagcagaatatgggccaaacaggatatctgtggtaagcagttcctgccccggctcagggccaagaacagatggtccccagatgcggtcccgccctcagcagtttctagagaaccatcagatgtttccagggtgccccaaggacctgaaatgaccctgtgccttatttgaactaaccaatcagttcgcttctcgcttctgttcgcgcgcttctgctccccgagctcaataaaagagcccacaacccctcactcggcgcgatctagatctcgaatcgaattcgccgctagcgtcgactgatccgataatcaacctctggattacaaaatttgtgaaagattgactggtattcttaactatgttgctccttttacgctatgtggatacgctgctttaatgcctttgtatcatgctattgcttcccgtatggctttcattttctcctccttgtataaatcctggttgctgtctctttatgaggagttgtggcccgttgtcaggcaacgtggcgtggtgtgcactgtgtttgctgacgcaacccccactggttggggcattgccaccacctgtcagctcctttccgggactttcgctttccccctccctattgccacggcggaactcatcgccgcctgccttgcccgctgctggacaggggctcggctgttgggcactgacaattccgtggtgttgtcggggaaatcatcgtcctttccttggctgctcgcctgtgttgccacctggattctgcgcgggacgtccttctgctacgtcccttcggccctcaatccagcggaccttccttcccgcggcctgctgccggctctgcggcctcttccgcgtcttcgccttcgccctcagacgagtcggatctccctttgggccgcctccccgcatcggatcaaattcgagctcggtacctttaagaccaatgacttacaaggcagctgtagatcttagccactttttaaaagaaaaggggggactggaagggctaattcactcccaacgaagacaagatctgctttttgcttgtactgggtctctctggttagaccagatctgagcctgggagctctctggctaactagggaacccactgcttaagcctcaataaagcttgccttgagtgcttcaagtagtgtgtgcccgtctgttgtgtgactctggtaactagagatccctcagacccttttagtcagtgtggaaaatctctagcagtagtagttcatgtcatcttattattcagtatttataacttgcaaagaaatgaatatcagagagtgagaggaacttgtttattgcagcttataatggttacaaataaagcaatagcatcacaaatttcacaaataaagcatttttttcactgcattctagttgtggtttgtccaaactcatcaatgtatcttatcatgtctggctctagctatcccgcccctaactccgcccatcccgcccctaactccgcccagttccgcccattctccgccccatggctgactaattttttttatttatgcagaggccgaggccgcctcggcctctgagctattccagaagtagtgaggaggcttttttggaggcctagggacgtacccaattcgccctatagtgagtcgtattacgcgcgctcactggccgtcgttttacaacgtcgtgactgggaaaaccctggcgttacccaacttaatcgccttgcagcacatccccctttcgccagctggcgtaatagcgaagaggcccgcaccgatcgcccttcccaacagttgcgcagcctgaatggcgaatgggacgcgccctgtagcggcgcattaagcgcggcgggtgtggtggttacgcgcagcgtgaccgctacacttgccagcgccctagcgcccgctcctttcgctttcttcccttcctttctcgccacgttcgccggctttccccgtcaagctctaaatcgggggctccctttagggttccgatttagtgctttacggcacctcgaccccaaaaaacttgattagggtgatggttcacgtagtgggccatcgccctgatagacggtttttcgccctttgacgttggagtccacgttctttaatagtggactcttgttccaaactggaacaacactcaaccctatctcggtctattcttttgatttataagggattttgccgatttcggcctattggttaaaaaatgagctgatttaacaaaaatttaacgcgaattttaacaaaatattaacgcttacaatttaggtggcacttttcggggaaatgtgcgcggaacccctatttgtttatttttctaaatacattcaaatatgtatccgctcatgagacaataaccctgataaatgcttcaataatattgaaaaaggaagagtatgagtattcaacatttccgtgtcgcccttattcccttttttgcggcattttgccttcctgtttttgctcacccagaaacgctggtgaaagtaaaagatgctgaagatcagttgggtgcacgagtgggttacatcgaactggatctcaacagcggtaagatccttgagagttttcgccccgaagaacgttttccaatgatgagcacttttaaagttctgctatgtggcgcggtattatcccgtattgacgccgggcaagagcaactcggtcgccgcatacactattctcagaatgacttggttgagtactcaccagtcacagaaaagcatcttacggatggcatgacagtaagagaattatgcagtgctgccataaccatgagtgataacactgcggccaacttacttctgacaacgatcggaggaccgaaggagctaaccgcttttttgcacaacatgggggatcatgtaactcgccttgatcgttgggaaccggagctgaatgaagccataccaaacgacgagcgtgacaccacgatgcctgtagcaatggcaacaacgttgcgcaaactattaactggcgaactacttactctagcttcccggcaacaattaatagactggatggaggcggataaagttgcaggaccacttctgcgctcggcccttccggctggctggtttattgctgataaatctggagccggtgagcgtgggtctcgcggtatcattgcagcactggggccagatggtaagccctcccgtatcgtagttatctacacgacggggagtcaggcaactatggatgaacgaaatagacagatcgctgagataggtgcctcactgattaagcattggtaactgtcagaccaagtttactcatatatactttagattgatttaaaacttcatttttaatttaaaaggatctaggtgaagatcctttttgataatctcatgaccaaaatcccttaacgtgagttttcgttccactgagcgtcagaccccgtagaaaagatcaaaggatcttcttgagatcctttttttctgcgcgtaatctgctgcttgcaaacaaaaaaaccaccgctaccagcggtggtttgtttgccggatcaagagctaccaactctttttccgaaggtaactggcttcagcagagcgcagataccaaatactgttcttctagtgtagccgtagttaggccaccacttcaagaactctgtagcaccgcctacatacctcgctctgctaatcctgttaccagtggctgctgccagtggcgataagtcgtgtcttaccgggttggactcaagacgatagttaccggataaggcgcagcggtcgggctgaacggggggttcgtgcacacagcccagcttggagcgaacgacctacaccgaactgagatacctacagcgtgagctatgagaaagcgccacgcttcccgaagggagaaaggcggacaggtatccggtaagcggcagggtcggaacaggagagcgcacgagggagcttccagggggaaacgcctggtatctttatagtcctgtcgggtttcgccacctctgacttgagcgtcgatttttgtgatgctcgtcaggggggcggagcctatggaaaaacgccagcaacgcggcctttttacggttcctggccttttgctggccttttgctcacatgttctttcctgcgttatcccctgattctgtggataaccgtattaccgcctttgagtgagctgataccgctcgccgcagccgaacgaccgagcgcagcgagtcagtgagcgaggaagcggaagagcgcccaatacgcaaaccgcctctccccgcgcgttggccgattcattaatgcagctggcacgacaggttt

SEQ ID NO: 6 - DNA, 6554 bp, Artificial Sequence
  Synthetic Polynucloetide
cccgactggaaagcgggcagtgagcgcaacgcaattaatgtgagttagctcactcattaggcaccccaggctttacactttatgcttccggctcgtatgttgtgtggaattgtgagcggataacaatttcacacaggaaacagctatgaccatgattacgccaagcgcgcaattaaccctcactaaagggaacaaaagctggagctgcaagcttggccattgcatacgttgtatccatatcataatatgtacatttatattggctcatgtccaacattaccgccatgttgacattgattattgactagttattaatagtaatcaattacggggtcattagttcatagcccatatatggagttccgcgttacataacttacggtaaatggcccgcctggctgaccgcccaacgacccccgcccattgacgtcaataatgacgtatgttcccatagtaacgccaatagggactttccattgacgtcaatgggtggagtatttacggtaaactgcccacttggcagtacatcaagtgtatcatatgccaagtacgccccctattgacgtcaatgacggtaaatggcccgcctggcattatgcccagtacatgaccttatgggactttcctacttggcagtacatctacgtattagtcatcgctattaccatggtgatgcggttttggcagtacatcaatgggcgtggatagcggtttgactcacggggatttccaagtctccaccccattgacgtcaatgggagtttgttttggcaccaaaatcaacgggactttccaaaatgtcgtaacaactccgccccattgacgcaaatgggcggtaggcgtgtacggtgggaggtctatataagcagagctcgtttagtgaaccggggtctctctggttagaccagatctgagcctgggagctctctggctaactagggaacccactgcttaagcctcaataaagcttgccttgagtgcttcaagtagtgtgtgcccgtctgttgtgtgactctggtaactagagatccctcagacccttttagtcagtgtggaaaatctctagcagtggcgcccgaacagggacttgaaagcgaaagggaaaccagaggagctctctcgacgcaggactcggcttgctgaagcgcgcacggcaagaggcgaggggcggcgactggtgagtacgccaaaaattttgactagcggaggctagaaggagagagatgggtgcgagagcgtcagtattaagcgggggagaattagatcgcgatgggaaaaaattcggttaaggccagggggaaagaaaaaatataaattaaaacatatagtatgggcaagcagggagctagaacgattcgcagttaatcctggcctgttagaaacatcagaaggctgtagacaaatactgggacagctacaaccatcccttcagacaggatcagaagaacttagatcattatataatacagtagcaaccctctattgtgtgcatcaaaggatagagataaaagacaccaaggaagctttagacaagatagaggaagagcaaaacaaaagtaagaccaccgcacagcaagcggccgctgatcttcagacctggaggaggagatatgagggacaattggagaagtgaattatataaatataaagtagtaaaaattgaaccattaggagtagcacccaccaaggcaaagagaagagtggtgcagagagaaaaaagagcagtgggaataggagctttgttccttgggttcttgggagcagcaggaagcactatgggcgcagcgtcaatgacgctgacggtacaggccagacaattattgtctggtatagtgcagcagcagaacaatttgctgagggctattgaggcgcaacagcatctgttgcaactcacagtctggggcatcaagcagctccaggcaagaatcctggctgtggaaagatacctaaaggatcaacagctcctggggatttggggttgctctggaaaactcatttgcaccactgctgtgccttggaatgctagttggagtaataaatctctggaacagatttggaatcacacgacctggatggagtgggacagagaaattaacaattacacaagcttaatacactccttaattgaagaatcgcaaaaccagcaagaaaagaatgaacaagaattattggaattagataaatgggcaagtttgtggaattggtttaacataacaaattggctgtggtatataaaattattcataatgatagtaggaggcttggtaggtttaagaatagtttttgctgtactttctatagtgaatagagttaggcagggatattcaccattatcgtttcagacccacctcccaaccccgaggggacccgacaggcccgaaggaatagaagaagaaggtggagagagagacagagacagatccattcgattagtgaacggatctcgacggtatcgataagctaattcacaaatggcagtattcatccacaattttaaaagaaaaggggggattggggggtacagtgcaggggaaagaatagtagacataatagcaacagacatacaaactaaagaattacaaaaacaaattacaaaaattcaaaattttcgggtttattacagggacagcagagatccagtttgggaattagcttgatcgattagtccaatttgttaaagacaggatatcagtggtccaggctctagttttgactcaacaatatcaccagctgaagcctatagagtacgagccatagatagaataaaagattttatttagtctccagaaaaaggggggaatgaaagaccccacctgtaggtttggcaagctaggatcaaggttaggaacagagagacagcagaatatgggccaaacaggatatctgtggtaagcagttcctgccccggctcagggccaagaacagttggaacagcagaatatgggccaaacaggatatctgtggtaagcagttcctgccccggctcagggccaagaacagatggtccccagatgcggtcccgccctcagcagtttctagagaaccatcagatgtttccagggtgccccaaggacctgaaatgaccctgtgccttatttgaactaaccaatcagttcgcttctcgcttctgttcgcgcgcttctgctccccgagctcaataaaagagcccacaacccctcactcggcgcgatctagatctcgaatcgaattcgtcgacggtacctttaagaccaatgacttacaaggcagctgtagatcttagccactttttaaaagaaaaggggggactggaagggctaattcactcccaacgaagacaagatctgctttttgcttgtactgggtctctctggttagaccagatctgagcctgggagctctctggctaactagggaacccactgcttaagcctcaataaagcttgccttgagtgcttcaagtagtgtgtgcccgtctgttgtgtgactctggtaactagagatccctcagacccttttagtcagtgtggaaaatctctagcagtagtagttcatgtcatcttattattcagtatttataacttgcaaagaaatgaatatcagagagtgagaggaacttgtttattgcagcttataatggttacaaataaagcaatagcatcacaaatttcacaaataaagcatttttttcactgcattctagttgtggtttgtccaaactcatcaatgtatcttatcatgtctggctctagctatcccgcccctaactccgcccatcccgcccctaactccgcccagttccgcccattctccgccccatggctgactaattttttttatttatgcagaggccgaggccgcctcggcctctgagctattccagaagtagtgaggaggcttttttggaggcctagggacgtacccaattcgccctatagtgagtcgtattacgcgcgctcactggccgtcgttttacaacgtcgtgactgggaaaaccctggcgttacccaacttaatcgccttgcagcacatccccctttcgccagctggcgtaatagcgaagaggcccgcaccgatcgcccttcccaacagttgcgcagcctgaatggcgaatgggacgcgccctgtagcggcgcattaagcgcggcgggtgtggtggttacgcgcagcgtgaccgctacacttgccagcgccctagcgcccgctcctttcgctttcttcccttcctttctcgccacgttcgccggctttccccgtcaagctctaaatcgggggctccctttagggttccgatttagtgctttacggcacctcgaccccaaaaaacttgattagggtgatggttcacgtagtgggccatcgccctgatagacggtttttcgccctttgacgttggagtccacgttctttaatagtggactcttgttccaaactggaacaacactcaaccctatctcggtctattcttttgatttataagggattttgccgatttcggcctattggttaaaaaatgagctgatttaacaaaaatttaacgcgaattttaacaaaatattaacgcttacaatttaggtggcacttttcggggaaatgtgcgcggaacccctatttgtttatttttctaaatacattcaaatatgtatccgctcatgagacaataaccctgataaatgcttcaataatattgaaaaaggaagagtatgagtattcaacatttccgtgtcgcccttattcccttttttgcggcattttgccttcctgtttttgctcacccagaaacgctggtgaaagtaaaagatgctgaagatcagttgggtgcacgagtgggttacatcgaactggatctcaacagcggtaagatccttgagagttttcgccccgaagaacgttttccaatgatgagcacttttaaagttctgctatgtggcgcggtattatcccgtattgacgccgggcaagagcaactcggtcgccgcatacactattctcagaatgacttggttgagtactcaccagtcacagaaaagcatcttacggatggcatgacagtaagagaattatgcagtgctgccataaccatgagtgataacactgcggccaacttacttctgacaacgatcggaggaccgaaggagctaaccgcttttttgcacaacatgggggatcatgtaactcgccttgatcgttgggaaccggagctgaatgaagccataccaaacgacgagcgtgacaccacgatgcctgtagcaatggcaacaacgttgcgcaaactattaactggcgaactacttactctagcttcccggcaacaattaatagactggatggaggcggataaagttgcaggaccacttctgcgctcggcccttccggctggctggtttattgctgataaatctggagccggtgagcgtgggtctcgcggtatcattgcagcactggggccagatggtaagccctcccgtatcgtagttatctacacgacggggagtcaggcaactatggatgaacgaaatagacagatcgctgagataggtgcctcactgattaagcattggtaactgtcagaccaagtttactcatatatactttagattgatttaaaacttcatttttaatttaaaaggatctaggtgaagatcctttttgataatctcatgaccaaaatcccttaacgtgagttttcgttccactgagcgtcagaccccgtagaaaagatcaaaggatcttcttgagatcctttttttctgcgcgtaatctgctgcttgcaaacaaaaaaaccaccgctaccagcggtggtttgtttgccggatcaagagctaccaactctttttccgaaggtaactggcttcagcagagcgcagataccaaatactgttcttctagtgtagccgtagttaggccaccacttcaagaactctgtagcaccgcctacatacctcgctctgctaatcctgttaccagtggctgctgccagtggcgataagtcgtgtcttaccgggttggactcaagacgatagttaccggataaggcgcagcggtcgggctgaacggggggttcgtgcacacagcccagcttggagcgaacgacctacaccgaactgagatacctacagcgtgagctatgagaaagcgccacgcttcccgaagggagaaaggcggacaggtatccggtaagcggcagggtcggaacaggagagcgcacgagggagcttccagggggaaacgcctggtatctttatagtcctgtcgggtttcgccacctctgacttgagcgtcgatttttgtgatgctcgtcaggggggcggagcctatggaaaaacgccagcaacgcggcctttttacggttcctggccttttgctggccttttgctcacatgttctttcctgcgttatcccctgattctgtggataaccgtattaccgcctttgagtgagctgataccgctcgccgcagccgaacgaccgagcgcagcgagtcagtgagcgaggaagcggaagagcgcccaatacgcaaaccgcctctccccgcgcgttggccgattcattaatgcagctggcacgacaggttt

SEQ ID NO: 7 - DNA, 1183 bp, Artificial Sequence
  Synthetic Polynucloetide
gtgaggctccggtgcccgtcagtgggcagagcgcacatcgcccacagtccccgagaagttggggggaggggtcggcaattgaaccggtgcctagagaaggtggcgcggggtaaactgggaaagtgatgtcgtgtactggctccgcctttttcccgagggtgggggagaaccgtatataagtgcagtagtcgccgtgaacgttctttttcgcaacgggtttgccgccagaacacaggtaagtgccgtgtgtggttcccgcgggcctggcctctttacgggttatggcccttgcgtgccttgaattacttccacctggctgcagtacgtgattcttgatcccgagcttcgggttggaagtgggtgggagagttcgaggccttgcgcttaaggagccccttcgcctcgtgcttgagttgaggcctggcctgggcgctggggccgccgcgtgcgaatctggtggcaccttcgcgcctgtctcgctgctttcgataagtctctagccatttaaaatttttgatgacctgctgcgacgctttttttctggcaagatagtcttgtaaatgcgggccaagatctgcacactggtatttcggtttttggggccgcgggcggcgacggggcccgtgcgtcccagcgcacatgttcggcgaggcggggcctgcgagcgcggccaccgagaatcggacgggggtagtctcaagctggccggcctgctctggtgcctggcctcgcgccgccgtgtatcgccccgccctgggcggcaaggctggcccggtcggcaccagttgcgtgagcggaaagatggccgcttcccggccctgctgcagggagctcaaaatggaggacgcggcgctcgggagagcgggcgggtgagtcacccacacaaaggaaaagggcctttccgtcctcagccgtcgcttcatgtgactccacggagtaccgggcgccgtccaggcacctcgattagttctcgaccttttggagtacgtcgtctttaggttggggggaggggttttatgcgatggagtttccccacactgagtgggtggagactgaagttaggccagcttggcacttgatgtaattctccttggaatttgccctttttgagtttggatcttggttcattctcaagcctcagacagtggttcaaagtttttttcttccatttcaggtgtcgtga

SEQ ID NO: 8 - DNA, 5857 bp, Artificial Sequence
  Synthetic Polynucloetide
aattttaacaaaatattaacgcttacaatttcctgatgcggtattttctccttacgcatctgtgcggtatttcacaccgcatcaggtggcacttttcggggaaatgtgcgcggaacccctatttgtttatttttctaaatacattcaaatatgtatccgctcatgagacaataaccctgataaatgcttcaataatattgaaaaaggaagagtatgagtattcaacatttccgtgtcgcccttattcccttttttgcggcattttgccttcctgtttttgctcacccagaaacgctggtgaaagtaaaagatgctgaagatcagttgggtgcacgagtgggttacatcgaactggatctcaacagcggtaagatccttgagagttttcgccccgaagaacgttttccaatgatgagcacttttaaagttctgctatgtggcgcggtattatcccgtattgacgccgggcaagagcaactcggtcgccgcatacactattctcagaatgacttggttgagtactcaccagtcacagaaaagcatcttacggatggcatgacagtaagagaattatgcagtgctgccataaccatgagtgataacactgcggccaacttacttctgacaacgatcggaggaccgaaggagctaaccgcttttttgcacaacatgggggatcatgtaactcgccttgatcgttgggaaccggagctgaatgaagccataccaaacgacgagcgtgacaccacgatgcctgtagcaatggcaacaacgttgcgcaaactattaactggcgaactacttactctagcttcccggcaacaattaatagactggatggaggcggataaagttgcaggaccacttctgcgctcggcccttccggctggctggtttattgctgataaatctggagccggtgagcgtgggtctcgcggtatcattgcagcactggggccagatggtaagccctcccgtatcgtagttatctacacgacggggagtcaggcaactatggatgaacgaaatagacagatcgctgagataggtgcctcactgattaagcattggtaactgtcagaccaagtttactcatatatactttagattgatttaaaacttcatttttaatttaaaaggatctaggtgaagatcctttttgataatctcatgaccaaaatcccttaacgtgagttttcgttccactgagcgtcagaccccgtagaaaagatcaaaggatcttcttgagatcctttttttctgcgcgtaatctgctgcttgcaaacaaaaaaaccaccgctaccagcggtggtttgtttgccggatcaagagctaccaactctttttccgaaggtaactggcttcagcagagcgcagataccaaatactgttcttctagtgtagccgtagttaggccaccacttcaagaactctgtagcaccgcctacatacctcgctctgctaatcctgttaccagtggctgctgccagtggcgataagtcgtgtcttaccgggttggactcaagacgatagttaccggataaggcgcagcggtcgggctgaacggggggttcgtgcacacagcccagcttggagcgaacgacctacaccgaactgagatacctacagcgtgagctatgagaaagcgccacgcttcccgaagggagaaaggcggacaggtatccggtaagcggcagggtcggaacaggagagcgcacgagggagcttccagggggaaacgcctggtatctttatagtcctgtcgggtttcgccacctctgacttgagcgtcgatttttgtgatgctcgtcaggggggcggagcctatggaaaaacgccagcaacgcggcctttttacggttcctggccttttgctggccttttgctcacatgttctttcctgcgttatcccctgattctgtggataaccgtattaccgcctttgagtgagctgataccgctcgccgcagccgaacgaccgagcgcagcgagtcagtgagcgaggaagcggatccctatacagttgaagtcggaagtttacatacaccttagccaaatacatttaaactcactttttcacaattcctgacatttaatcctagtaaaaattccctgtcttaggtcagttaggatcaccactttattttaagaatgtgaaatatcagaataatagtagagagaatgattcatttcagcttttatttctttcatcacattcccagtgggtcagaagtttacatacactcgactcctctgcagaatgcggcgatgtttcggtaaggggtcccgagtagctagttcatggcagccagcatatggcatatgttgccaaactctaaaccaaatactcattctgatgttttaaatgatttgccctcccatatgtccttccgagtgagagacacaaaaaattccaacacactattgcaatgaaaataaatttcctttattagccagaagtcagatgctcaaggggcttcatgatgtccccataatttttggcagagggaaaaagatctcagtggtatttgtgagccagggcattggccacaccagccaccaccttctgataggcagcctgcacctgaggagtgaattcacgacaggccttcgaatcaggcaccgggcttgcgggtcatgcaccaggtgcgcggtccttcgggcacctcgacgtcggcggtgacggtgaagccgagccgctcgtagaaggggaggttgcggggcgcggaggtctccaggaaggcgggcaccccggcgcgctcggccgcctccactccggggagcacgacggcgctgcccagacccttgccctggtggtcgggcgagacgccgacggtggccaggaaccacgcgggctccttgggccggtgcggcgccaggaggccttccatctgttgctgcgcggccagccgggaaccgctcaactcggccatgcgcgggccgatctcggcgaacaccgcccccgcttcgacgctctccggcgtggtccagaccgccaccgcggcgccgtcgtccgcgacccacaccttgccgatgtcgagcccgacgcgcgtgaggaagagttcttgcagctcggtgacccgctcgatgtggcggtccggatcgacggtgtggcgcgtggcggggtagtcggcgaacgcggcggcgagggtgcgtacggccctggggacgtcgtcgcgggtggcgaggcgcaccgtgggcttgtactcggtcatggtggcctcaggtgcagaggtttctacagggaaagagagaaaggctacagttagtttgctgtgatgatgctaagtgccgaggtcagatgtctatggattgtacacggaatcccaacgcaggaaccaaaaaacactcacccaaaaaaatggcgctaaggccgagagaaaggcgaagttccgtctacggctatataccttgaaacaggggcggcagaagtgacgcaacgcggttgcgcggacggcttcctgtgttttcattggtcgaagcgttctgcgcgtgcgcagagattccccagggaaggcgggccctcttccgaatgtccaatccggacattcttccggttggacctccgcggtcagcgctgtgcccggcgagagatcacgtggggcgcggaggcggtgctgctggggcacggccgtccagcctcggcggccatatttttgaggggctgttcatctcgttcacacgctctgtccgccatgtttgtgagtggaagcgccattaccccttcaagcgactgaaggctgcagggcctctggtggcccgcatggggagaccagacccgccaggcccgcctttccgcactcagtccgggcttactttattttgtgagacagggtctcgcctagaggctccggtgcccgtcagtgggcagagcgcacatcgcccacagtccccgagaagttggggggaggggtcggcaattgaaccggtgcctagagaaggtggcgcggggtaaactgggaaagtgatgtcgtgtactggctccgcctttttcccgagggtgggggagaaccgtatataagtgcagtagtcgccgtgaacgttctttttcgcaacgggtttgccgccagaacacaggtaagtgccgtgtgtggttcccgcgggcctggcctctttacgggttatggcccttgcgtgccttgaattacttccacgcccctggctgcagtacgtgattcttgatcccgagcttcgggttggaagtgggtgggagagttcgaggccttgcgcttaaggagccccttcgcctcgtgcttgagttgaggcttggcctgggcgctggggccgccgcgtgcgaatctggtggcaccttcgcgcctgtctcgctgctttcgataagtctctagccatttaaaatttttgatgacctgctgcgacgctttttttctggcaagatagtcttgtaaatgcgggccaagatctgcacactggtatttcggtttttggggccgcgggcggcgacggggcccgtgcgtcccagcgcacatgttcggcgaggcggggcctgcgagcgcggccaccgagaatcggacgggggtagtctcaagctggccggcctgctctggtgcctggcctcgcgccgccgtgtatcgccccgccctgggcggcaaggctggcccggtcggcaccagttgcgtgagcggaaagatggccgcttcccggccctgctgcagggagctcaaaatggaggacgcggcgctcgggagagcgggcgggtgagtcacccacacaaaggaaaagggcctttccgtcctcagccgtcgcttcatgtgactccacggagtaccgggcgccgtccaggcacctcgattagttctcgagcttttggagtacgtcgtctttaggttggggggaggggttttatgcgatggagtttccccatactgagtgggtggagactgaagttaggccagcttggcacttgatgtaattctccttggaatttgccctttttgagtttggatcttggttcattctcaagcctcagacagtggttcaaagtttttttcttccatttaaggtgtcgtgaaaactaccccaagctggcctctgaggccaccatggctcgagtttcgaactcaattatactgaattgtttcatcatagggttcaacattgtgataaatcaggacttcaatgtctagtgttcagtaaataccttgtagggctctccaaaaaggggaatcttttcaggaaatgcctctttctcttggtgggcttcctggttgcgtctttccttctctctaattcgaaggcctgtcaggccaagcttggggatcaattctctagagctcgctgatcagcctcgactgtgccttctagttgccagccatctgttgtttgcccctcccccgtgccttccttgaccctggaaggtgccactcccactgtcctttcctaataaaatgaggaaattgcatcgcattgtctgagtaggtgtcattctattctggggggtggggtggggcaggacagcaagggggaggattgggaagacaatagcaggcatgctggggatgcggtgggctctatggcttctgaggcggaaagaaccagctgggcctactagatagcggaccccttaccgaaacatcgccgcattctgcagaggagtcgaacttagtgtatgtaaacttctgacccactggaattgtgatacagtgaattataagtgaaataatctgtctgtaaacaattgttggaaaaatgacttgtgtcatgcacaaagtagatgtcctaactgacttgccaaaactattgtttgttaacaagaaatttgtggagtagttgaaaaacgagttttaatgactccaacttaagtgtatgtaaacttccgacttcaactgtatagggatcc

SEQ ID NO: 9 - DNA, 7566 bp, Artificial Sequence
  Synthetic Polynucloetide
tgaaagaccccacctgtaggtttggcaagctagcttaagtaacgccattttgcaaggcatggaaaatacataactgagaatagagaagttcagatcaaggttaggaacagagagacagcagaatatgggccaaacaggatatctgtggtaagcagttcctgccccggctcagggccaagaacagatggtccccagatgcggtcccgccctcagcagtttctagagaaccatcagatgtttccagggtgccccaaggacctgaaatgaccctgtgccttatttgaactaaccaatcagttcgcttctcgcttctgttcgcgcgcttctgctccccgagctcaataaaagagcccacaacccctcactcggcgcgccagtcctccgatagactgcgtcgcccgggtacccgtattcccaataaagcctcttgctgtttgcatccgaatcgtggactcgctgatccttgggagggtctcctcagattgattgactgcccacctcgggggtctttcatttggaggttccaccgagatttggagacccctgcccagggaccaccgacccccccgccgggaggtaagctggccagcggtcgtttcgtgtctgtctctgtctttgtgcgtgtttgtgccggcatctaatgtttgcgcctgcgtctgtactagttagctaactagctctgtatctggcggacccgtggtggaactgacgagttctgaacacccggccgcaaccctgggagacgtcccagggactttgggggccgtttttgtggcccgacctgaggaagggagtcgatgtggaatccgaccccgtcaggatatgtggttctggtaggagacgagaacctaaaacagttcccgcctccgtctgaatttttgctttcggtttggaaccgaagccgcgcgtcttgtctgctgcagcgctgcagcatcgttctgtgttgtctctgtctgactgtgtttctgtatttgtctgaaaattagggccagactgttaccactcccttaagtttgaccttaggtcactggaaagatgtcgagcggatcgctcacaaccagtcggtagatgtcaagaagagacgttgggttaccttctgctctgcagaatggccaacctttaacgtcggatggccgcgagacggcacctttaaccgagacctcatcacccaggttaagatcaaggtcttttcacctggcccgcatggacacccagaccaggtcccctacatcgtgacctgggaagccttggcttttgacccccctccctgggtcaagccctttgtacaccctaagcctccgcctcctcttcctccatccgccccgtctctcccccttgaacctcctcgttcgaccccgcctcgatcctccctttatccagccctcactccttctctaggcgccggaattagatccccaccatgaagcccaccgagaacaacgaagacttcaacatcgtggccgtggccagcaacttcgcgaccacggatctcgatgctgaccgcgggaagttgcccggcaagaagctgccgctggaggtgctcaaagagatggaagccaatgcccggaaagctggctgcaccaggggctgtctgatctgcctgtcccacatcaagtgcacgcccaagatgaagaagttcatcccaggacgctgccacacctacgaaggcgacaaagagtccgcacagggcggcataggcgaggcgatcgtcgacattcctgagattcctgggttcaaggacttggagcccatggagcagttcatcgcacaggtcgatctgtgtgtggactgcacaactggctgcctcaaagggcttgccaacgtgcagtgttctgacctgctcaagaagtggctgccgcaacgctgtgcgacctttgccagcaagatccagggccaggtggacaagatcaagggggccggtggtgacctcgagaccgatttctacccctacgatgtgcccgattacgcttagtctagagggccctattctatagtgtcacctaagtcgaggttaacgaattctaccgggtaggggaggcgcttttcccaaggcagtctggagcatgcgctttagcagccccgctgggcacttggcgctacacaagtggcctctggcctcgcacacattccacatccaccggtaggcgccaaccggctccgttctttggtggccccttcgcgccaccttctactcctcccctagtcaggaagttcccccccgccccgcagctcgcgtcgtgcaggacgtgacaaatggaagtagcacgtctcactagtctcgtgcagatggacagcaccgctgagcaatggaagcgggtaggcctttggggcagcggccaatagcagctttgctccttcgctttctgggctcagaggctgggaaggggtgggtccgggggcgggctcaggggcgggctcaggggcggggcgggcgcccgaaggtcctccggaggcccggcattctgcacgcttcaaaagcgcacgtctgccgcgctgttctcctcttcctcatctccgggcctttcgacctgcatcccgccaccatgaaaaagcctgaactcaccgcgacgtctgtcgagaagtttctgatcgaaaagttcgacagcgtctccgacctgatgcagctctcggagggcgaagaatctcgtgctttcagcttcgatgtaggagggcgtggatatgtcctgcgggtaaatagctgcgccgatggtttctacaaagatcgttatgtttatcggcactttgcatcggccgcgctcccgattccggaagtgcttgacattggggaattcagcgagagcctgacctattgcatctcccgccgtgcacagggtgtcacgttgcaagacctgcctgaaaccgaactgcccgctgttctgcagccggtcgcggaggccatggatgcgatcgctgcggccgatcttagccagacgagcgggttcggcccattcggaccgcaaggaatcggtcaatacactacatggcgtgatttcatatgcgcgattgctgatccccatgtgtatcactggcaaactgtgatggacgacaccgtcagtgcgtccgtcgcgcaggctctcgatgagctgatgctttgggccgaggactgccccgaagtccggcacctcgtgcacgcggatttcggctccaacaatgtcctgacggacaatggccgcataacagcggtcattgactggagcgaggcgatgttcggggattcccaatacgaggtcgccaacatcttcttctggaggccgtggttggcttgtatggagcagcagacgcgctacttcgagcggaggcatccggagcttgcaggatcgccgcggctccggggcgtatatgctccgcattggtcttgaccaactctatcagagcttggttgacggcaatttcgatgatgcagcttgggcgcagggtcgatgcgacgcaatcgtccgatccggagccgggactgtcgggcgtacacaaatcgcccgcagaagcgcggccgtctggaccgatggctgtgtagaagtactcgccgatagtggaaaccgacgccccagcactcgtccgagggcaaaggaatagagtagatgccgaccgaacaagagctgatttcgagaacgcctcagccagcaactcgcgcgagcctagcaaggcaaatgcgagagaacggccttacgcttggtggcacagttctcgtccacagttcgctaagctcgctcggctgggtcgcgggagggccggtcgcagtgattcaggcccttctggattgtgttggtccccagggcacgattgtcatgcccacgcactcgggtgatctgactgatcccgcagattggagatcgccgcccgtgcctgccgattgggtgcagatccgtcgacctgcagccaagcttatcgataaaataaaagattttatttagtctccagaaaaaggggggaatgaaagaccccacctgtaggtttggcaagctagcttaagtaacgccattttgcaaggcatggaaaatacataactgagaatagagaagttcagatcaaggttaggaacagagagacagcagaatatgggccaaacaggatatctgtggtaagcagttcctgccccggctcagggccaagaacagatggtccccagatgcggtcccgccctcagcagtttctagagaaccatcagatgtttccagggtgccccaaggacctgaaatgaccctgtgccttatttgaactaaccaatcagttcgcttctcgcttctgttcgcgcgcttctgctccccgagctcaataaaagagcccacaacccctcactcggcgcgccagtcctccgatagactgcgtcgcccgggtacccgtgtatccaataaaccctcttgcagttgcatccgacttgtggtctcgctgttccttgggagggtctcctctgagtgattgactacccgtcagcgggggtctttcatgggtaacagtttcttgaagttggagaacaacattctgagggtaggagtcgaatattaagtaatcctgactcaattagccactgttttgaatccacatactccaatactcctgaaatagttcattatggacagcgcagaagagctggggagaattaattcgtaatcatggtcatagctgtttcctgtgtgaaattgttatccgctcacaattccacacaacatacgagccggaagcataaagtgtaaagcctggggtgcctaatgagtgagctaactcacattaattgcgttgcgctcactgcccgctttccagtcgggaaacctgtcgtgccagctgcattaatgaatcggccaacgcgcggggagaggcggtttgcgtattgggcgctcttccgcttcctcgctcactgactcgctgcgctcggtcgttcggctgcggcgagcggtatcagctcactcaaaggcggtaatacggttatccacagaatcaggggataacgcaggaaagaacatgtgagcaaaaggccagcaaaaggccaggaaccgtaaaaaggccgcgttgctggcgtttttccataggctccgcccccctgacgagcatcacaaaaatcgacgctcaagtcagaggtggcgaaacccgacaggactataaagataccaggcgtttccccctggaagctccctcgtgcgctctcctgttccgaccctgccgcttaccggatacctgtccgcctttctcccttcgggaagcgtggcgctttctcatagctcacgctgtaggtatctcagttcggtgtaggtcgttcgctccaagctgggctgtgtgcacgaaccccccgttcagcccgaccgctgcgccttatccggtaactatcgtcttgagtccaacccggtaagacacgacttatcgccactggcagcagccactggtaacaggattagcagagcgaggtatgtaggcggtgctacagagttcttgaagtggtggcctaactacggctacactagaaggacagtatttggtatctgcgctctgctgaagccagttaccttcggaaaaagagttggtagctcttgatccggcaaacaaaccaccgctggtagcggtggtttttttgtttgcaagcagcagattacgcgcagaaaaaaaggatctcaagaagatcctttgatcttttctacggggtctgacgctcagtggaacgaaaactcacgttaagggattttggtcatgagattatcaaaaaggatcttcacctagatccttttaaattaaaaatgaagttttaaatcaatctaaagtatatatgagtaaacttggtctgacagttaccaatgcttaatcagtgaggcacctatctcagcgatctgtctatttcgttcatccatagttgcctgactccccgtcgtgtagataactacgatacgggagggcttaccatctggccccagtgctgcaatgataccgcgagacccacgctcaccggctccagatttatcagcaataaaccagccagccggaagggccgagcgcagaagtggtcctgcaactttatccgcctccatccagtctattaattgttgccgggaagctagagtaagtagttcgccagttaatagtttgcgcaacgttgttgccattgctacaggcatcgtggtgtcacgctcgtcgtttggtatggcttcattcagctccggttcccaacgatcaaggcgagttacatgatcccccatgttgtgcaaaaaagcggttagctccttcggtcctccgatcgttgtcagaagtaagttggccgcagtgttatcactcatggttatggcagcactgcataattctcttactgtcatgccatccgtaagatgcttttctgtgactggtgagtactcaaccaagtcattctgagaatagtgtatgcggcgaccgagttgctcttgcccggcgtcaatacgggataataccgcgccacatagcagaactttaaaagtgctcatcattggaaaacgttcttcggggcgaaaactctcaaggatcttaccgctgttgagatccagttcgatgtaacccactcgtgcacccaactgatcttcagcatcttttactttcaccagcgtttctgggtgagcaaaaacaggaaggcaaaatgccgcaaaaaagggaataagggcgacacggaaatgttgaatactcatactcttcctttttcaatattattgaagcatttatcagggttattgtctcatgagcggatacatatttgaatgtatttagaaaaataaacaaataggggttccgcgcacatttccccgaaaagtgccacctgacgtctaagaaaccattattatcatgacattaacctataaaaataggcgtatcacgaggccctttcgtctcgcgcgtttcggtgatgacggtgaaaacctctgacacatgcagctcccggagacggtcacagcttgtctgtaagcggatgccgggagcagacaagcccgtcagggcgcgtcagcgggtgttggcgggtgtcggggctggcttaactatgcggcatcagagcagattgtactgagagtgcaccatatgcggtgtgaaataccgcacagatgcgtaaggagaaaataccgcatcaggcgccattcgccattcaggctgcgcaactgttgggaagggcgatcggtgcgggcctcttcgctattacgccagctggcgaaagggggatgtgctgcaaggcgattaagttgggtaacgccagggttttcccagtcacgacgttgtaaaacgacggcgcaaggaatggtgcatgcaaggagatggcgcccaacagtcccccggccacggggcctgccaccatacccacgccgaaacaagcgctcatgagcccgaagtggcgagcccgatcttccccatcggtgatgtcggcgatataggcgccagcaaccgcacctgtggcgccggtgatgccggccacgatgcgtccggcgtagaggcgattagtccaatttgttaaagacaggatatcagtggtccaggctctagttttgactcaacaatatcaccagctgaagcctatagagtacgagccatagataaaataaaagattttatttagtctccagaaaaaggggggaa

SEQ ID NO: 10 - DNA, 6884 bp, Artificial Sequence
  Synthetic Polynucloetide
tgaaagaccccacctgtaggtttggcaagctagcttaagtaacgccattttgcaaggcatggaaaatacataactgagaatagagaagttcagatcaaggttaggaacagagagacagcagaatatgggccaaacaggatatctgtggtaagcagttcctgccccggctcagggccaagaacagatggtccccagatgcggtcccgccctcagcagtttctagagaaccatcagatgtttccagggtgccccaaggacctgaaatgaccctgtgccttatttgaactaaccaatcagttcgcttctcgcttctgttcgcgcgcttctgctccccgagctcaataaaagagcccacaacccctcactcggcgcgccagtcctccgatagactgcgtcgcccgggtacccgtattcccaataaagcctcttgctgtttgcatccgaatcgtggactcgctgatccttgggagggtctcctcagattgattgactgcccacctcgggggtctttcatttggaggttccaccgagatttggagacccctgcccagggaccaccgacccccccgccgggaggtaagctggccagcggtcgtttcgtgtctgtctctgtctttgtgcgtgtttgtgccggcatctaatgtttgcgcctgcgtctgtactagttagctaactagctctgtatctggcggacccgtggtggaactgacgagttctgaacacccggccgcaaccctgggagacgtcccagggactttgggggccgtttttgtggcccgacctgaggaagggagtcgatgtggaatccgaccccgtcaggatatgtggttctggtaggagacgagaacctaaaacagttcccgcctccgtctgaatttttgctttcggtttggaaccgaagccgcgcgtcttgtctgctgcagcgctgcagcatcgttctgtgttgtctctgtctgactgtgtttctgtatttgtctgaaaattagggccagactgttaccactcccttaagtttgaccttaggtcactggaaagatgtcgagcggatcgctcacaaccagtcggtagatgtcaagaagagacgttgggttaccttctgctctgcagaatggccaacctttaacgtcggatggccgcgagacggcacctttaaccgagacctcatcacccaggttaagatcaaggtcttttcacctggcccgcatggacacccagaccaggtcccctacatcgtgacctgggaagccttggcttttgacccccctccctgggtcaagccctttgtacaccctaagcctccgcctcctcttcctccatccgccccgtctctcccccttgaacctcctcgttcgaccccgcctcgatcctccctttatccagccctcactccttctctaggcgccggaattagatccccaccatgaagcccaccgagaacaacgaagacttcaacatcgtggccgtggccagcaacttcgcgaccacggatctcgatgctgaccgcgggaagttgcccggcaagaagctgccgctggaggtgctcaaagagatggaagccaatgcccggaaagctggctgcaccaggggctgtctgatctgcctgtcccacatcaagtgcacgcccaagatgaagaagttcatcccaggacgctgccacacctacgaaggcgacaaagagtccgcacagggcggcataggcgaggcgatcgtcgacattcctgagattcctgggttcaaggacttggagcccatggagcagttcatcgcacaggtcgatctgtgtgtggactgcacaactggctgcctcaaagggcttgccaacgtgcagtgttctgacctgctcaagaagtggctgccgcaacgctgtgcgacctttgccagcaagatccagggccaggtggacaagatcaagggggccggtggtgacctcgagaccgatttctacccctacgatgtgcccgattacgcttagtctagagggccctattctatagtgtcacctaagtcgaggttaacgaattctaccgggtaggggaggcgcttttcccaaggcagtctggagcatgcgctttagcagccccgctgggcacttggcgctacacaagtggcctctggcctcgcacacattccacatccaccggtaggcgccaaccggctccgttctttggtggccccttcgcgccaccttctactcctcccctagtcaggaagttcccccccgccccgcagctcgcgtcgtgcaggacgtgacaaatggaagtagcacgtctcactagtctcgtgcagatggacagcaccgctgagcaatggaagcgggtaggcctttggggcagcggccaatagcagctttgctccttcgctttctgggctcagaggctgggaaggggtgggtccgggggcgggctcaggggcgggctcaggggcggggcgggcgcccgaaggtcctccggaggcccggcattctgcacgcttcaaaagcgcacgtctgccgcgctgttctcctcttcctcatctccgggcctttcgacctgcagcccaagcttaccatgaccgagtacaagcccacggtgcgcctcgccacccgcgacgacgtccccagggccgtacgcaccctcgccgccgcgttcgccgactaccccgccacgcgccacaccgtcgatccggaccgccacatcgagcgggtcaccgagctgcaagaactcttcctcacgcgcgtcgggctcgacatcggcaaggtgtgggtcgcggacgacggcgccgcggtggcggtctggaccacgccggagagcgtcgaagcgggggcggtgttcgccgagatcggcccgcgcatggccgagttgagcggttcccggctggccgcgcagcaacagatggaaggcctcctggcgccgcaccggcccaaggagcccgcgtggttcctggccaccgtcggcgtctcgcccgaccaccagggcaagggtctgggcagcgccgtcgtgctccccggagtggaggcggccgagcgcgccggggtgcccgccttcctggagacctccgcgccccgcaacctccccttctacgagcggctcggcttcaccgtcaccgccgacgtcgaggtgcccgaaggaccgcgcacctggtgcatgacccgcaagcccggtgcctgacgcccgccccacgacccgcagcgcccgaccgaaaggagcgcacgaccccatgcatcgataaaataaaagattttatttagtctccagaaaaaggggggaatgaaagaccccacctgtaggtttggcaagctagcttaagtaacgccattttgcaaggcatggaaaatacataactgagaatagagaagttcagatcaaggttaggaacagagagacagcagaatatgggccaaacaggatatctgtggtaagcagttcctgccccggctcagggccaagaacagatggtccccagatgcggtcccgccctcagcagtttctagagaaccatcagatgtttccagggtgccccaaggacctgaaatgaccctgtgccttatttgaactaaccaatcagttcgcttctcgcttctgttcgcgcgcttctgctccccgagctcaataaaagagcccacaacccctcactcggcgcgccagtcctccgatagactgcgtcgcccgggtacccgtgtatccaataaaccctcttgcagttgcatccgacttgtggtctcgctgttccttgggagggtctcctctgagtgattgactacccgtcagcgggggtctttcatgggtaacagtttcttgaagttggagaacaacattctgagggtaggagtcgaatattaagtaatcctgactcaattagccactgttttgaatccacatactccaatactcctgaaatagttcattatggacagcgcagaagagctggggagaattaattcgtaatcatggtcatagctgtttcctgtgtgaaattgttatccgctcacaattccacacaacatacgagccggaagcataaagtgtaaagcctggggtgcctaatgagtgagctaactcacattaattgcgttgcgctcactgcccgctttccagtcgggaaacctgtcgtgccagctgcattaatgaatcggccaacgcgcggggagaggcggtttgcgtattgggcgctcttccgcttcctcgctcactgactcgctgcgctcggtcgttcggctgcggcgagcggtatcagctcactcaaaggcggtaatacggttatccacagaatcaggggataacgcaggaaagaacatgtgagcaaaaggccagcaaaaggccaggaaccgtaaaaaggccgcgttgctggcgtttttccataggctccgcccccctgacgagcatcacaaaaatcgacgctcaagtcagaggtggcgaaacccgacaggactataaagataccaggcgtttccccctggaagctccctcgtgcgctctcctgttccgaccctgccgcttaccggatacctgtccgcctttctcccttcgggaagcgtggcgctttctcatagctcacgctgtaggtatctcagttcggtgtaggtcgttcgctccaagctgggctgtgtgcacgaaccccccgttcagcccgaccgctgcgccttatccggtaactatcgtcttgagtccaacccggtaagacacgacttatcgccactggcagcagccactggtaacaggattagcagagcgaggtatgtaggcggtgctacagagttcttgaagtggtggcctaactacggctacactagaaggacagtatttggtatctgcgctctgctgaagccagttaccttcggaaaaagagttggtagctcttgatccggcaaacaaaccaccgctggtagcggtggtttttttgtttgcaagcagcagattacgcgcagaaaaaaaggatctcaagaagatcctttgatcttttctacggggtctgacgctcagtggaacgaaaactcacgttaagggattttggtcatgagattatcaaaaaggatcttcacctagatccttttaaattaaaaatgaagttttaaatcaatctaaagtatatatgagtaaacttggtctgacagttaccaatgcttaatcagtgaggcacctatctcagcgatctgtctatttcgttcatccatagttgcctgactccccgtcgtgtagataactacgatacgggagggcttaccatctggccccagtgctgcaatgataccgcgagacccacgctcaccggctccagatttatcagcaataaaccagccagccggaagggccgagcgcagaagtggtcctgcaactttatccgcctccatccagtctattaattgttgccgggaagctagagtaagtagttcgccagttaatagtttgcgcaacgttgttgccattgctacaggcatcgtggtgtcacgctcgtcgtttggtatggcttcattcagctccggttcccaacgatcaaggcgagttacatgatcccccatgttgtgcaaaaaagcggttagctccttcggtcctccgatcgttgtcagaagtaagttggccgcagtgttatcactcatggttatggcagcactgcataattctcttactgtcatgccatccgtaagatgcttttctgtgactggtgagtactcaaccaagtcattctgagaatagtgtatgcggcgaccgagttgctcttgcccggcgtcaatacgggataataccgcgccacatagcagaactttaaaagtgctcatcattggaaaacgttcttcggggcgaaaactctcaaggatcttaccgctgttgagatccagttcgatgtaacccactcgtgcacccaactgatcttcagcatcttttactttcaccagcgtttctgggtgagcaaaaacaggaaggcaaaatgccgcaaaaaagggaataagggcgacacggaaatgttgaatactcatactcttcctttttcaatattattgaagcatttatcagggttattgtctcatgagcggatacatatttgaatgtatttagaaaaataaacaaataggggttccgcgcacatttccccgaaaagtgccacctgacgtctaagaaaccattattatcatgacattaacctataaaaataggcgtatcacgaggccctttcgtctcgcgcgtttcggtgatgacggtgaaaacctctgacacatgcagctcccggagacggtcacagcttgtctgtaagcggatgccgggagcagacaagcccgtcagggcgcgtcagcgggtgttggcgggtgtcggggctggcttaactatgcggcatcagagcagattgtactgagagtgcaccatatgcggtgtgaaataccgcacagatgcgtaaggagaaaataccgcatcaggcgccattcgccattcaggctgcgcaactgttgggaagggcgatcggtgcgggcctcttcgctattacgccagctggcgaaagggggatgtgctgcaaggcgattaagttgggtaacgccagggttttcccagtcacgacgttgtaaaacgacggcgcaaggaatggtgcatgcaaggagatggcgcccaacagtcccccggccacggggcctgccaccatacccacgccgaaacaagcgctcatgagcccgaagtggcgagcccgatcttccccatcggtgatgtcggcgatataggcgccagcaaccgcacctgtggcgccggtgatgccggccacgatgcgtccggcgtagaggcgattagtccaatttgttaaagacaggatatcagtggtccaggctctagttttgactcaacaatatcaccagctgaagcctatagagtacgagccatagataaaataaaagattttatttagtctccagaaaaaggggggaa

SEQ ID NO: 11 - DNA, 7512 bp, Artificial Sequence
  Synthetic Polynucloetide
aatgtagtcttatgcaatactcttgtagtcttgcaacatggtaacgatgagttagcaacatgccttacaaggagagaaaaagcaccgtgcatgccgattggtggaagtaaggtggtacgatcgtgccttattaggaaggcaacagacgggtctgacatggattggacgaaccactgaattgccgcattgcagagatattgtatttaagtgcctagctcgatacataaacgggtctctctggttagaccagatctgagcctgggagctctctggctaactagggaacccactgcttaagcctcaataaagcttgccttgagtgcttcaagtagtgtgtgcccgtctgttgtgtgactctggtaactagagatccctcagacccttttagtcagtgtggaaaatctctagcagtggcgcccgaacagggacttgaaagcgaaagggaaaccagaggagctctctcgacgcaggactcggcttgctgaagcgcgcacggcaagaggcgaggggcggcgactggtgagtacgccaaaaattttgactagcggaggctagaaggagagagatgggtgcgagagcgtcagtattaagcgggggagaattagatcgcgatgggaaaaaattcggttaaggccagggggaaagaaaaaatataaattaaaacatatagtatgggcaagcagggagctagaacgattcgcagttaatcctggcctgttagaaacatcagaaggctgtagacaaatactgggacagctacaaccatcccttcagacaggatcagaagaacttagatcattatataatacagtagcaaccctctattgtgtgcatcaaaggatagagataaaagacaccaaggaagctttagacaagatagaggaagagcaaaacaaaagtaagaccaccgcacagcaagcggccgctgatcttcagacctggaggaggagatatgagggacaattggagaagtgaattatataaatataaagtagtaaaaattgaaccattaggagtagcacccaccaaggcaaagagaagagtggtgcagagagaaaaaagagcagtgggaataggagctttgttccttgggttcttgggagcagcaggaagcactatgggcgcagcgtcaatgacgctgacggtacaggccagacaattattgtctggtatagtgcagcagcagaacaatttgctgagggctattgaggcgcaacagcatctgttgcaactcacagtctggggcatcaagcagctccaggcaagaatcctggctgtggaaagatacctaaaggatcaacagctcctggggatttggggttgctctggaaaactcatttgcaccactgctgtgccttggaatgctagttggagtaataaatctctggaacagatttggaatcacacgacctggatggagtgggacagagaaattaacaattacacaagcttaatacactccttaattgaagaatcgcaaaaccagcaagaaaagaatgaacaagaattattggaattagataaatgggcaagtttgtggaattggtttaacataacaaattggctgtggtatataaaattattcataatgatagtaggaggcttggtaggtttaagaatagtttttgctgtactttctatagtgaatagagttaggcagggatattcaccattatcgtttcagacccacctcccaaccccgaggggacccgacaggcccgaaggaatagaagaagaaggtggagagagagacagagacagatccattcgattagtgaacggatctcgacggtatcgataagcttgggagttccgcgttacataacttacggtaaatggcccgcctggctgaccgcccaacgacccccgcccattgacgtcaataatgacgtatgttcccatagtaacgccaatagggactttccattgacgtcaatgggtggagtatttacggtaaactgcccacttggcagtacatcaagtgtatcatatgccaagtacgccccctattgacgtcaatgacggtaaatggcccgcctggcattatgcccagtacatgaccttatgggactttcctacttggcagtacatctacgtattagtcatcgctattaccatggtgatgcggttttggcagtacatcaatgggcgtggatagcggtttgactcacggggatttccaagtctccaccccattgacgtcaatgggagtttgttttggcaccaaaatcaacgggactttccaaaatgtcgtaacaactccgccccattgacgcaaatgggcggtaggcgtgtacggtgggaggtctatataagcagagctcgtttagtgaaccgtcagatcgcctggagacgccatccacgctgttttgacctccatagaagacaccgactctagaggatccccaccatggtcttcacactcgaagatttcgttggggactggcgacagacagccggctacaacctggaccaagtccttgaacagggaggtgtgtccagtttgtttcagaatctcggggtgtccgtaactccgatccaaaggattgtcctgagcggtgaaaatgggctgaagatcgacatccatgtcatcatcccgtatgaaggtctgagcggcgaccaaatgggccagatcgaaaaaatttttaaggtggtgtaccctgtggatgatcatcactttaaggtgatcctgcactatggcacactggtaatcgacggggttacgccgaacatgatcgactatttcggacggccctatgaaggcatcgccgtgttcgacggcaaaaagatcactgtaacagggaccctgtggaacggcaacaaaattatcgacgagcgcctgatcaaccccgacggctccctgctgttccgagtaaccatcaacggagtgaccggctggcggctgtgcgaacgcattctggcgagttggaaggatgcctctggatggtcttaagtcgagaccgatttctacccctacgatgtgcccgattacgcttagtctagagggcccgcggttcgaaggtaagcctatccctaaccctctcctcggtctcgattctacgcgtaccggttagtaatgagtttggaattaattctgtggaatgtgtgtcagttagggtgtggaaagtccccaggctccccaggcaggcagaagtatgcaaagcatgcatctcaattagtcagcaaccaggtgtggaaagtccccaggctccccagcaggcagaagtatgcaaagcatgcatctcaattagtcagcaaccatagtcccgcccctaactccgcccatcccgcccctaactccgcccagttccgcccattctccgccccatggctgactaattttttttatttatgcagaggccgaggccgcctctgcctctgagctattccagaagtagtgaggaggcttttttggaggcctaggcttttgcaaaaagctcccgggagcttgtatatccattttcggatctgatcagcacgtgttgacaattaatcatcggcatagtatatcggcatagtataatacgacaaggtgaggaactaaaccatggccaagcctttgtctcaagaagaatccaccctcattgaaagagcaacggctacaatcaacagcatccccatctctgaagactacagcgtcgccagcgcagctctctctagcgacggccgcatcttcactggtgtcaatgtatatcattttactgggggaccttgtgcagaactcgtggtgctgggcactgctgctgctgcggcagctggcaacctgacttgtatcgtcgcgatcggaaatgagaacaggggcatcttgagcccctgcggacggtgccgacaggtgcttctcgatctgcatcctgggatcaaagccatagtgaaggacagtgatggacagccgacggcagttgggattcgtgaattgctgccctctggttatgtgtgggagggctaagcacaattcgagctcggtacctttaagaccaatgacttacaaggcagctgtagatcttagccactttttaaaagaaaaggggggactggaagggctaattcactcccaacgaagacaagatctgctttttgcttgtactgggtctctctggttagaccagatctgagcctgggagctctctggctaactagggaacccactgcttaagcctcaataaagcttgccttgagtgcttcaagtagtgtgtgcccgtctgttgtgtgactctggtaactagagatccctcagacccttttagtcagtgtggaaaatctctagcagtagtagttcatgtcatcttattattcagtatttataacttgcaaagaaatgaatatcagagagtgagaggaacttgtttattgcagcttataatggttacaaataaagcaatagcatcacaaatttcacaaataaagcatttttttcactgcattctagttgtggtttgtccaaactcatcaatgtatcttatcatgtctggctctagctatcccgcccctaactccgcccatcccgcccctaactccgcccagttccgcccattctccgccccatggctgactaattttttttatttatgcagaggccgaggccgcctcggcctctgagctattccagaagtagtgaggaggcttttttggaggcctagggacgtacccaattcgccctatagtgagtcgtattacgcgcgctcactggccgtcgttttacaacgtcgtgactgggaaaaccctggcgttacccaacttaatcgccttgcagcacatccccctttcgccagctggcgtaatagcgaagaggcccgcaccgatcgcccttcccaacagttgcgcagcctgaatggcgaatgggacgcgccctgtagcggcgcattaagcgcggcgggtgtggtggttacgcgcagcgtgaccgctacacttgccagcgccctagcgcccgctcctttcgctttcttcccttcctttctcgccacgttcgccggctttccccgtcaagctctaaatcgggggctccctttagggttccgatttagtgctttacggcacctcgaccccaaaaaacttgattagggtgatggttcacgtagtgggccatcgccctgatagacggtttttcgccctttgacgttggagtccacgttctttaatagtggactcttgttccaaactggaacaacactcaaccctatctcggtctattcttttgatttataagggattttgccgatttcggcctattggttaaaaaatgagctgatttaacaaaaatttaacgcgaattttaacaaaatattaacgcttacaatttaggtggcacttttcggggaaatgtgcgcggaacccctatttgtttatttttctaaatacattcaaatatgtatccgctcatgagacaataaccctgataaatgcttcaataatattgaaaaaggaagagtatgagtattcaacatttccgtgtcgcccttattcccttttttgcggcattttgccttcctgtttttgctcacccagaaacgctggtgaaagtaaaagatgctgaagatcagttgggtgcacgagtgggttacatcgaactggatctcaacagcggtaagatccttgagagttttcgccccgaagaacgttttccaatgatgagcacttttaaagttctgctatgtggcgcggtattatcccgtattgacgccgggcaagagcaactcggtcgccgcatacactattctcagaatgacttggttgagtactcaccagtcacagaaaagcatcttacggatggcatgacagtaagagaattatgcagtgctgccataaccatgagtgataacactgcggccaacttacttctgacaacgatcggaggaccgaaggagctaaccgcttttttgcacaacatgggggatcatgtaactcgccttgatcgttgggaaccggagctgaatgaagccataccaaacgacgagcgtgacaccacgatgcctgtagcaatggcaacaacgttgcgcaaactattaactggcgaactacttactctagcttcccggcaacaattaatagactggatggaggcggataaagttgcaggaccacttctgcgctcggcccttccggctggctggtttattgctgataaatctggagccggtgagcgtgggtctcgcggtatcattgcagcactggggccagatggtaagccctcccgtatcgtagttatctacacgacggggagtcaggcaactatggatgaacgaaatagacagatcgctgagataggtgcctcactgattaagcattggtaactgtcagaccaagtttactcatatatactttagattgatttaaaacttcatttttaatttaaaaggatctaggtgaagatcctttttgataatctcatgaccaaaatcccttaacgtgagttttcgttccactgagcgtcagaccccgtagaaaagatcaaaggatcttcttgagatcctttttttctgcgcgtaatctgctgcttgcaaacaaaaaaaccaccgctaccagcggtggtttgtttgccggatcaagagctaccaactctttttccgaaggtaactggcttcagcagagcgcagataccaaatactgttcttctagtgtagccgtagttaggccaccacttcaagaactctgtagcaccgcctacatacctcgctctgctaatcctgttaccagtggctgctgccagtggcgataagtcgtgtcttaccgggttggactcaagacgatagttaccggataaggcgcagcggtcgggctgaacggggggttcgtgcacacagcccagcttggagcgaacgacctacaccgaactgagatacctacagcgtgagctatgagaaagcgccacgcttcccgaagggagaaaggcggacaggtatccggtaagcggcagggtcggaacaggagagcgcacgagggagcttccagggggaaacgcctggtatctttatagtcctgtcgggtttcgccacctctgacttgagcgtcgatttttgtgatgctcgtcaggggggcggagcctatggaaaaacgccagcaacgcggcctttttacggttcctggccttttgctggccttttgctcacatgttctttcctgcgttatcccctgattctgtggataaccgtattaccgcctttgagtgagctgataccgctcgccgcagccgaacgaccgagcgcagcgagtcagtgagcgaggaagcggaagagcgcccaatacgcaaaccgcctctccccgcgcgttggccgattcattaatgcagctggcacgacaggtttcccgactggaaagcgggcagtgagcgcaacgcaattaatgtgagttagctcactcattaggcaccccaggctttacactttatgcttccggctcgtatgttgtgtggaattgtgagcggataacaatttcacacaggaaacagctatgaccatgattacgccaagcgcgcaattaaccctcactaaagggaacaaaagctggagctgcaagctt

SEQ ID NO: 12 - DNA, 7476 bp, Artificial Sequence
  Synthetic Polynucloetide
aatgtagtcttatgcaatactcttgtagtcttgcaacatggtaacgatgagttagcaacatgccttacaaggagagaaaaagcaccgtgcatgccgattggtggaagtaaggtggtacgatcgtgccttattaggaaggcaacagacgggtctgacatggattggacgaaccactgaattgccgcattgcagagatattgtatttaagtgcctagctcgatacataaacgggtctctctggttagaccagatctgagcctgggagctctctggctaactagggaacccactgcttaagcctcaataaagcttgccttgagtgcttcaagtagtgtgtgcccgtctgttgtgtgactctggtaactagagatccctcagacccttttagtcagtgtggaaaatctctagcagtggcgcccgaacagggacttgaaagcgaaagggaaaccagaggagctctctcgacgcaggactcggcttgctgaagcgcgcacggcaagaggcgaggggcggcgactggtgagtacgccaaaaattttgactagcggaggctagaaggagagagatgggtgcgagagcgtcagtattaagcgggggagaattagatcgcgatgggaaaaaattcggttaaggccagggggaaagaaaaaatataaattaaaacatatagtatgggcaagcagggagctagaacgattcgcagttaatcctggcctgttagaaacatcagaaggctgtagacaaatactgggacagctacaaccatcccttcagacaggatcagaagaacttagatcattatataatacagtagcaaccctctattgtgtgcatcaaaggatagagataaaagacaccaaggaagctttagacaagatagaggaagagcaaaacaaaagtaagaccaccgcacagcaagcggccgctgatcttcagacctggaggaggagatatgagggacaattggagaagtgaattatataaatataaagtagtaaaaattgaaccattaggagtagcacccaccaaggcaaagagaagagtggtgcagagagaaaaaagagcagtgggaataggagctttgttccttgggttcttgggagcagcaggaagcactatgggcgcagcgtcaatgacgctgacggtacaggccagacaattattgtctggtatagtgcagcagcagaacaatttgctgagggctattgaggcgcaacagcatctgttgcaactcacagtctggggcatcaagcagctccaggcaagaatcctggctgtggaaagatacctaaaggatcaacagctcctggggatttggggttgctctggaaaactcatttgcaccactgctgtgccttggaatgctagttggagtaataaatctctggaacagatttggaatcacacgacctggatggagtgggacagagaaattaacaattacacaagcttaatacactccttaattgaagaatcgcaaaaccagcaagaaaagaatgaacaagaattattggaattagataaatgggcaagtttgtggaattggtttaacataacaaattggctgtggtatataaaattattcataatgatagtaggaggcttggtaggtttaagaatagtttttgctgtactttctatagtgaatagagttaggcagggatattcaccattatcgtttcagacccacctcccaaccccgaggggacccgacaggcccgaaggaatagaagaagaaggtggagagagagacagagacagatccattcgattagtgaacggatctcgacggtatcgataagcttgggagttccgcgttacataacttacggtaaatggcccgcctggctgaccgcccaacgacccccgcccattgacgtcaataatgacgtatgttcccatagtaacgccaatagggactttccattgacgtcaatgggtggagtatttacggtaaactgcccacttggcagtacatcaagtgtatcatatgccaagtacgccccctattgacgtcaatgacggtaaatggcccgcctggcattatgcccagtacatgaccttatgggactttcctacttggcagtacatctacgtattagtcatcgctattaccatggtgatgcggttttggcagtacatcaatgggcgtggatagcggtttgactcacggggatttccaagtctccaccccattgacgtcaatgggagtttgttttggcaccaaaatcaacgggactttccaaaatgtcgtaacaactccgccccattgacgcaaatgggcggtaggcgtgtacggtgggaggtctatataagcagagctcgtttagtgaaccgtcagatcgcctggagacgccatccacgctgttttgacctccatagaagacaccgactctagaggatccccaccatgaagcccaccgagaacaacgaagacttcaacatcgtggccgtggccagcaacttcgcgaccacggatctcgatgctgaccgcgggaagttgcccggcaagaagctgccgctggaggtgctcaaagagatggaagccaatgcccggaaagctggctgcaccaggggctgtctgatctgcctgtcccacatcaagtgcacgcccaagatgaagaagttcatcccaggacgctgccacacctacgaaggcgacaaagagtccgcacagggcggcataggcgaggcgatcgtcgacattcctgagattcctgggttcaaggacttggagcccatggagcagttcatcgcacaggtcgatctgtgtgtggactgcacaactggctgcctcaaagggcttgccaacgtgcagtgttctgacctgctcaagaagtggctgccgcaacgctgtgcgacctttgccagcaagatccagggccaggtggacaagatcaagggggccggtggtgacctcgagaccgatttctacgactacaaggacgacgatgacaagtagtctagagggcccgcggttcgaaggtaagcctatccctaaccctctcctcggtctcgattctacgcgtaccggttagtaatgagtttggaattaattctgtggaatgtgtgtcagttagggtgtggaaagtccccaggctccccaggcaggcagaagtatgcaaagcatgcatctcaattagtcagcaaccaggtgtggaaagtccccaggctccccagcaggcagaagtatgcaaagcatgcatctcaattagtcagcaaccatagtcccgcccctaactccgcccatcccgcccctaactccgcccagttccgcccattctccgccccatggctgactaattttttttatttatgcagaggccgaggccgcctctgcctctgagctattccagaagtagtgaggaggcttttttggaggcctaggcttttgcaaaaagctcccgggagcttgtatatccattttcggatctgatcagcacgtgttgacaattaatcatcggcatagtatatcggcatagtataatacgacaaggtgaggaactaaaccatggccaagcctttgtctcaagaagaatccaccctcattgaaagagcaacggctacaatcaacagcatccccatctctgaagactacagcgtcgccagcgcagctctctctagcgacggccgcatcttcactggtgtcaatgtatatcattttactgggggaccttgtgcagaactcgtggtgctgggcactgctgctgctgcggcagctggcaacctgacttgtatcgtcgcgatcggaaatgagaacaggggcatcttgagcccctgcggacggtgccgacaggtgcttctcgatctgcatcctgggatcaaagccatagtgaaggacagtgatggacagccgacggcagttgggattcgtgaattgctgccctctggttatgtgtgggagggctaagcacaattcgagctcggtacctttaagaccaatgacttacaaggcagctgtagatcttagccactttttaaaagaaaaggggggactggaagggctaattcactcccaacgaagacaagatctgctttttgcttgtactgggtctctctggttagaccagatctgagcctgggagctctctggctaactagggaacccactgcttaagcctcaataaagcttgccttgagtgcttcaagtagtgtgtgcccgtctgttgtgtgactctggtaactagagatccctcagacccttttagtcagtgtggaaaatctctagcagtagtagttcatgtcatcttattattcagtatttataacttgcaaagaaatgaatatcagagagtgagaggaacttgtttattgcagcttataatggttacaaataaagcaatagcatcacaaatttcacaaataaagcatttttttcactgcattctagttgtggtttgtccaaactcatcaatgtatcttatcatgtctggctctagctatcccgcccctaactccgcccatcccgcccctaactccgcccagttccgcccattctccgccccatggctgactaattttttttatttatgcagaggccgaggccgcctcggcctctgagctattccagaagtagtgaggaggcttttttggaggcctagggacgtacccaattcgccctatagtgagtcgtattacgcgcgctcactggccgtcgttttacaacgtcgtgactgggaaaaccctggcgttacccaacttaatcgccttgcagcacatccccctttcgccagctggcgtaatagcgaagaggcccgcaccgatcgcccttcccaacagttgcgcagcctgaatggcgaatgggacgcgccctgtagcggcgcattaagcgcggcgggtgtggtggttacgcgcagcgtgaccgctacacttgccagcgccctagcgcccgctcctttcgctttcttcccttcctttctcgccacgttcgccggctttccccgtcaagctctaaatcgggggctccctttagggttccgatttagtgctttacggcacctcgaccccaaaaaacttgattagggtgatggttcacgtagtgggccatcgccctgatagacggtttttcgccctttgacgttggagtccacgttctttaatagtggactcttgttccaaactggaacaacactcaaccctatctcggtctattcttttgatttataagggattttgccgatttcggcctattggttaaaaaatgagctgatttaacaaaaatttaacgcgaattttaacaaaatattaacgcttacaatttaggtggcacttttcggggaaatgtgcgcggaacccctatttgtttatttttctaaatacattcaaatatgtatccgctcatgagacaataaccctgataaatgcttcaataatattgaaaaaggaagagtatgagtattcaacatttccgtgtcgcccttattcccttttttgcggcattttgccttcctgtttttgctcacccagaaacgctggtgaaagtaaaagatgctgaagatcagttgggtgcacgagtgggttacatcgaactggatctcaacagcggtaagatccttgagagttttcgccccgaagaacgttttccaatgatgagcacttttaaagttctgctatgtggcgcggtattatcccgtattgacgccgggcaagagcaactcggtcgccgcatacactattctcagaatgacttggttgagtactcaccagtcacagaaaagcatcttacggatggcatgacagtaagagaattatgcagtgctgccataaccatgagtgataacactgcggccaacttacttctgacaacgatcggaggaccgaaggagctaaccgcttttttgcacaacatgggggatcatgtaactcgccttgatcgttgggaaccggagctgaatgaagccataccaaacgacgagcgtgacaccacgatgcctgtagcaatggcaacaacgttgcgcaaactattaactggcgaactacttactctagcttcccggcaacaattaatagactggatggaggcggataaagttgcaggaccacttctgcgctcggcccttccggctggctggtttattgctgataaatctggagccggtgagcgtgggtctcgcggtatcattgcagcactggggccagatggtaagccctcccgtatcgtagttatctacacgacggggagtcaggcaactatggatgaacgaaatagacagatcgctgagataggtgcctcactgattaagcattggtaactgtcagaccaagtttactcatatatactttagattgatttaaaacttcatttttaatttaaaaggatctaggtgaagatcctttttgataatctcatgaccaaaatcccttaacgtgagttttcgttccactgagcgtcagaccccgtagaaaagatcaaaggatcttcttgagatcctttttttctgcgcgtaatctgctgcttgcaaacaaaaaaaccaccgctaccagcggtggtttgtttgccggatcaagagctaccaactctttttccgaaggtaactggcttcagcagagcgcagataccaaatactgttcttctagtgtagccgtagttaggccaccacttcaagaactctgtagcaccgcctacatacctcgctctgctaatcctgttaccagtggctgctgccagtggcgataagtcgtgtcttaccgggttggactcaagacgatagttaccggataaggcgcagcggtcgggctgaacggggggttcgtgcacacagcccagcttggagcgaacgacctacaccgaactgagatacctacagcgtgagctatgagaaagcgccacgcttcccgaagggagaaaggcggacaggtatccggtaagcggcagggtcggaacaggagagcgcacgagggagcttccagggggaaacgcctggtatctttatagtcctgtcgggtttcgccacctctgacttgagcgtcgatttttgtgatgctcgtcaggggggcggagcctatggaaaaacgccagcaacgcggcctttttacggttcctggccttttgctggccttttgctcacatgttctttcctgcgttatcccctgattctgtggataaccgtattaccgcctttgagtgagctgataccgctcgccgcagccgaacgaccgagcgcagcgagtcagtgagcgaggaagcggaagagcgcccaatacgcaaaccgcctctccccgcgcgttggccgattcattaatgcagctggcacgacaggtttcccgactggaaagcgggcagtgagcgcaacgcaattaatgtgagttagctcactcattaggcaccccaggctttacactttatgcttccggctcgtatgttgtgtggaattgtgagcggataacaatttcacacaggaaacagctatgaccatgattacgccaagcgcgcaattaaccctcactaaagggaacaaaagctggagctgcaagctt

SEQ ID NO: 13 - DNA, 2000 bp, Artificial Sequence
  Synthetic Polynucloetide
aaaaaaaaaaaaaaaaaaaaaaaaaaaaaaaaaaaaaaaaaaaaaaaaaaaaaaaaaaaaaaaaaaaaaaaaaaaaaaaaaaaaaaaaaaaaaaaaaaaaaaaaaaaaaaaaaaaaaaaaaaaaaaaaaaaaaaaaaaaaaaaaaaaaaaaaaaaaaaaaaaaaaaaaaaaaaaaaaaaaaaaaaaaaaaaaaaaaaaaaaaaaaaaaaaaaaaaaaaaaaaaaaaaaaaaaaaaaaaaaaaaaaaaaaaaaaaaaaaaaaaaaaaaaaaaaaaaaaaaaaaaaaaaaaaaaaaaaaaaaaaaaaaaaaaaaaaaaaaaaaaaaaaaaaaaaaaaaaaaaaaaaaaaaaaaaaaaaaaaaaaaaaaaaaaaaaaaaaaaaaaaaaaaaaaaaaaaaaaaaaaaaaaaaaaaaaaaaaaaaaaaaaaaaaaaaaaaaaaaaaaaaaaaaaaaaaaaaaaaaaaaaaaaaaaaaaaaaaaaaaaaaaaaaaaaaaaaaaaaaaaaaaaaaaaaaaaaaaaaaaaaaaaaaaaaaaaaaaaaaaaaaaaaaaaaaaaaaaaaaaaaaaaaaaaaaaaaaaaaaaaaaaaaaaaaaaaaaaaaaaaaaaaaaaaaaaaaaaaaaaaaaaaaaaaaaaaaaaaaaaaaaaaaaaaaaaaaaaaaaaaaaaaaaaaaaaaaaaaaaaaaaaaaaaaaaaaaaaaaaaaaaaaaaaaaaaaaaaaaaaaaaaaaaaaaaaaaaaaaaaaaaaaaaaaaaaaaaaaaaaaaaaaaaaaaaaaaaaaaaaaaaaaaaaaaaaaaaaaaaaaaaaaaaaaaaaaaaaaaaaaaaaaaaaaaaaaaaaaaaaaaaaaaaaaaaaaaaaaaaaaaaaaaaaaaaaaaaaaaaaaaaaaaaaaaaaaaaaaaaaaaaaaaaaaaaaaaaaaaaaaaaaaaaaaaaaaaaaaaaaaaaaaaaaaaaaaaaaaaaaaaaaaaaaaaaaaaaaaaaaaaaaaaaaaaaaaaaaaaaaaaaaaaaaaaaaaaaaaaaaaaaaaaaaaaaaaaaaaaaaaaaaaaaaaaaaaaaaaaaaaaaaaaaaaaaaaaaaaaaaaaaaaaaaaaaaaaaaaaaaaaaaaaaaaaaaaaaaaaaaaaaaaaaaaaaaaaaaaaaaaaaaaaaaaaaaaaaaaaaaaaaaaaaaaaaaaaaaaaaaaaaaaaaaaaaaaaaaaaaaaaaaaaaaaaaaaaaaaaaaaaaaaaaaaaaaaaaaaaaaaaaaaaaaaaaaaaaaaaaaaaaaaaaaaaaaaaaaaaaaaaaaaaaaaaaaaaaaaaaaaaaaaaaaaaaaaaaaaaaaaaaaaaaaaaaaaaaaaaaaaaaaaaaaaaaaaaaaaaaaaaaaaaaaaaaaaaaaaaaaaaaaaaaaaaaaaaaaaaaaaaaaaaaaaaaaaaaaaaaaaaaaaaaaaaaaaaaaaaaaaaaaaaaaaaaaaaaaaaaaaaaaaaaaaaaaaaaaaaaaaaaaaaaaaaaaaaaaaaaaaaaaaaaaaaaaaaaaaaaaaaaaaaaaaaaaaaaaaaaaaaaaaaaaaaaaaaaaaaaaaaaaaaaaaaaaaaaaaaaaaaaaaaaaaaaaaaaaaaaaaaaaaaaaaaaaaaaaaaaaaaaaaaaaaaaaaaaaaaaaaaaaaaaaaaaaaaaaaaaaaaaaaaaaaaaaaaaaaaaaaaaaaaaaaaaaaaaaaaaaaaaaaaaaaaaaaaaaaaaaaaaaaaaaaaaaaaaaaaaaaaaaaaaaaaaaaaaaaaaaaaaaaaaaaaaaaaaaaaaaaaaaaaaaaaaaaaaaaaaaaaaaaaaaaaaaaaaaaaaaaaaaaaaaaaaaaaaaaaaaaaaaaaaaaaaaaaaaaaaaaaaaaaaaaaaaaaaaaaaaaaaaaaaaaaaaaaaaaaaaaaaaaaaaaaaaaaaaaaaaaaaaaaaaaaaaaaaaaaaaaaaaaaaaaaaaaaaaaaaaaaaaaaaaaaaaaaaaaaaaaaaaaaaaaaaaaaaaaaa

SEQ ID NO: 14 - DNA, 1358 bp, Artificial Sequence
  Synthetic Polynucloetide
aaaaaaaaaaaaaaaaaaaaaaaaaaaaaaaaaaaaaaaaaaaaaaaaaaaaaaaaaaaaaaaaaaaaaaaaaaaaaaaaaaaaaaaaaaaaaaaaaaaaaaaaaaaaaaaaaaaaaaaaaaaaaaaaaaaaaaaaaaaaaaaaaaaaaaaaaaaaaaaaaaaaaaaaaaaaaaaaaaaaaaaaaaaaaaaaaaaaaaaaaaaaaaaaaaaaaaaaaaaaaaaaaaaaaaaaaaaaaaaaaaaaaaaaaaaaaaaaaaaaaaaaaaaaaaaaaaaaaaaaaaaaaaaaaaaaaaaaaaaaaaaaaaaaaaaaaaaaaaaaaaaaaaaaaaaaaaaaaaaaaaaaaaaaaaaaaaaaaaaaaaaaaaaaaaaaaaaaaaaaaaaaaaaaaaaaaaaaaaaaaaaaaaaaaaaaaaaaaaaaaaaaaaaaaaaaaaaaaaaaaaaaaaaaaaaaaaaaaaaaaaaaaaaaaaaaaaaaaaaaaaaaaaaaaaaaaaaaaaaaaaaaaaaaaaaaaaaaaaaaaaaaaaaaaaaaaaaaaaaaaaaaaaaaaaaaaaaaaaaaaaaaaaaaaaaaaaaaaaaaaaaaaaaaaaaaaaaaaaaaaaaaaaaaaaaaaaaaaaaaaaaaaaaaaaaaaaaaaaaaaaaaaaaaaaaaaaaaaaaaaaaaaaaaaaaaaaaaaaaaaaaaaaaaaaaaaaaaaaaaaaaaaaaaaaaaaaaaaaaaaaaaaaaaaaaaaaaaaaaaaaaaaaaaaaaaaaaaaaaaaaaaaaaaaaaaaaaaaaaaaaaaaaaaaaaaaaaaaaaaaaaaaaaaaaaaaaaaaaaaaaaaaaaaaaaaaaaaaaaaaaaaaaaaaaaaaaaaaaaaaaaaaaaaaaaaaaaaaaaaaaaaaaaaaaaaaaaaaaaaaaaaaaaaaaaaaaaaaaaaaaaaaaaaaaaaaaaaaaaaaaaaaaaaaaaaaaaaaaaaaaaaaaaaaaaaaaaaaaaaaaaaaaaaaaaaaaaaaaaaaaaaaaaaaaaaaaaaaaaaaaaaaaaaaaaaaaaaaaaaaaaaaaaaaaaaaaaaaaaaaaaaaaaaaaaaaaaaaaaaaaaaaaaaaaaaaaaaaaaaaaaaaaaaaaaaaaaaaaaaaaaaaaaaaaaaaaaaaaaaaaaaaaaaaaaaaaaaaaaaaaaaaaaaaaaaaaaaaaaaaaaaaaaaaaaaaaaaaaaaaaaaaaaaaaaaaaaaaaaaaaaaaaaaaaaaaaaaaaaaaaaaaaaaaaaaaaaaaaaaaaaaaaaaaaaaaaaaaaaaaaaaaaaaaaaaaaaaaaaaaaaaaaaaaaaaaaaaaaaaaaaaaaaaaaaaaaaaaaaaaaaaaaaaaaaaaaaaaa

SEQ ID NO: 15 - DNA, 5016 bp, Artificial Sequence
  Synthetic Polynucloetide
tttttttttttttttttttttttttttttttttttttttttttttttttttttttttttttttttttttttttttttttttttttttttttttttttttttttttttttttttttttttttttttttttttttttttttttttttttttttttttttttttttttttttttttttttttttttttttttttttttttttttttttttttttttttttttttttttttttttttttttttttttttttttttttttttttttttttttttttttttttttttttttttttttttttttttttttttttttttttttttttttttttttttttttttttttttttttttttttttttttttttttttttttttttttttttttttttttttttttttttttttttttttttttttttttttttttttttttttttttttttttttttttttttttttttttttttttttttttttttttttttttttttttttttttttttttttttttttttttttttttttttttttttttttttttttttttttttttttttttttttttttttttttttttttttttttttttttttttttttttttttttttttttttttttttttttttttttttttttttttttttttttttttttttttttttttttttttttttttttttttttttttttttttttttttttttttttttttttttttttttttttttttttttttttttttttttttttttttttttttttttttttttttttttttttttttttttttttttttttttttttttttttttttttttttttttttttttttttttttttttttttttttttttttttttttttttttttttttttttttttttttttttttttttttttttttttttttttttttttttttttttttttttttttttttttttttttttttttttttttttttttttttttttttttttttttttttttttttttttttttttttttttttttttttttttttttttttttttttttttttttttttttttttttttttttttttttttttttttttttttttttttttttttttttttttttttttttttttttttttttttttttttttttttttttttttttttttttttttttttttttttttttttttttttttttttttttttttttttttttttttttttttttttttttttttttttttttttttttttttttttttttttttttttttttttttttttttttttttttttttttttttttttttttttttttttttttttttttttttttttttttttttttttttttttttttttttttttttttttttttttttttttttttttttttttttttttttttttttttttttttttttttttttttttttttttttttttttttttttttttttttttttttttttttttttttttttttttttttttttttttttttttttttttttttttttttttttttttttttttttttttttttttttttttttttttttttttttttttttttttttttttttttttttttttttttttttttttttttttttttttttttttttttttttttttttttttttttttttttttttttttttttttttttttttttttttttttttttttttttttttttttttttttttttttttttttttttttttttttttttttttttttttttttttttttttttttttttttttttttttttttttttttttttttttttttttttttttttttttttttttttttttttttttttttttttttttttttttttttttttttttttttttttttttttttttttttttttttttttttttttttttttttttttttttttttttttttttttttttttttttttttttttttttttttttttttttttttttttttttttttttttttttttttttttttttttttttttttttttttttttttttttttttttttttttttttttttttttttttttttttttttttttttttttttttttttttttttttttttttttttttttttttttttttttttttttttttttttttttttttttttttttttttttttttttttttttttttttttttttttttttttttttttttttttttttttttttttttttttttttttttttttttttttttttttttttttttttttttttttttttttttttttttttttttttttttttttttttttttttttttttttttttttttttttttttttttttttttttttttttttttttttttttttttttttttttttttttttttttttttttttttttttttttttttttttttttttttttttttttttttttttttttttttttttttttttttttttttttttttttttttttttttttttttttttttttttttttttttttttttttttttttttttttttttttttttttttttttttttttttttttttttttttttttttttttttttttttttttttttttttttttttttttttttttttttttttttttttttttttttttttttttttttttttttttttttttttttttttttttttttttttttttttttttttttttttttttttttttttttttttttttttttttttttttttttttttttttttttttttttttttttttttttttttttttttttttttttttttttttttttttttttttttttttttttttttttttttttttttttttttttttttttttttttttttttttttttttttttttttttttttttttttttttttttttttttttttttttttttttttttttttttttttttttttttttttttttttttttttttttttttttttttttttttttttttttttttttttttttttttttttttttttttttttttttttttttttttttttttttttttttttttttttttttttttttttttttttttttttttttttttttttttttttttttttttttttttttttttttttttttttttttttttttttttttttttttttttttttttttttttttttttttttttttttttttttttttttttttttttttttttttttttttttttttttttttttttttttttttttttttttttttttttttttttttttttttttttttttttttttttttttttttttttttttttttttttttttttttttttttttttttttttttttttttttttttttttttttttttttttttttttttttttttttttttttttttttttttttttttttttttttttttttttttttttttttttttttttttttttttttttttttttttttttttttttttttttttttttttttttttttttttttttttttttttttttttttttttttttttttttttttttttttttttttttttttttttttttttttttttttttttttttttttttttttttttttttttttttttttttttttttttttttttttttttttttttttttttttttttttttttttttttttttttttttttttttttttttttttttttttttttttttttttttttttttttttttttttttttttttttttttttttttttttttttttttttttttttttttttttttttttttttttttttttttttttttttttttttttttttttttttttttttttttttttttttttttttttttttttttttttttttttttttttttttttttttttttttttttttttttttttttttttttttttttttttttttttttttttttttttttttttttttttttttttttttttttttttttttttttttttttttttttttttttttttttttttttttttttttttttttttttttttttttttttttttttttttttttttttttttttttttttttttttttttttttttttttttttttttttttttttttttttttttttttttttttttttttttttttttttttttttttttttttttttttttttttttttttttttttttttttttttttttttttttttttttttttttttttttttttttttttttttttttttttttttttttttttttttttttttttttttttttttttttttttttttttttttttttttttttttttttttttttttttttttttttttttttttttttttttttttttttttttttttttttttttttttttttttttttttttttttttttttttttttttttttttttttttttttttttttttttttttttttttttttttttttttttttttttttttttttttttttttttttttttttttttttttttttttttttttttttttttttttttttttttttttttttttttttttttttttttttttttttttttttttttttttttttttttttttttttttttttttttttttttttttttttttttttttttttttttttttttttttttttttttttttttttttttttttttttttttttttttttttttttttttttttttttttttttttttttttttttttttttttttttttttttttttttttttttttttttttttttttttttttttttttttttttttttttttttttttttttttttttttttttttttttttttttttttttttttttttttttttttttttttttttttttttttttttttttttttttttttttttttttttttttttttttttttttttttttttttttttttttttttttttttttttttttttttttttttttttttttttttttttttttttttttttttttttttttttttttttttttttttttttttttttttttttttttttttttttttttttttttttttttttttttttttttttttttttttttttttttttt

SEQ ID NO: 16 - DNA, 2400 bp, Artificial Sequence
  Synthetic Polynucloetide
tttttttttttttttttttttttttttttttttttttttttttttttttttttttttttttttttttttttttttttttttttttttttttttttttttttttttttttttttttttttttttttttttttttttttttttttttttttttttttttttttttttttttttttttttttttttttttttttttttttttttttttttttttttttttttttttttttttttttttttttttttttttttttttttttttttttttttttttttttttttttttttttttttttttttttttttttttttttttttttttttttttttttttttttttttttttttttttttttttttttttttttttttttttttttttttttttttttttttttttttttttttttttttttttttttttttttttttttttttttttttttttttttttttttttttttttttttttttttttttttttttttttttttttttttttttttttttttttttttttttttttttttttttttttttttttttttttttttttttttttttttttttttttttttttttttttttttttttttttttttttttttttttttttttttttttttttttttttttttttttttttttttttttttttttttttttttttttttttttttttttttttttttttttttttttttttttttttttttttttttttttttttttttttttttttttttttttttttttttttttttttttttttttttttttttttttttttttttttttttttttttttttttttttttttttttttttttttttttttttttttttttttttttttttttttttttttttttttttttttttttttttttttttttttttttttttttttttttttttttttttttttttttttttttttttttttttttttttttttttttttttttttttttttttttttttttttttttttttttttttttttttttttttttttttttttttttttttttttttttttttttttttttttttttttttttttttttttttttttttttttttttttttttttttttttttttttttttttttttttttttttttttttttttttttttttttttttttttttttttttttttttttttttttttttttttttttttttttttttttttttttttttttttttttttttttttttttttttttttttttttttttttttttttttttttttttttttttttttttttttttttttttttttttttttttttttttttttttttttttttttttttttttttttttttttttttttttttttttttttttttttttttttttttttttttttttttttttttttttttttttttttttttttttttttttttttttttttttttttttttttttttttttttttttttttttttttttttttttttttttttttttttttttttttttttttttttttttttttttttttttttttttttttttttttttttttttttttttttttttttttttttttttttttttttttttttttttttttttttttttttttttttttttttttttttttttttttttttttttttttttttttttttttttttttttttttttttttttttttttttttttttttttttttttttttttttttttttttttttttttttttttttttttttttttttttttttttttttttttttttttttttttttttttttttttttttttttttttttttttttttttttttttttttttttttttttttttttttttttttttttttttttttttttttttttttttttttttttttttttttttttttttttttttttttttttttttttttttttttttttttttttttttttttttttttttttttttttttttttttttttttttttttttttttttttttttttttttttttttttttttttttttttttttttttttttttttttttttttttttttttttttttttttttttttttttttttttttttttttttttttttttttttttttttttttttttttttttttttttttttttttttttttttttttttttttttttttttttttttttttttttttttttttttttttttttttttttttttttttttttttttttttttttttttttttttttttttttttttttttttttttttttttttttttttttttttttttttttttttttttttttttttttttttttttttttttttttttttttttttttttttttttttttttttttttttttttttttttttttttttttttttttttttttttttttttttttttttttttttttttt

SEQ ID NO: 17 - DNA, 1632 bp, Artificial Sequence
  Synthetic Polynucloetide
atggccgacaagaacatcctgtacggccccgagcctttctaccctctggaagatggaacagccggcgagcagatgttcgacgccctgagcagatatgccgccattcctggatgtatcgccctgacaaacgcccacaccaaagaaaacgtgctgtacgaagagttcctgaagctgagctgtcggctggccgagagcttcaagaagtacggcctgaagcagaacgacacaatcgccgtgtgcagcgagaacagcctccagttcttcctgcctgtgatcgccagcctgtacctgggcattattgtggcccctgtgaacgacaagtacatcgagagagagctgatccacagcctgggcatcgtgaagccccggatcgtgttctgctccaagaacaccttccagaaggtgctgaacgtcaagagcaagctgaagtccatcgagacaatcatcatcctggacctgaacgaggacctcggcggctaccagtgcctgaacaacttcatcagccagaacagcgacagcaacctggacgtgaagaagttcaagccctacagcttcaaccgggacgaccaggtggcctccatcatgtttagcagcggcaccaccggactgcccaaaggcgttatgctgacccacaagaatatcgtggcccggttctctatcgctaaggaccccaccttcggcaacgccatcaatcctacaagcgctatcctgacagtgatccccttccaccacggcttcggcatgatgaccacactgggctacttcacctgtggcttcagagtggtgctgatgcacaccttcgaggaaaagctgtttctccagagcctccaggactacaaggtggaaagcaccctgctggtgcctactctgatggccttcctggctaagtctgccctggtcgagaagtacgatctgagccacctgaaagagatcgcctctggcggagcccctctgagcaaagaaatcggcgagatggtcaagaagcggttcaagctgaacttcgtgcggcaaggctatggcctgaccgagacaacaagcgccgtgctgattacccctaagggcgacgccaagcctggcagcacaggcaaaattgtgcctctgcacgccgtgaaggtggtggaccctaccacaggcaagatcctgggacctaatgagcccggcgagctgtacttcaagggacccatgattatgaagggctactacaacaacgaggaagccaccaaggccattatcgacaacgacggctggctgcggagcggcgatattgcctactacgacaatgacggccacttctacatcgtggacagactgaagtccctcatcaagtacaagggctatcaggtggccccagccgagatcgagggtatcctgctgcaacacccctatatcgtggatgccggcgtgacaggcatccctgatgaagctgctggcgaacttccagcagctggcgtggtggttcagaccggcaagtacctgaatgagcagatcgtgcaggactacgtggcctctcaggtgtccacagccaaatggctgagaggcggcgtgaagttcctggacgagatcccaaagggctctaccggcaagatcgacagaaaggtgctgcggcagatgctggaaaagcacaccaatggc

SEQ ID NO: 18 - DNA, 1632 bp, Artificial Sequence
  Synthetic Polynucloetide
atggccgacaagaacatcctgtacggccccgagcctttctaccctctggaagatggaacagccggcgagcagatgttcgacgccctgagcagatacgccgacattcctggatgtatcgccctgacaaacgcccacaccaaagaaaacgtgctgtacgaagagttcctgaagctgagctgtcggctggccgagagcttcaagaagtacggcctgaagcagaacgacacaatcgccgtgtgcagcgagaacagcctccagttcttcctgcctgtgatcgccagcctgtacctgggcattattgtggcccctgtgaacgacaagtacatcgagagagagctgatccacagcctgggcatcgtgaagccccggatcgtgttctgctccaagaacaccttccagaaggtgctgaacgtcaagagcaagctgaagtccatcgagacaatcatcatcctggacctgaacgacgacctcggcggctaccagtgcctgaacaacttcatcagccagaacagcgacagcaacctggacgtgaagaagttcaagccctacagcttcaaccgggacgaccaggtggccctgattatgtttagcagcggcaccaccggactgcccaaaggcgttatgctgacccacaagaatatcgtggcccggttctctatcgctaaggaccccaccttcggcaacgccatcaatcctacaagcgctatcctgacagtgatccccttccaccacggcttcggcatgatgaccacactgggctacttcacctgtggcttcagagtggtgctgatgcacaccttcgaggaaaagctgtttctccagagcctccaggactacaaggtggaaagcaccctgctggtgcctactctgatggccttcctggctaagtctgccctggtcgagaagtacgatctgagccacctgaaagagatcgcctctggcggagcccctctgagcaaagaaatcggcgagatggtcaagaagcggttcaagctgaacttcgtgcggcaaggctatggcctgaccgagacaacaagcgccgtgctgattacccctaagggcgacgccaagcctggcagcacaggcaagattgtgcctttccacgccgtgaaggtggtggaccctaccaccggaaagatcctgggacctaatgagcccggcgagctgtacttcaagggacccatgattatgaagggctactacaacaacgaggaagccaccaaggccattatcgacaacgacggctggctgcggagcggcgatattgcctactacgacaatgacggccacttctacatcgtggacagactgaagtccctcatcaagtacaagggctaccaggtcgcccctgccgagattgagggtatcctgctgcaacacccctatatcgtggatgccggcgtgacaggcatccctgatgaagctgctggcgaacttccagcagctggcgtggtggttcagaccggcaagtacctgaatgagcagatcgtgcaggactacgtggcctctcaggtgtccacagccaaatggctgagaggcggcgtgatcttcctggacgagatcccaaagggctctaccggcaagatcgacagaaaggtgctgcggcagatgctggaaaagcacaccaatggc

SEQ ID NO: 19 - DNA, 1632 bp, Artificial Sequence
  Synthetic Polynucloetide
atggccgacaagaacatcctgtacggccccgagcctttctaccctctggctgatggaacagccggcgagcagatgttcgatgccctgagcagatacgccgacatcagcggatgtatcgccctgacaaacgcccacaccaaagaaaacgtgctgtacgaagagttcctgaagctgagctgtcggctggccgagagcttcaagaagtacggcctgaagcagaacgacacaatcgccgtgtgcagcgagaacggcctccagttctttctgcctgtgatcgccagcctgtacctgggcattatcgctgcccctgtgtccgataagtacatcgagagagagctgatccacagcctgggcatcgtgaagccccggatcatcttctgctccaagaacaccttccagaaggtgctgaacgtcaagagcaagctgaagtccgtggaaaccatcatcatcctggacctgaacgaggacctcggcggctaccagtgcctgaacaacttcatctctcagaacagcgacagcaacctggacgtgaagaagttcaagccctacagcttcaaccgggacgaccaggtggccctggtcatgtttagctctggcacaaccggcgtgcccaagggcgttatgctgacccacaagaatatcgtggcccggttcagcctggctaaggaccctaccttcggcaacgccatcaatcccaccaccgctatcctgacagtgatccccttccaccacggcttcggcatgatgaccacactgggctacttcacctgtggcttcagagtggtgctgatgcacaccttcgaggaaaagctgtttctccagagcctccaggactacaaggtggaaagcaccctgctggtgcctactctgatggcctttctggccaagtctgccctggtcgagaagtacgatctgagccacctgaaagagatcgcctctggcggagcccctctgagcaaagaaatcggcgagatggtcaagaagcggttcaagctgaacttcgtgcggcaaggctatggcctgaccgagacaacaagcgccgtgctgattacccctaagggcgacgctagacctggcagcacaggcaagatcgtgcctttccacgccgtgaaggtggtggaccctacaaccggcaagatcctgggacctaatgagcccggcgagctgtactttaagggcgccatgattatgaagggctactacaacaacgaggaagccaccaaggccattatcgacaacgacggctggctgcggagcggcgatattgcctactacgacaatgacggccacttctacatcgtggacagactgaagtccctcatcaagtacaagggctaccaggtcgcccctgccgagattgagggtatcctgctgcaacacccctatatcgtggatgccggcgtgacaggcatccctgatgaagctgctggcgaacttccagcagcaggcgtggtggttcagaccggcaagtacctgaatgagcagatcgtgcaggacttcgtgtccagccaggtgtccacagccaaatggctgagaggcggcgtgaagttcctggacgagatcccaaagggctccaccggaaagatcgacagaaaggtgctgcggcagatgtttgagaagcacaccaacggc

SEQ ID NO: 20 - DNA, 1632 bp, Artificial Sequence
  Synthetic Polynucloetide
atggccgacaagaacatcctgtacggccccgagcctttctaccctctggctgatggaacagccggcgagcagatgttctacgccctgagcagatacgccgacatcagcggatgtatcgccctgacaaacgcccacaccaaagaaaacgtgctgtacgaagagttcctgaagctgagctgtcggctggccgagagcttcaagaagtacggcctgaagcagaacgacacaatcgccgtgtgcagcgagaacggcctccagttcttcctgcctatcattgccagcctgtacctgggcatcattgctgcccctgtgtccgataagtacatcgagagagagctgatccactctctgggcatcgtgaagccccggatcatcttctgctccaagaacaccttccagaaggtgctgaacgtcaagagcaagctgaaatacgtggaaaccatcatcatcctggacctgaacgaggacctcggcggctaccagtgcctgaacaacttcatctctcagaacagcgacatcaacctggacgtcaagaagttcaagccctacagcttcaaccgggacgaccaggtggccctggtcatgtttagctctggcacaaccggcgtgtccaagggcgtgatgctgacccacaagaatatcgtggcccggttcagcctggctaaggaccctaccttcggcaacgccatcaatcccaccaccgctatcctgacagtgatccccttccaccacggcttcggcatgatgaccacactgggctacttcacctgtggcttcagagtggtgctgatgcacaccttcgaggaaaagctgtttctccagagcctccaggactacaaggtggaaagcaccctgctggtgcctactctgatggcctttctggctaagagcgccctggtcgagaagtacgatctgagccacctgaaagagatcgcctctggcggagcccctctgagcaaagaaatcggcgagatggtcaagaagcggttcaagctgaacttcgtgcggcaaggctatggcctgaccgagacaacaagcgccgtgctgattacccctaacaacgatgtgcggcctggcagcacaggcaagatcgtgccttttcacgccgtgaaggtggtggaccctacaaccggcaagatcctgggacctaatgagcccggcgagctgtacttcaagggcgacatgattatgaagggctactacaacaacgaggaagccaccaaggccattatcaacaaggacggctggctgcggagcggcgacattgcctactatgacaacgacggccacttctacatcgtggaccggctgaagtccctgattaagtacaagggctaccaggtcgcccctgccgagattgagggtatcctgctgcaacacccctatatcgtggatgccggcgtgacaggcatccctgatgaagctgctggcgaacttccagcagctggcgtggtggttcagaccggcaagtacctgaatgagcagatcgtgcagaatttcgtgtccagccaggtgtccaccgccaagtggcttagaggcggcgtgaagttcctggacgagatccctaaaggctccaccggaaagatcgacagaaaggtgctgcgccagatgttcgagaagcacaccaatggc

SEQ ID NO: 21 - DNA, 1626 bp, Artificial Sequence
  Synthetic Polynucloetide
atgatgaagcgcgagaagaacgtgatctacggccccgaacctctgcaccctcttgaggatcttacagccggcgagatgctgttcagagccctgcggaaacacagccatctgcctcaggctctggtggatgtcgtgggagatgagagcctgtcctacaaagagttcttcgaggccaccgtgctgctggcccagtctctgcataattgcggctacaagatgaacgacgtggtgtccatctgcgccgagaacaacacccggttcttcatccctgtgatcgccgcctggtacatcggcatgattgtggcccctgtgaacgagagctacatccccgacgagctgtgcaaagtgatgggcatcagcaagccccagatcgtgttcaccaccaagaacatcctgaacaaggtgctggaagtgcagagccggaccaacttcatcaagcggatcatcatcctggacaccgtggaaaacatccacggctgcgagagcctgccaaacggcatctccagatacagcgacggcaatatcgccaacttcaagcccctgcacttcgaccccgtggaacaggtggcagccatcctgtgtagcagcggcacaacaggactgcccaaaggcgtgatgcagacccaccagaatatctgcgtgcggctgatccacgctctggaccctagagctggaacccagctgattcctggcgtgaccgtgctggtgtacctgcctttctttcacgccttcggcttcagcatcaccctgggctacttcatggtcggactgagagtgattatgtttcggcgcttcgaccaagaagccttcctgaaggccatccaggactacgaagtgcgctccgtgattaacgtgcccagcgtgatcctgttcctgagcaagagcccactggtggataagtacgacctgagcagcctgagagagctgtgttgcggagctgcccctctggctaaagaggtggcagaagttgccgccaagcggctgaatctgcctggcatcagatgtggctttggcctgaccgagagcaccagcgccaatatccacagcctgcgggacgagtttaagagcggctctctgggcagagtgacccctctgatggccgccaagatcgccgatagagagacaggcaaagccctgggacctaatcaagtgggcgagctgtgtatcaagggacctatggtgtccaagggctacgtgaacaacgtggaagccaccaaagaggccatcgacgacgacggctggctgcactctggcgatttcggctactacgacgaggacgagcacttctacgtggtggacagatacaaagagctgattaagtacaagggcagccaggtggccccagccgagctggaagaaatcctgctgaagaacccctgcatccgcgacgtggcagttgtgggcattcctgatctggaagccggcgaactgcctagcgcctttgtggttaagcagcccggcaaagagatcaccgccaaagaggtgtacgactacctggccgagagagtgtcccacaccaagtatctgagaggcggcgtcagattcgtggacagcatccccagaaacgtgaccggcaagatcacccggaaagagctgctgaaacagctgctggaaaaggctggcgga

SEQ ID NO: 22 - DNA, 999 bp, Artificial Sequence
  Synthetic Polynucloetide
atggccttaccagtgaccgccttgctcctgccgctggccttgctgctccacgccgccaggccgtggtctcatccccagtttgaaaagggcagcggcgaattcagagtgcagcctaccgagagcatcgtgcggttccccaacatcaccaatctgtgccctttcggcgaggtgttcaacgccaccagattcgcctctgtgtacgcctggaaccggaagcggatcagcaactgcgtggccgattacagcgtgctgtacaacagcgccagcttcagcaccttcaagtgctacggcgtgtcccctaccaagctgaacgacctgtgcttcaccaacgtgtacgccgacagcttcgtgatcagaggcgacgaagtgcggcagattgcccctggacagacaggcaagatcgccgactacaactacaagctgcccgacgacttcaccggctgtgtgattgcctggaacagcaacaacctggacagcaaagtcggcggcaactacaattacctgtaccggctgtttcggaagtccaacctgaagcctttcgagcgggacatcagcaccgaaatctaccaggccggcagcaccccttgcaatggcgtggaaggcttcaactgctacttcccactgcaaagctacggcttccagcctacaaacggcgtgggctaccagccttacagagtggtggtgctgagcttcgagctgctgcacgctcctgctacagtgtgcggccctaagaaaagcaccaacctggtcaagaacaaatgcgtgaacttcacgcgtaccaccaccaagcctgtgctgcggaccccttctcctgtgcatccaacaggcacaagccagcctcagaggcccgaagattgcagacctagaggcagcgtgaaaggcaccggcctggatttcgcctgcgacatctatatctgggctcctctggccggcatctgtgtggctccactgctgagcctgatcatcaccctgatctgctaccacagaagctaactcgag

SEQ ID NO: 23 - DNA, 5444 bp, Artificial Sequence
  Synthetic Polynucloetide
ggatccagctggatgtctgcattgccgaggccaccagggctggctcagcaactgtcggggaatcaccagggtctgagaaatcttgtgcgcatgtgaggggctgtgggagcagagaaccactgggtgggaaattctaatccccaccctgctggaaactctctgggtggccccaacatgctaatcctccggcaaacctctgtttcctcctcaaaaggcaggaggtcggaaagaataaacaatgagagtcacattaaaaacacaaaatcctacggaaatactgaagaatgagtctcagcactaaggaaaagcctccagcagctcctgctttctgagggtgaaggatagacgctgtggctctgcatgactcactagcactctatcacggccatattctggcagggtcagtggctccaactaacatttgtttggtactttacagtttattaaatagatgtttatatggagaagctctcatttctttctcagaagagcctggctaggaaggtggatgaggcaccatattcattttgcaggtgaaattcctgagatgtaaggagctgctgtgacttgctcaaggccttatatcgagtaaacggtagcgctggggcttagacgcaggtgttctgatttatagttcaaaacctctatcaatgagagagcaatctcctggtaatgtgatagatttcccaacttaatgccaacataccataaacctcccattctgctaatgcccagcctaagttggggagaccactccagattccaagatgtacagtttgctttgctgggcctttttcccatgcctgcctttactctgccagagttatattgctggggttttgaagaagatcctattaaataaaagaataagcagtattattaagtagccctgcatttcaggtttccttgagtggcaggccaggcctggccgtgaacgttcactgaaatcatggcctcttggccaagattgatagcttgtgcctgtccctgagtcccagtccatcacgagcagctggtttctaagatgctatttcccgtataaagcatgagaccgtgacttgccagccccacagagccccgcccttgtccatcactggcatctggactccagcctgggttggggcaaagagggaaatgagatcatgtcctaaccctgatcctcttgtcccacagatgtgaagcagaccctgaatttcgacctgctgaagctggctggcgacgtggaatccaacccaggccctatggccttaccagtgaccgccttgctcctgccgctggccttgctgctccacgccgccaggccgcaggtccagctcgtcgagtccggcggcggcctcgtccaggccggcgactccgtcaccctctcctgcaccgcctccggccgcaccttctcctcctacgccctcgcctggttccgccagcgccccggcaaggagcgcgagttcgtcgccggcctccgctggggcggccccaccaactacgccgactccgtcaaggaccgcttcaccatctccggcgactccgccaagcacaccatgtacctccagatgaactccctcaagcccgaggacaccgccgtctactactgcggctacaaccccggcggctgggccgtcccctcccagtacgagtacgactcctggggccagggcacccaggtcaccgtctcctccggtaccggcggaggcggatctggcggcggaggtagcggtggcggaggatctgaattcgacatccagatgacacagagccctagcagcctgtctgccagcgtgggagacagagtgaccatcacatgcaaggccagcgaccacatcaacaactggctggcctggtatcagcagaagcctggacaggcccctaagctgctgatctacggcgctaccacactggaaacaggcgtgcccagcagattttctggcagcggctctggcaccgactacaccctgacaatatccagcctccagcctgaggacttcgccacctactactgtcagcagagctggaacaccccttggacattcggccagggcaccaagctggaaatcaagagactcgaggacctgaagaacgtgttcccacctgaggtggccgtgttcgagcctagcgaggccgagatcagccacacccagaaagccaccctcgtgtgcctggctaccggcttctaccccgaccatgtggaactgtcttggtgggtcaacggcaaagaggtgcacagcggcgtgtgtaccgacccccagccactgaaagaacagcccgccctgaacgacagccggtactgcctgagcagcagactgagagtgtccgccaccttctggcagaacccccggaaccacttcagatgccaggtgcagttctacggcctgagcgagaacgacgagtggacccaggacagagccaagcccgtgacccagatcgtgtctgccgaagcctggggcagagccgattgcggctttaccagcgagagctaccagcagggcgtgctgagcgccaccatcctgtacgagatcctgctgggcaaggccaccctgtacgccgtgctggtgtctgccctggtgctgatggctatggtcaagcggaaggacagccggggaagggccaagcgatctggatctggagcaacaaacttctcactactcaaacaagcaggtgacgtggaggagaatcccgggcctactagtatggactggatttggcgcatccttttccttgtcggcgctgctaccggcgcccattccgggccccaggttcagctgcaagagtctggcggaggacttgctcaagctggcggaagcctgagactgtcttgtgccgcctctggcagaaccttcagcatgggctggtttagacaggcccctggcaaagagagagagttcgtcgccgccatcacatacagcggcggcagcccttactacgcctcttctgtcagaggccggttcaccatcagccgggacaacgccaagaacaccgtgtacctccagatgaacagcctgaagccagaggacaccgccgtgtactactgtgccgccaatccaacctacggcagcgactggaatgccgagaattggggccagggcacccaagtgacagtgtctagtggatccggcggcggaggatctggcggaggcggatctgggggcggaggctctttcgaacaagttcagcttcaacagcctggcgctgagctggtcaaacctggcgcttctgtgaagatgagctgcaaagccagcggctacgccttcagcagctactggatcaactggatgaagcagaaacccggccagggactcgaatggatcggccaaatctatcccggcgacggcgacaccaactacaacggcaagttcaagggcagagccacactgaccgccgatacctctagcagcacagcctacatgcagctgagcagcctgaccagcgaagatagcgccgtgtacttctgtgcccggtccatcacaacagtcgtgggctgcgctatggactattggggccagggaacaagcgtgaccgtgtctagtacgcgtatccagaaccctgatcctgccgtgtaccagctgcgggatagcaagagcagcgacaagagcgtgtgtctgttcaccgacttcgacagccagaccaacgtgtcccagagcaaggactccgacgtgtacatcaccgataagtgcgtgctggacatgcggagcatggacttcaagagcaactccgccgtggcctggtccaacaagtccgatttcgcctgcgccaacgccttcaacaacagcattatccccgaggacacattcttcccaagccccgagagcagctgcgacgtgaagctggtggaaaagagcttcgagacagacaccaacctgaacttccagaacctgagcgtgatcggcttcagaatcctgctgctgaaagtggccggctttaacctgctgatgaccctgcggctgtggtccagctgaccagacatgataagatacattgatgagtttggacaaaccacaactagaatgcagtgaaaaaaatgctttatttgtgaaatttgtgatgctattgctttatttgtaaccattataagctgcaataaacaagttaacaacaacaattgcattcattttatgtttcaggttcagggggaggtgtgggaggttttttaaagcaagtaaaacctctacaaatgtggtatggaattaattctaaaatacagcatagcaaaactttaacctccaaatcaagcctctacttgaatccttttctgagggatgaataaggcataggcatcaggggctgttgccaatgtgcattagctgtttgcagcctcaccttctttcatggagtttaagatatagtgtattttcccaaggtttgaactagctcttcatttctttatgttttaaatgcactgacctcccacattccctttttagtaaaatattcagaaataatttaaatacatcattgcaatgaaaataaatgttttttattaggcagaatccagatgctcaaggcccttcataatatcccccagtttagtagttggacttagggaacaaaggaacctttaatagaaattggacagcaagaaagcgagcttctagcttatcctgtatatcacagacaaaactgtgctagacatgaggtctatggacttcaagagcaacagtgctgtggcctggagcaacaaatctgactttgcatgtgcaaacgccttcaacaacagcattattccagaagacaccttcttccccagcccaggtaagggcagctttggtgccttcgcaggctgtttccttgcttcaggaatggccaggttctgcccagagctctggtcaatgatgtctaaaactcctctgattggtggtctcggccttatccattgccaccaaaaccctctttttactaagaaacagtgagccttgttctggcagtccagagaatgacacgggaaaaaagcagatgaagagaaggtggcaggagagggcacgtggcccagcctcagtctctccaactgagttcctgcctgcctgcctttgctcagactgtttgccccttactgctcttctaggcctcattctaagccccttctccaagttgcctctccttatttctccctgtctgccaaaaaatctttcccagctcactaagtcagtctcacgcagtcactcattaacccaccaatcactgattgtgccggcacatgaatgcaccaggtgttgaagtggaggaattaaaaagtcagatgaggggtgtgcccagaggaagcaccattctagttgggggagcccatctgtcagctgggaaaagtccaaataacttcagattggaatgtgttttaactcagggttgagaaaacagccaccttcaggacaaaagtcagggaagggctctctgaagaaatgctacttgaagataccagccctaccaagggcagggagaggaccctatagaggcctgggaca

SEQ ID NO: 24 - DNA, 395 bp, Artificial Sequence
  Synthetic Polynucloetide
ggaatgaaagaccccacctgtaggtttggcaagctaggatcaaggttaggaacagagagacagcagaatatgggccaaacaggatatctgtggtaagcagttcctgccccggctcagggccaagaacagttggaacagcagaatatgggccaaacaggatatctgtggtaagcagttcctgccccggctcagggccaagaacagatggtccccagatgcggtcccgccctcagcagtttctagagaaccatcagatgtttccagggtgccccaaggacctgaaatgaccctgtgccttatttgaactaaccaatcagttcgcttctcgcttctgttcgcgcgcttctgctccccgagctcaataaaagagcccacaacccctcactcggcgcgat

SEQ ID NO: 25 - DNA, 2145 bp, Artificial Sequence
  Synthetic Polynucloetide
atggccttaccagtgaccgccttgctcctgccgctggccttgctgctccacgccgccaggccggacatccagctgacacagagccctgatagcctggccgtgtctctgggagagagagccaccatcaactgcaagagcagccagagcgtgctgtactccagcatcaacaagaactacctggcctggtatcagcagaagcccggccagcctcctaagctgctgatctactgggccagcaccagagaaagcggcgtgcccgatagattttctggcagcggctctggcaccgacttcaccctgacaattagcagcctccaggccgaggatgtggccgtgtactactgccagcagtattacagcaccccttacaccttcggccagggcaccaaggtggaaatcaaaggcggaggcggaagtggaggcggaggatctggcggcggaggctctcaaatgcagctggtgcagagcggcaccgaagtgaagaagcctggcgagagcctgaagatcagctgcaaaggctccggctacggcttcatcacctactggatcggctgggtccgacagatgcctggcaaaggactggaatggatgggcatcatctaccccggcgacagcgagacaagatacagccctagcttccagggccaagtgaccatcagcgccgacaagagcatcaataccgcctacctccagtggtccagcctgaaggcttctgacaccgccatctactactgtgccggcggaagcggcatcagcaccccaatggatgtttggggccagggaaccaccgtgacagttacgcgtaccacgacgccagcgccgcgaccaccaacaccggcgcccaccatcgcgtcgcagcccctgtccctgcgcccagaggcgtgccggccagcggcggggggcgcagtgcacacgagggggctggacttcgcctgtgacatctacatctgggcgcccttggccgggacttgtggggtccttctcctgtcactggttatcaccctttactgcaaacggggcagaaagaaactcctgtatatattcaaacaaccatttatgagaccagtacaaactactcaagaggaagatggctgtagctgccgatttccagaagaagaagaaggaggatgtgaactgagagtgaagttcagcaggagcgcagacgcccccgcgtaccagcagggccagaaccagctctataacgagctgaatctaggacgaagagaggagtacgatgttttggacaagagacgtggccgggaccctgagatggggggaaagccgagaaggaagaaccctcaggaaggcctgtacaatgaactgcagaaagataagatggcggaggcctacagtgagattgggatgaaaggcgagcgccggaggggcaaggggcacgatggcctttaccagggtctcagtacagccaccaaggacacctacgacgcccttcacatgcaggccctgccccctcgctctagtggctccggcgagggcagaggaagtctactaacctgcggagatgtggaagaaaatcctggcccacatatgaccgagtacaagcccacggtgcgcctcgccacccgcgacgacgtccccagggccgtacgcaccctcgccgccgcgttcgccgactaccccgccacgcgccacaccgtcgatccggaccgccacatcgagcgggtcaccgagctgcaagaactcttcctcacgcgcgtcgggctcgacatcggcaaggtgtgggtcgcggacgacggcgccgcggtggcggtctggaccacgccggagagcgtcgaagcgggggcggtgttcgccgagatcggcccgcgcatggccgagttgagcggttcccggctggccgcgcagcaacagatggaaggcctcctggcgccgcaccggcccaaggagcccgcgtggttcctggccaccgtcggcgtctcgcccgaccaccagggcaagggtctgggcagcgccgtcgtgctccccggagtggaggcggccgagcgcgccggggtgcccgccttcctggagacctccgcgccccgcaacctccccttctacgagcggctcggcttcaccgtcaccgccgacgtcgaggtgcccgaaggaccgcgcacctggtgcatgacccgcaagcccggtgcctga

SEQ ID NO: 26 - DNA, 2571 bp, Artificial Sequence
  Synthetic Polynucloetide
atggccttaccagtgaccgccttgctcctgccgctggccttgctgctccacgccgccaggccggacatccagctgacacagagccctgatagcctggccgtgtctctgggtgagagagccaccatcaactgcaagagcagccagagcgtgctgtactccagcatcaacaagaactacctggcctggtatcagcagaagcccggccagcctcctaagctgctgatctactgggccagcaccagagaaagcggcgtgcccgatagattttctggcagcggctctggcaccgacttcaccctgacaattagcagcctccaggccgaggatgtggccgtgtactactgccagcagtattacagcaccccttacaccttcggccagggcaccaaggtggaaatcaaactcgaggacctgaagaacgtgttcccacctgaggtggccgtgttcgagcctagcgaggccgagatcagccacacccagaaagccaccctcgtgtgcctggctaccggcttctaccccgaccatgtggaactgtcttggtgggtcaacggcaaagaggtgcacagcggcgtgtgtaccgacccccagccactgaaagaacagcccgccctgaacgacagccggtactgcctgagcagcagactgagagtgtccgccaccttctggcagaacccccggaaccacttcagatgccaggtgcagttctacggcctgagcgagaacgacgagtggacccaggacagagccaagcccgtgacccagatcgtgtctgccgaagcctggggcagagccgattgcggctttaccagcgagagctaccagcagggcgtgctgagcgccaccatcctgtacgagatcctgctgggcaaggccaccctgtacgccgtgctggtgtctgccctggtgctgatggctatggtcaagcggaaggacagccggggaagggccaagcgatctggatctggagcaacaaacttctcactactcaaacaagcaggtgacgtggaggagaatcccgggcctactagtatggactggatttggcgcatccttttccttgtcggcgctgctaccggcgcgcattccttcgaacaaatgcagctggtgcagagcggcaccgaagtgaagaagcctggcgagagcctgaagatcagctgcaaaggctccggctacggcttcatcacctactggatcggctgggtccgacagatgcctggcaaaggactggaatggatgggcatcatctaccccggcgacagcgagacaagatacagccctagcttccagggccaagtgaccatcagcgccgacaagagcatcaataccgcctacctccagtggtccagcctgaaggcttctgacaccgccatctactactgtgccggcggaagcggcatcagcaccccaatggatgtttggggccagggaaccaccgtgacagttacgcgtatccagaaccctgatcctgccgtgtaccagctgcgggatagcaagagcagcgacaagagcgtgtgtctgttcaccgacttcgacagccagaccaacgtgtcccagagcaaggactccgacgtgtacatcaccgataagtgcgtgctggacatgcggagcatggacttcaagagcaactccgccgtggcctggtccaacaagtccgatttcgcctgcgccaacgccttcaacaacagcattatccccgaggacacattcttcccaagccccgagagcagctgcgacgtgaagctggtggaaaagagcttcgagacagacaccaacctgaacttccagaacctgagcgtgatcggcttcagaatcctgctgctgaaagtggccggctttaacctgctgatgaccctgcggctgtggtccagccgcgccaagagaagcggatctggcgtgaagcagaccctgaatttcgacctgctgaagctggctggcgacgtggaatccaacccaggcccttctagaggccatatgaccgagtacaagcccacggtgcgcctcgccacccgcgacgacgtccccagggccgtacgcaccctcgccgccgcgttcgccgactaccccgccacgcgccacaccgtcgatccggaccgccacatcgagcgggtcaccgagctgcaagaactcttcctcacgcgcgtcgggctcgacatcggcaaggtgtgggtcgcggacgacggcgccgcggtggcggtctggaccacgccggagagcgtcgaagcgggggcggtgttcgccgagatcggcccgcgcatggccgagttgagcggttcccggctggccgcgcagcaacagatggaaggcctcctggcgccgcaccggcccaaggagcccgcgtggttcctggccaccgtcggcgtctcgcccgaccaccagggcaagggtctgggcagcgccgtcgtgctccccggagtggaggcggccgagcgcgccggggtgcccgccttcctggagacctccgcgccccgcaacctccccttctacgagcggctcggcttcaccgtcaccgccgacgtcgaggtgcccgaaggaccgcgcacctggtgcatgacccgcaagcccggtgcctga

SEQ ID NO: 27 - DNA, 10 bp, Artificial Sequence
  Synthetic Polynucloetide
agacaagggt

SEQ ID NO: 28 - DNA, 10 bp, Artificial Sequence
  Synthetic Polynucloetide
acacatctct

SEQ ID NO: 29 - DNA, 10 bp, Artificial Sequence
  Synthetic Polynucloetide
attcatctct

SEQ ID NO: 30 - DNA, 10 bp, Artificial Sequence
  Synthetic Polynucloetide
attgatctct

SEQ ID NO: 31 - DNA, 63 bp, Artificial Sequence
  Synthetic Polynucloetide
atggccttaccagtgaccgccttgctcctgccgctggccttgctgctccacgccgccaggccg

SEQ ID NO: 32 - DNA, 63 bp, Artificial Sequence
  Synthetic Polynucloetide
atggccctgcctgtgacagctctgctgctgcctctggcactgctgctgcacgccgccagacct

SEQ ID NO: 33 - DNA, 57 bp, Artificial Sequence
  Synthetic Polynucloetide
atggattggatatggaggatactttttctcgtgggggcagcaaccggggctcattcc

SEQ ID NO: 34 - DNA, 57 bp, Artificial Sequence
  Synthetic Polynucloetide
atggactggatttggcgcatccttttccttgtcggcgctgctaccggcgcgcattcc

SEQ ID NO: 35 - DNA, 60 bp, Artificial Sequence
  Synthetic Polynucloetide
atggcctgtcctggcttcctgtgggctcttgtgatctccacctgtcttgagttcagcatg

SEQ ID NO: 36 - DNA, 57 bp, Artificial Sequence
  Synthetic Polynucloetide
atgaccatccggctgctgtgctatatgggcttctacttcctcggagccggcctgatg

SEQ ID NO: 37 - DNA, 45 bp, Artificial Sequence
  Synthetic Polynucloetide
ggcggaggcggaagtggaggcggaggatctggcggcggaggctct

SEQ ID NO: 38 - DNA, 45 bp, Artificial Sequence
  Synthetic Polynucloetide
ggaggcggaggaagtggcggcggaggatctgggggaggcggaagc

SEQ ID NO: 39 - DNA, 45 bp, Artificial Sequence
  Synthetic Polynucloetide
ggtggcggtggctcgggcggtggtgggtcgggtggcggcggatct

SEQ ID NO: 40 - DNA, 45 bp, Artificial Sequence
  Synthetic Polynucloetide
ggcggcggaggatctggcggaggcggatctgggggcggaggctct

SEQ ID NO: 41 - DNA, 45 bp, Artificial Sequence
  Synthetic Polynucloetide
ggcggtggcggttcaggtggagggggaagcggtggtggtggctca

SEQ ID NO: 42 - DNA, 45 bp, Artificial Sequence
  Synthetic Polynucloetide
ggcggcggaggctcaggcggaggcggatctggcgggggaggatct

SEQ ID NO: 43 - DNA, 105 bp, Artificial Sequence
  Synthetic Polynucloetide
ggaggtagcggctccgggggaggcggaagtggaggcggaggatctgggtctggaggaagcggatctggaggctcagggtcagggggctcaggcagtggaggctct

SEQ ID NO: 44 - DNA, 105 bp, Artificial Sequence
  Synthetic Polynucloetide
ggaggaggcggctccgggggaggcggaagtggaggcggaggatctgggtctggaggaagcggatctggaggctcagggtcagggggctcaggcagtggaggctct

SEQ ID NO: 45 - DNA, 75 bp, Artificial Sequence
  Synthetic Polynucloetide
agcagcgccgacgacgccaagaaggacgccgccaaaaaggatgatgccaagaaagacgatgctaaaaaagacggc

SEQ ID NO: 46 - DNA, 333 bp, Artificial Sequence
  Synthetic Polynucloetide
gacgtgcagatgatccagacccccgatagcctggccgtgtccctgggacagagagccaccatctcttgcagagccagcgagagcgtggacaactacggcatcagcttcatgcactggtatcagcagaagcccggccagagccccaagctgctgatctacagagcctccaacctggaaagcggcatccccgccagattttccggcagcggcagcagaaccgacttcaccctgaccatcaaccccgtggaaaccgacgacgtggcaacctactactgccagcagaacaacaaggacccccccacctttggcggaggcaccaagctggaaatcaag

SEQ ID NO: 47 - DNA, 321 bp, Artificial Sequence
  Synthetic Polynucloetide
gacgtgcagatgatccagacccccagcagcctgtctgccagcctgggcgatagagtgaccatcagctgtcgggccagccaggacatcggcaactacctgaactggtatcagcagaaacccgacggcaccgtgaagctgctgatctactacaccagcagactgcacagcggcgtgcccagcagattttctggcagcggctctggcaccgagtacagcctgaccatctccaacctggaacaggaagatattgctacctacttctgtcagcaaggcagcgccctgccccctacatttggcggcggaacaaagctggaaatcaac

SEQ ID NO: 48 - DNA, 336 bp, Artificial Sequence
  Synthetic Polynucloetide
gacatcgtgctgacacagagccctgccaccctgtctctgagccctggcgatagagccaccatcagctgtagagccagcgagagcgtgaccatcctgggcagccacctgatctactggtatcagcagaagcccggccagccccccagactgctgattcagctggcctccaatgtgcagaccggcgtgccagccagattttccggcagcggcagcagaaccgacttcaccctgaccatcagcagcgtggaacccgaggacttcgccgtgtactactgcctccagagccggaccatccccagaacattcggccagggcaccaagctggaaatcaagaga

SEQ ID NO: 49 - DNA, 324 bp, Artificial Sequence
  Synthetic Polynucloetide
gacatccagatgacccagagccctagctcactgagcgccagcgtgggcgacagggtgaccattacctgctccgccagccaggacatcagcaactacctgaactggtaccagcagaagcccggcaaggcccccaagctgctgatctactacacctccaacctgcactccggcgtgcccagcaggttcagcggaagcggcagcggcaccgatttcaccctgaccatctccagcctgcagcccgaggacttcgccacctactactgccagcagtacaggaagctcccctggactttcggccagggcaccaaactggagatcaagcgt

SEQ ID NO: 50 - DNA, 342 bp, Artificial Sequence
  Synthetic Polynucloetide
gacatcgtgatgacccagagccccgatagcctggccgtgtctctgggagagagagccaccatcaactgcgagagcagccagagcctgctgaacagcggcaaccagaagaactacctgacctggtatcagcagaagcccggccagccccccaagcccctgatctattgggccagcaccagagaaagcggcgtgcccgatagattcagcggcagcggaagcggcaccgacttcaccctgaccatcagttctcttcaggccgaggacgtggccgtgtactactgccagaacgactacagctacccctacaccttcggccagggcaccaagctggaaatcaagaga

SEQ ID NO: 51 - DNA, 321 bp, Artificial Sequence
  Synthetic Polynucloetide
gacatccagatgacccagtctaccagttccctgagtgcatccctcggagacagggtgacgatcagttgcagcgcaagccaagggatcaataactatctgaactggtatcagcagaaaccggacggaacagtcgaactcctgatttattacaccagcacccttcagagtggcgtcccttcccggttcagtggctccggaagcgggaccgattactccctgaccatttctaatctggagccagaggacataggaacgtattattgccagcagtatagtaaactgccacgaacttttggaggggggacgaaactggagatcaaa

SEQ ID NO: 52 - DNA, 318 bp, Artificial Sequence
  Synthetic Polynucloetide
gacatccagatgacccagagccctgccagcctgtccgtgtctgtgggcgagacagtgaccatcacctgtcgggccagcgagaacatctacagcaacctggcctggtatcagcagaagcagggcaagagcccccaactgctggtgtacgccgccaccaatctggccgatggcgtgcccagcagattttccggctctggcagcggcacccagtacagcctgaagatcaacagcctccagagcgaggacttcggcagctactactgccagcacttctggggcacctggacctttggaggaggcaccaccctggaaatcaag

SEQ ID NO: 53 - DNA, 321 bp, Artificial Sequence
  Synthetic Polynucloetide
gagatcgtgctgacacagagccccgccaccctgtcactgtctccaggcgaaagagccaccctgagctgtagcgccagcagcagcgtgtcctacatgcactggtatcagcagaagcccggccaggcccccagactgctgatctacgataccagcaagctggcctccggcatccccgccagattttctggcagcggctccggcaccgacttcaccctgacaatcagcagcctggaacccgaggacgtggccgtgtactactgttttcaaggcagcgtgtaccccttcaccttcggccagggcaccaagctggaaatcaagaga

SEQ ID NO: 54 - DNA, 321 bp, Artificial Sequence
  Synthetic Polynucloetide
gacatccagatgacacagactacatcctccctgtctgcctctctgggagacagagtcaccatcagttgcagggcaagtcaggacattagtaaatatttaaattggtatcagcagaaaccagatggaactgttaaactcctgatctaccatacatcaagattacactcaggagtcccatcaaggttcagtggcagtgggtctggaacagattattctctcaccattagcaacctggagcaagaagatattgccacttacttttgccaacagggtaatacgcttccgtacacgttcggaggggggaccaagctggagatcaca

SEQ ID NO: 55 - DNA, 321 bp, Artificial Sequence
  Synthetic Polynucloetide
gagatcgtgatgacccagagccctgccaccctgtctctgagccctggcgaaagagccaccctgagctgtagagccagccaggacatcagcaagtacctgaactggtatcagcagaagcccggccaggcccccagactgctgatctaccacaccagcagactgcacagcggcatccccgccagattttctggctctggcagcggcaccgactacaccctgacaatcagcagcctccagcccgaggacttcgccgtgtacttctgtcagcaaggcaacaccctgccctacaccttcggccagggcaccaagctggaaatcaag

SEQ ID NO: 56 - DNA, 321 bp, Artificial Sequence
  Synthetic Polynucloetide
gagatcgtgctgacacagagccctgccaccctgtctctgagccctggcgaaagagccaccctgagctgtagagccagccagagcgtgtccagctacctggcctggtatcagcagaagcccggccaggctccccggctgctgatctacgatgccagcaatagagccaccggcatccccgccagattttccggctctggcagcggcaccgacttcaccctgaccatcagctccctggaacccgaggacttcgccgtgtactactgccagcagcggagcaactggcccatcacattcggccagggcacccggctggaaatcaaa

SEQ ID NO: 57 - DNA, 339 bp, Artificial Sequence
  Synthetic Polynucloetide
gacatcgtgatgacccagacccccctgagcctgcctgtgacacctggcgagcctgccagcatctcctgcagaagcagcaagagcctgctgcacagcaacggcatcacctacctgtactggtatctgcagaaacccggccagagcccccaactgctgatctaccagatgagcaacctggtgtccggcgtgcccgacagattttctggcagcggctccggcaccgacttcaccctgaagatcagccgggtggaagccgaggacgtgggcgtgtactactgcgcccagaacctggaactgccctacacctttggcggcggaacaaaggtggaaatcaagcgg

SEQ ID NO: 58 - DNA, 339 bp, Artificial Sequence
  Synthetic Polynucloetide
gacatccagatgacccagagccccagcagcctgtctgccagcgtgggcgacagagtgaccatcacctgtcggagcagccagagcatcgtgcactccgtgggcaacaccttcctggaatggtatcagcagaagcccggcaaggcccccaagctgctgatctacaaggtgtccaacagattcagcggcgtgcccagcaggtttagcggctctggcagcggcaccgacttcaccctgaccatctctagcctccagcccgaggacttcgccacctactactgttttcaaggcagccagttcccctacaccttcggccagggaacaaaggtggaaatcaagcgg

SEQ ID NO: 59 - DNA, 330 bp, Artificial Sequence
  Synthetic Polynucloetide
gagatcgtgctgacacagagccctggcaccctgagcctgtctccaggcgaaagagccacactgagctgtcgggcctctcagagcgtgggaggctacctggcttggtatcagcagaagccaggccaggcccccagactgctgatctacgacgccagcaatcgggccacaggcatccccgccagattttctggcagcggctccggcaccgacttcaccctgacaatcagcagcctggaacccgaggacttcgccgtgtactactgccagcagcggaacaactggccccccatgtacacattcggccagggcaccaagctggaaatcaagaga

SEQ ID NO: 60 - DNA, 336 bp, Artificial Sequence
  Synthetic Polynucloetide
gacatccagatgacccagagccccgccaccatcgagaacacaagcctgtctgccagcgtgggcgacagagtgaccatcacctgtagagccagccagggcatcagctcttggctgacctggtatcagcagaagcccgagaaggcccccaagagcctgatctacgccgccagctctctgcagtctggcgtgcccagcagattttccggcagcggctctggcaccgacttcaccctgacaatcagcagcctgcagcccgaggacttcgccacctactactgccagcagtacgacagctaccccatcaccttcggccagggcacccggctggaaatcaag

SEQ ID NO: 61 - DNA, 336 bp, Artificial Sequence
  Synthetic Polynucloetide
gacgagatcgtgctgacccagagccctgatagcctggccgtgtctctgggcgagagagccaccatcaactgcaaggccagccagagcgtggacttcgacggcgacagctacctgaactggtatcagcagaagcccggccagccccccaaggtgctgatctatgccgccagcacactgcagagcggcgtgcccagcagattttctggcagcggctccggcaccgacttcaccctgaccatcaacagcctggaagccgaggacgccgccacctactactgccagcagagcaacgaggacccctggacctttggcggcggaacaaaggtggaaatcaag

SEQ ID NO: 62 - DNA, 321 bp, Artificial Sequence
  Synthetic Polynucloetide
gacatccagatgacccagagccccagcagcctgtctgccagcgtgggcgacagagtgaccatcacctgtagagccagccagggcatcagctcttggctggcctggtatcagcagaagcccgagaaggcccccaagagcctgatctacgccgcctctagtctccagagcggcgtgcccagcagattttctggcagcggctccggcaccgacttcaccctgacaatcagctccctccagcccgaggacttcgccacctactactgccagcagtacaacagctaccctcccacctttggcggaggcaccaaggtggaaatcaag

SEQ ID NO: 63 - DNA, 336 bp, Artificial Sequence
  Synthetic Polynucloetide
gacgtcgtgatgacccagagccctctgagcctgcctgtgacactgggacagcctgccagcatctcctgtcggagcagccagagcatcgtgcacagcgacggcaacacctacctggaatggtatcagcagcggccaggccagagccccagacggctgatctacaaggtgtccaacagattcagcggcgtgcccgacagattctccggcagcggctctggcaccgacttcaccctgaagatcagcagagtggaagccgaggacgtgggcgtgtactactgttttcaaggcagccacgccccctggacctttggcggaggaacaaaggtggaaatcaag

SEQ ID NO: 64 - DNA, 318 bp, Artificial Sequence
  Synthetic Polynucloetide
cagatcgtgctgacacagagccctgccctgatgagcgccagccctggcgagaaagtgaccatgacctgtagcgccagcagcagcgtgcgctacatgtactggtatcagcagaagcccagaagcagccccaagccctggattcacctgaccagcaatctggcctctggcgtgcccgctagattttccggctctggcagcggcaccagctacagcctgaccatcagcagcatggaagccgaggacgccgccacctactactgccagcagtggtccagccaccccttcacatttggctccggcaccaagctggaaatcaag

SEQ ID NO: 65 - DNA, 339 bp, Artificial Sequence
  Synthetic Polynucloetide
gagatcgtgctgacacagagccctggaagcctggccgtgtctcctggcgagcgcgtgacaatgagctgcaagagcagccagagcgtgttcttcagcagctcccagaagaactacctggcctggtatcagcagatccccggccagagccccagactgctgatctactgggccagcaccagagaaagcggcgtgcccgatagattcaccggcagcggctctggcaccgacttcaccctgacaatcagcagcgtgcagcccgaggacctggctatctactactgccaccagtacctgagcagccggaccttcggccagggcaccaagctggaaatcaagaga

SEQ ID NO: 66 - DNA, 342 bp, Artificial Sequence
  Synthetic Polynucloetide
gacgacatcgtgatgacacagtcaccagatagcctcaccgtctccctgggggagcggaccaccattaattgtaaatccagccaaagcgtgctggactcaagcaagaacaagaatagcctcgcctggtatcagcagaagcccggtcagcctccaaagctgctgctttcttgggcctccaccagagagtccgggattcctgataggtttagtggttcaggctccggcacagattttactctgaccattgattctctccagccagaggattctgcaacttattactgccagcaaagcgcccactttcctataacttttggccagggaacccgacttgaaatcaag

SEQ ID NO: 67 - DNA, 339 bp, Artificial Sequence
  Synthetic Polynucloetide
gatgtgctgctgacccagagccctctgagcctgcctgtgacactgggacagcctgccagcatctcctgtcggagcagccagaccatcgtgcacagcaacggcaacacctacctggaatggttccagcagcggccaggccagagccccagactgctgatctaccaggtgtccaacagattcagcggcgtgcccgacagattctccggcagcggctctggcaccgacttcaccctgaagatcagccgggtggaagccgaggacgtgggcgtgtactactgttttcaaggcagccacgtgccccggacctttggcggaggaacaaaggtggaaatcaagaga

SEQ ID NO: 68 - DNA, 324 bp, Artificial Sequence
  Synthetic Polynucloetide
cacatcgtgctgacccagagccctagcagcctgtctgccagcctgggcgacagagtgaccatcagctgtagagccagccaggacatcagcacctacctgaactggtatcagcagaaacccgacggcaccgtgaagctgctgatcttctacaccagcagactgcacgccggggtgcccagcagattttctggcagcggctctggcacccaccacagcctgaccatctccaacctggaacaggaagatattgctacctacttctgtcagcaaggcaacagcctgcccttcaccttcggcagcggcaccaagctggaaatcaagaga

SEQ ID NO: 69 - DNA, 327 bp, Artificial Sequence
  Synthetic Polynucloetide
gaccacatcgtgctgacccagagccctagcagcctgtctgccagcctgggcgacagagtgaccatcagctgtagagccagccaggacatcagcacctacctgaactggtatcagcagaaacccgacggcaccgtgaagctgctgatcttctacaccagcagactgcacgccggggtgcccagcagattttctggcagcggctctggcacccaccacagcctgaccatctccaacctggaacaggaagatattgctacctacttctgtcagcaaggcaacagcctgcccttcaccttcggcagcggcaccaagctggaaatcaagaga

SEQ ID NO: 70 - DNA, 336 bp, Artificial Sequence
  Synthetic Polynucloetide
gacatcgtgatgacccagagccccgatagcctggccgtgtctctgggagagagagccaccatcaactgccgggccagcaagagcgtgtccaccagcggctacagcttcatgcactggtatcagcagaagcccggccagccccccaagctgctgatctacctggcctccaacctggaaagcggcgtgcccgatagattcagcggcagcggctctggcaccgacttcaccctgaccatcagttctcttcaggccgaggacgtggccgtgtactactgccagcacagcagagaggtgccctggacattcggccagggcacaaaggtggaaatcaagcgg

SEQ ID NO: 71 - DNA, 339 bp, Artificial Sequence
  Synthetic Polynucloetide
gacatcgtgatgacccagacccccctgaccctgagcgtgacaatcggacagcctgccagcatctcctgcaagagcagccagagcctgctggacagcgacggcaagacctacctgaactggctgctgcagaggccaggccagagccccgagagactgatctacctggtgtccaagctggactccggcgtgcccgatagattcacaggcagcggctccggcaccgacttcaccctgaagatcagccgggtggaagccgaggacctgggcgtgtactgttgttggcagggcacccacttcccttacaccttcggcggagggaccaaggtggaaatcaagggc

SEQ ID NO: 72 - DNA, 339 bp, Artificial Sequence
  Synthetic Polynucloetide
gacgacatccagttgacccagtcccccagctcactcagcgccagtgtgggggaccgggtgaccattacctgtaaagccagtcagagtgtggactatgagggggatagcttcctgaattggtatcagcagaagcctggcaaagccccaaagctgctgatctacgctgcatctaatctggagtcaggcgtgccttctaggttctccggtagtgggtctgggaccgatttcacattgaccatttcatccctccaacccgaggatttcgctacatattactgtcagcagtccaatgaggaccctctcacctttggccagggcaccaaagttgaaattaagaga

SEQ ID NO: 73 - DNA, 342 bp, Artificial Sequence
  Synthetic Polynucloetide
gacatcgtgatgagccagagccctagcagcctggccgtgtccgtgggcgagaaagtgaccatgagctgcaagagcagccagtccctgctgcacagcagcaaccagaagaactacctggcctggtatcagcagaagcccggccagtcccccaaggtgctgatctactgggccagcaccagagaaagcggcgtgcccgatagattcaccggcagcggctctggcaccgacttcaccctgaccatcaccagcgtgaagtccgaggacctggctgtgtactactgccagcagtattacagctacccctggaccttcggcggaggcacccggctggaaatcaaaaga

SEQ ID NO: 74 - DNA, 327 bp, Artificial Sequence
  Synthetic Polynucloetide
gagatcgtgctgacacagagccctggcaccctgagcctgtctccaggcgaaagagccacactgagctgtcgggccagccagagcgtgtccagctcttacctggcctggtatcagcagaagcccggccaggctccccggctgctgatctacggaacaagcagcagagccaccggcatccccgacagattttctggcagcggctccggcaccgacttcaccctgacaatcagcagactggaacccgaggacttcgccgtgtactactgccagcagtacggcagcagccccttcacctttggcggaggcaccaaggtggaaatcaagaga

SEQ ID NO: 75 - DNA, 324 bp, Artificial Sequence
  Synthetic Polynucloetide
gacatccagatgacccagagccccagcagcctgtctgccagcgtgggcgacagagtgaccatcacctgtagagccagccagagcatcagcctgtggctgaactggtatcagcagaagcccggcaaggcccccaagctgctgatctacgccgccagcacactccagagcggcgtgccaagcagattttccggcagcggctccggcaccgacttcaccctgacaatcagctccctccagcccgaggacttcgccacctactactgccagcagtactacaccagcccctacaccttcggccagggcaccaaggtggaaatcaagaga

SEQ ID NO: 76 - DNA, 327 bp, Artificial Sequence
  Synthetic Polynucloetide
gacatccagatgacccagagccccagcagcctgtctgccagcgtgggcgacagagtgaccatcacctgtagagccagccagagcatcagcagctacctgaactggtatcagcagaagcccggcaaggcccccaaactgctgatctacgccgtgtccacactccagagcggcgtgcccagcagattttctggcagcggctccggcaccgacttcaccctgacaatcagctccctccagcccgaggacttcgccacctactactgtcagcagagcggcaccttccctcccaccacatttggacagggcaccaaggtggaaatcaagaga

SEQ ID NO: 77 - DNA, 318 bp, Artificial Sequence
  Synthetic Polynucloetide
cagagcccatctagcctggctgtgtctgccggcgagaaagtgaccatgagctgcaagagcagccagagcctgctgaacagccggacccggaagaactacctggcctggtatcagcagaagcccggccagagccccaagctgctgatctactgggccagcaccagagaaagcggcgtgcccgatagattcaccggctctggcagcggcaccgacttcaccctgacaatcagcagcgtgcaggccgaggacctggccgtgtactactgcaagcagagcaacctgtacaccttcggcggaggcaccaagctggaaatcaag

SEQ ID NO: 78 - DNA, 312 bp, Artificial Sequence
  Synthetic Polynucloetide
atgacccagagccccaagttcctgctggtgtctgccggcgacagagtgaccctgacatgcaaggccagccagagcgtgaacaacgacgtgtactggtatcagcaggaacccggccagtcccccaagctgctgatctactgggccagcaccagagaaagcggcgtgcccgatagattcaccggcagcggctctggcaccgacttcaccctgacaatcagcagcgtgcaggccgaggacctggccgtgtactactgcaagcagagctacaacctgtacaccttcggcggaggcaccaagctggaaatcaagaga

SEQ ID NO: 79 - DNA, 321 bp, Artificial Sequence
  Synthetic Polynucloetide
gacatccagatgacccagagccccagcagcctgtctgcctctctgggcgagagagtgtccctgacctgtcgggccacacaggaactgagcggctacctgtcttggctgcagcagaagcccgacggcaccatcaagcggctgatctacgccgccagcaccctggatagcggcgtgcccaagagattcagcggcaacagaagcggcagcgactacagcctgaccatcagctccctggaaagcgaggacttcgccgactactactgcctgcagtacgccatctacccctacaccttcggcggaggcaccaagctggaaatcaag

SEQ ID NO: 80 - DNA, 336 bp, Artificial Sequence
  Synthetic Polynucloetide
gacaccatcgtgctgacacagagccctgcttccctggccgtgtccctgggacagagagccaccatctcttgcagagccagcgagagcgtggacagctacggcaacagcttcatgcactggtatcagcagaagcccggccagccccccaagctgctgatctacctggcctccaacctggaaagcggcgtgcccgccagattttctggcagcggcagcagaaccgacttcaccctgaccatcgaccccgtggaagccgatgatgccgccacctactactgccagcagaacaactacgacccctggaccttcggcggaggcaccaagctggaaatcaag

SEQ ID NO: 81 - DNA, 324 bp, Artificial Sequence
  Synthetic Polynucloetide
gacatccagatgacccagagccccagcagcctgtctgccagcgtgggcgacagagtgaccatcacatgcaaggccagccaggacgtgggaatcgccgtggcctggtatcagcagaaacccggcaaggtgcccaagctgctgatctactgggccagcaccagacacaccggcgtgcccgatagattttccggcagcggctccggcaccgacttcaccctgacaatcagctccctccagcccgaggacgtggcaacctactactgccagcagtacagcagctacccctacaccttcggccagggcaccaaggtggaaatcaagaga

SEQ ID NO: 82 - DNA, 321 bp, Artificial Sequence
  Synthetic Polynucloetide
gacatcgtgatgacccagagccagaagagcatgagcaccagcgtgggcgacagagtgagcatcacctgcaaggccagccaggacgtgatcaccggcgtggcctggtaccagcagaagcccggccagagccccaagctgctgatctacagcgccagctacagatacaccggcgtgcccgacagattcaccggcagcggcagcggcaccgacttcaccttcaccatcagcaacgtgcaggccgaggacctggccgtgtactactgccagcagcactacagcacccccctgaccttcggcgccggcaccaagctggagctgaag

SEQ ID NO: 83 - DNA, 339 bp, Artificial Sequence
  Synthetic Polynucloetide
cagagcgtgctgacacagcctccatccgtgtctggcgctccaggccagagagtgaccatctcctgtaccggcagcggcagcaacatcggagccccctacgacgtgtcctggtatcagcaactgcctggcaccgcccccaagctgctgatctaccacaacaacaagcggcccagcggcgtgcccgatagattcagcggctctaagagcggcaccagcgccagcctggctatcactggactccaggccgaggacgaggccgactactactgccagagctacgacagcagcagcatcagcaccatcttcggcggaggcaccaagctgacagtgctgggagct

SEQ ID NO: 84 - DNA, 339 bp, Artificial Sequence
  Synthetic Polynucloetide
cagagcgtgctgacacagcctccatccgtgtctggcgctccaggccagagagtgaccatctcctgtaccggcagcggcagcaacatcggagccccctacgacgtgtcctggtatcagcaactgcctggcaccgcccccaagctgctgatctaccacaacaacaagcggcccagcggcgtgcccgatagattcagcggctctaagagcggcaccagcgccagcctggctatcactggactccaggccgaggacgaggccgactactactgtgccacagtggaagccggcctgagcggctctgtgtttggcggcggaacaaagctgaccgtgctgggagct

SEQ ID NO: 85 - DNA, 321 bp, Artificial Sequence
  Synthetic Polynucloetide
gacatccagatgacccagagccccagcagcctgtctgccagcgtgggcgacagagtgaccatcacctgtagcgccagcagcagcgtgtcctacatgtactggtatcagcagaagcccggcaaggcccccaagctgctgatctacctgaccagcaatctggcctccggcgtgcccagcagattttctggcagcggctccggcaccgacttcaccctgacaatcagctccctccagcccgaggacttcgccacctactactgtcagcagtggcggagcaaccccttcaccttcggccagggcaccaagctggaaatcaagaga

SEQ ID NO: 86 - DNA, 324 bp, Artificial Sequence
  Synthetic Polynucloetide
gagatcgtgatgacccagagccctgccaccctgtccgtgtctccaggcgaaagagccaccctgagctgcaaggcttcccagagcgtgtccaacgacgtcgtgtggtatcagcagaagcccggccaggcccccagactgctgatctactacgccagcaacagatacaccggcatccccgccagattcagcggctctggcagcggcaccgagttcaccctgacaatcagcagcctccagagcgaggacttcgccgtgtactactgtcagcaggactacaccagcccctggaccttcggccagggcaccaagctggaaatcaagaga

SEQ ID NO: 87 - DNA, 321 bp, Artificial Sequence
  Synthetic Polynucloetide
gacatcctgctgacccagagccccgtgatcctgtccgtgtctcctggcgagagagtgtccttcagctgtcgggccagccagagcatcggcaccaacatccactggtatcagcagcggaccaacggcagccccagactgctgattaagtacgccagcgagtccatcagcggcatccccagcagattttccggcagcggctccggcaccgacttcaccctgagcatcaacagcgtggaaagcgaggacattgccgactactactgccagcagaacaacaactggcccaccaccttcggagccggcaccaagctggaactgaag

SEQ ID NO: 88 - DNA, 336 bp, Artificial Sequence
  Synthetic Polynucloetide
gatgtcgtgatgacccagagccccgacagcctggctgtgtctctgggagagagagccaccatcaactgcaagtccagccagtccctgctggacagcgacggcaagacctacctgaactggctccagcagaagcccggccagccccccaagagactgatctccctggtgtccaagctggactccggcgtgcccgatagattttccggctctggcagcggcaccgacttcaccctgacaatcagctcccttcaggccgaggacgtggccgtgtactattgctggcagggcacacacttccccggcacctttggcggaggcaccaaggtggaaatcaag

SEQ ID NO: 89 - DNA, 321 bp, Artificial Sequence
  Synthetic Polynucloetide
gagctgcagatgacccagagccctagcagcctgtctgccagcgtgggcgacagagtgaccatcacctgtagagccagccagagcatcagcagctacctgaactggtatcagcagaagcccggccagccccccaaactgctgatctactgggccagcaccagagaaagcggcgtgcccgatagattcagcggcagcgagagcggcaccaactacaccctgaccatcagctccctgcagcccgaggacttcgccacctacttttgccagcagagcgacagcctgcccatcacctttggacagggcacccggctggacattcag

SEQ ID NO: 90 - DNA, 339 bp, Artificial Sequence
  Synthetic Polynucloetide
gagcttgtgatgacccagagccccagcagcctgacagtgacagccggcgagaaagtgaccatgagctgcaagagcagccagagcctgctgaacagcggcaaccagaagaactacctgacctggtatcagcagaagcccggccagccccccaagctgctgatctactgggccagcaccagagaaagcggcgtgcccgatagattcaccggctctggcagcggcaccgacttcaccctgacaatcagcagcgtgcaggccgaggacctggccgtgtactactgccagaacgactacagctaccccctgaccttcggagccggcaccaagctggaaatcaag

SEQ ID NO: 91 - DNA, 321 bp, Artificial Sequence
  Synthetic Polynucloetide
gacatccaaatgacacagagtccttctagtttgagtgcgagcgtgggggacagggtgaccattacctgcagggccagccagagcataagctcataccttaattggtaccagcaaaaaccaggtaaggcccctaagctcctgatctacgcggcctcttcacttcaatctggggtcccttcccgcttcagtggctccggcagcggcaccgacttcacgctcactatatcaagtctgcagcctgaggatctcgccacctattactgtcaacaaagttattccacccctttcacctttggaccgggcacgaaagtggatattaag

SEQ ID NO: 92 - DNA, 309 bp, Artificial Sequence
  Synthetic Polynucloetide
tacatccacgtgacacagagccctagcagcctgtccgtgtccatcggcgatagagtgaccatcaactgccagacctctcaaggcgtgggcagcgacctgcactggtatcagcacaaacctggcagagcccctaagctgctgatccaccatgccagctctgtggaagatggcgtgcccagcagattttccggcaccggatttcacaccagcttcaacctgacaatcaacgacctccaggccgacgacatcggcacctactactgtcaagtgctccagagcttcggcagaggcagcagactggatacaaaa

SEQ ID NO: 93 - DNA, 336 bp, Artificial Sequence
  Synthetic Polynucloetide
gacatcgtgctgacccagagccctctgagcctggccgtgtctctgggacagcctgccatcatcagctgcaaggccagccagagcgtgtcctttgccggcacctctctgatgcactggtatcaccagaagcccggccagcagcccagactgctgatctacagagccagcaacctggaagccggcgtgcccgatagattttccggcagcggcagcaagaccgacttcaccctgaccatcagccccgtggaagccgaagatgccgccacctactactgccagcagagcagagagtacccctacaccttcggcggaggcaccaagctggaaatcaagagg

SEQ ID NO: 94 - DNA, 339 bp, Artificial Sequence
  Synthetic Polynucloetide
gacgttgtgatgacccagacccccctgagcctgcctgtgacacctggcgaacctgccagcatcagctgtcggagcagccagagcctggtgcacagaaacggcaacacctacctgcactggtatctccagaagcccggccagagccccaagctgctgatccacaaggtgtccaacagattcagcggcgtgcccgacagattctccggcagcggctctggcaccgacttcaccctgaagatcagccgggtggaagccgaggacctgggcgtgtacttctgtagccagagcacccatgtgccccccctgacatttggagccggcaccaagctggaactgaag

SEQ ID NO: 95 - DNA, 315 bp, Artificial Sequence
  Synthetic Polynucloetide
gagatcgtgatgacccagacccctgccaccctgtctgtgtctgccggcgagagagtgaccattacctgcaaggccagccagagcgtgtccaacgacgtgacctggtatcagcagaagcccggccaggcccccagactgctgatctacagcgccagcaacagatacagcggcgtgcccgccagattttccggcagcggctacggcaccgagttcaccttcaccatcagcagcgtgcagagcgaggacttcgccgtgtacttctgtcagcaagactacagcagcttcggccagggcaccaagctggaaatcaagagg

SEQ ID NO: 96 - DNA, 324 bp, Artificial Sequence
  Synthetic Polynucloetide
gacatccagatgacccagaccgccagcagcctgcctgcctctctgggcgacagagtgaccatctcctgtagcgccagccaggacatcagcaactacctgaactggtatcagcagaaacccgacggcaccgtgaagctgctgatcttctacagcagcaacctgcacagcggcgtgcccagcagattttctggcggcggaagcggcaccgactacagcctgaccatcagcaatctggaacccgaggacattgccacctacttttgccaccagtacagcaagctgccctggacctttggcggaggcaccaagctggaaatcaagaga

SEQ ID NO: 97 - DNA, 333 bp, Artificial Sequence
  Synthetic Polynucloetide
cagttcgtgctgacccagagcccttctgcctctgctgccctgggagcctctgccaagctgacctgtacactgagcagcgcccacaagacctacaccatcgactggtatcagcagcagaagggaaaggcccccagatacctgatccaagtgaagtccgacggcacctacacaaaggccaccggcgtgcccgatagattcagcggcagtagcagcggagccgatagatacctgattatccccagcgtgcaggccgacgacgaggccgattactactgcggcaccgattacaccggcggctacgtgttcggcggaggcacacaactgaccgtgaca

SEQ ID NO: 98 - DNA, 321 bp, Artificial Sequence
  Synthetic Polynucloetide
gacatccagatgacccagagccccagcagcctgtctgccagcgtgggcgacagagtgaccatcacctgtagagccagccagggcatcagctcttggctggcctggtatcagcagaagcccgagaaggcccccaagagcctgatctacgccgcctctagtctccagagcggcgtgcccagcagattttctggcagcggctccggcaccgacttcaccctgacaatcagctccctccagcccgaggacttcgccacctactactgccagcagtacaacagctacccccccacctttggcggaggcaccaaggtggaaatcaag

SEQ ID NO: 99 - DNA, 333 bp, Artificial Sequence
  Synthetic Polynucloetide
cagtctgtggtcacacagccacctagcatgtctgccgctccaggccagcaagtgaccatctcttgtagcggcggcaacagcaacatcgagcggaactacgtgtcctggtatctgcaactgcctggcacagcccctaagctggtcatcttcgacaacgacagacggcccagcggcatccccgatagattttctggcagcaagagcggcaccagcgccacactgggaattaccggacttcagacaggcgacgaggccgactactactgtggcacatgggactctagcctgagaggctgggttttcggcggaggcacaaagctgacagtgcttggt

SEQ ID NO: 100 - DNA, 333 bp, Artificial Sequence
  Synthetic Polynucloetide
cagtctgtgctgacacagcctccatctgcctctggcacacctggacagagagtgaccatcagctgtagcggcagcagaagcaacgtcggcggcaactacgtgttctggtatcagcaggtcccaggcgctacccctaagctgctgatctacagaagcaatcagcggcctagcggcgtgcccgatagatttgccggaagcaagagcggcagctctgccagccttgccatctctggactgagaagcgaggacgaggccgactactactgtgccacctgggatgatagcctgagcggcttcgtgtttggcaccggcaccaaagtgacagtgcttggt

SEQ ID NO: 101 - DNA, 321 bp, Artificial Sequence
  Synthetic Polynucloetide
gacatccagatgacccagagccccagcagcctgtctgccagcgtgggcgacagagtgaccatcacctgtagagccagccaggacgtgaacaccgccgtggcctggtatcagcagaagcctggcaaggcccccaagctgctgatctacagcgccagcttcctggaaagcggcgtgcccagcagattcagcggaagcagaagcggcaccgacttcaccctgaccatcagctccctccagcccgaggacttcgccacctactactgccagcagcactacaccacccctcccaccttcggccagaccaaggtggaaatcaagaga

SEQ ID NO: 102 - DNA, 315 bp, Artificial Sequence
  Synthetic Polynucloetide
cagtctgccctgacacagcctcctagcgcctctggctctcccggccagagcatcaccatcagctgtaccggcaccagcaacaacttcgtgtcctggtatcagcagcacgccggcaaggcccccaagctcgtgatctacgacgtgaacaagcggcccagcggcgtgcccgatagattcagcggcagcaagagcggcaacaccgccagcctgacagtgtctggcctccagaccgatgacgaggccgtgtactactgcggcagcctcgtgggcaactgggacgtgatctttggcggaggcaccaagctgaccgtgctg

SEQ ID NO: 103 - DNA, 321 bp, Artificial Sequence
  Synthetic Polynucloetide
gagctggtgctgacacagagccctggcaccctgtctctgtctgccggcgaaagagccaccctgagctgtagagccagccagagcgtgtcctctggcagcctggcttggtatcagcagaagccaggccaggcccccagactgctgatctacggcgcttctaccagagccaccggcatccccgatagattcagcggctctggctccggcaccgacttcaccctgacaatcggcagactggaacccgaggacctggccgtgtactactgccagcagtacggcaccagcccctacacattcggccagggcaccaagctggaaatc

SEQ ID NO: 104 - DNA, 291 bp, Artificial Sequence
  Synthetic Polynucloetide
gacatccagatgacccagagccccagcagcctgtctgccagcgtgggcgacagagtgaccatcacctgtcaggccagccaggacatcaacaactacctgaactggtatcagcagaagcccggcaaggcccccaagctgctgatctacgacgccagcaatctgcagaccggcgtgcccagcagattttccggctctggcagcggcaccgacttcaccttcaccatcgaggacattgccacctactactgccagcagtacaccttcggccctggcaccaaggtggacatcaaa

SEQ ID NO: 105 - DNA, 327 bp, Artificial Sequence
  Synthetic Polynucloetide
gacatccagatgacccagagccccagcagcctgtctgccagcgtgggcgacagagtgaccatcacctgtaccgccagcctgagcgtgtccagcacctacctgcactggtatcagcagaagcccggcagcagccccaagctgtggatctacagcaccagcaacctggcctccggcgtgcccagcagattttctggcagcggctctggcaccagctacaccctgaccatcagctccctccagcccgaggacttcgccacctactactgccaccagtaccacagaagccccctgacctttggcggaggcaccaaggtggaaatcaagaga

SEQ ID NO: 106 - DNA, 321 bp, Artificial Sequence
  Synthetic Polynucloetide
gacatccagatgacccagagccccagcagcctgtctgccagcgtgggcgacagagtgaccatcacatgcaaggccagccaggacgtgggaacagccgtggcctggtatcagcagaagcctggcaaggcccccaagctgctgatctacagcgccagctacagatccaccggcgtgcccagcagattttccggctctggcagcggcaccgacttcaccctgaccatctctagcctccagcccgaggacttcgccacctactactgccagcaccactactccgccccctggacatttggcggaggcaccaaggtggaaatcaag

SEQ ID NO: 107 - DNA, 324 bp, Artificial Sequence
  Synthetic Polynucloetide
gacatccagatgacccagagcttcagcagcctgagcgccagcgtgggcgacagagtgaccatcacctgtagagccagccaggacatcagcaactacctgaactggtatcagcagaagcccggcaaggcccccaagctgctgatctactacaccagcagactgcacagcggcgtgcccagcagattttctggcagcggctccggcaccgactacaccctgacaatcagctccctgcagcccgaggacttcgctacctacttctgtcagcaaggcaacaccctgccctggacctttggcggaggcaccaagctggaaatcaagaga

SEQ ID NO: 108 - DNA, 321 bp, Artificial Sequence
  Synthetic Polynucloetide
gacatccagatgacccagagcccccctagcctgtctgcctctgtgggcggcaaagtgaccatcacatgcaaggccagccaggacatcgaccgctacatggcctggtatcaggacaagcccggcaagggacccaagctgctgatccacgataccagcaccctccagcccggcatccccagcagattttctggcagcggctccggcagagactacagcttcagcatcagcaacctggaacccgaggacattgccacctactactgcctccagtacgacaacctgtggaccttcggcggaggcaccaagctggaaatcaagaga

SEQ ID NO: 109 - DNA, 321 bp, Artificial Sequence
  Synthetic Polynucloetide
gacatccagatgacccagagccctgccagcctgtctgcctctgtgggcgagacagtgaccatcacctgtcgggtgtccggcaacatccacaactacctggcctggtatcagcagaagcagggcaagagcccccaactgctggtgtacaacgccaagaccctggccgatggcgtgcccagcagattttctggctctggcagcggcacccagtacagcctgaagatcaacagcctccagcccgaggacttcggcagctactactgccagcacttctggtccaacccctacaccttcggcggaggcaccaagctggaaatcaag

SEQ ID NO: 110 - DNA, 321 bp, Artificial Sequence
  Synthetic Polynucloetide
gacatccagatgacacagtctccggcgtcactgtccgcctccgtgggggagactgtgactattatttgtagggcatcagttaacatctactcttatttggcctggtaccagcagaagcaaggcaagagtcctcagctgctggtgtataatgcgaagatcctggcagagggcgtgccgagccggttctccggcagcggctcaggtacccaattttccctcaagatcaattcactgcagccagaggactttggcagttactattgtcaacaccactacggcacattcactttcgggtccggtacaaaattggagattaagcga

SEQ ID NO: 111 - DNA, 321 bp, Artificial Sequence
  Synthetic Polynucloetide
gacattgtgatgacccagtctcacaaattcatgtccacatcagtaggagacagggtcagcgtcacctgcaaggccagtcagaatgtgggtaataatgtagcctggtatcaacagaaaccagggcaatctcctaaagtactgatttactcggcatcctaccggtacagtggagtccctgatcgcttcacaggcagtggatctgggacagatttcactctcaccatcagtaatgtgcagtctgaagacttggcagagtatttctgtcagcaatataacacctatccattcacgttcggctcggggacaaagttggaaataaaa

SEQ ID NO: 112 - DNA, 324 bp, Artificial Sequence
  Synthetic Polynucloetide
gacatccagatgacccagagcagcagcagcttcagcgtgtccctgggcgacagagtgaccatcacatgcaaggccagcgaggacatctacatccggctggcctggtatcagcagaagcccggcaacgcccccagactgctgattagcgccgccacctctctggaaaccggcatccccagcagattctccggctctggcagcggcgaggactacaccctgacaatcaccagcctccagaccgaggacgtggcaacctactactgccagcagtattggaccaccccctggacctttggcggaggcaccaagctggaaatcaagaga

SEQ ID NO: 113 - DNA, 321 bp, Artificial Sequence
  Synthetic Polynucloetide
gatatccagatgacccagtccagcagcagcttcagcgtgtccctgggcgacagagtgaccatcacctgtatggcctccgaggacatctacatccggctggcctggtatcagcagaagcccggcaacgcccccagactgctgattagcgccgccacctctctggaaaccggcgtgccaagcagattcagcggctctggcagcggcaaggactacaccctgagcatcacctccttgcagaccgaggacgtgggcacctactattgccagcagtattggagcagcccctggacctttggcggaggcacaaagctggaaatcaac

SEQ ID NO: 114 - DNA, 321 bp, Artificial Sequence
  Synthetic Polynucloetide
gacatccagatgacccagagcagcagcagcttcagcgtgagcctgggcgacagagtgaccatcacctgcatggccagcgaggacatctacatcagactggcctggtaccagcagaagcccggcaacgcccccagactgctgatcagcgccgccaccagcctggagaccggcgtgcccagcagattcagcggcagcggcagcggcaaggactacaccctgagcatcaccagcctgcagaccgaggacgtgggcacctactactgccagcagtactggagcagcccctggaccttcggcggcggcaccaagctggagatcaac

SEQ ID NO: 115 - DNA, 318 bp, Artificial Sequence
  Synthetic Polynucloetide
cagatcgtgctgacccagtcccccgctattatgtccgcatcaccgggcgaaaaagtgacgatctcctgtagcgcttcatctagcgtctcctacatgtattggtatcaacagaaacctgggtctagcccaaagccgtggatctacagaaccagtaaccttgccagtggggtgccagcccgcttcagcggtagtggcagtggaacttcctatagcctcacaataagcaacatggaggctgaagatgccgctgcctattactgccagcagtaccacagttacccaaccacgttcggcgggggaactaagctcgaagtaaaa

SEQ ID NO: 116 - DNA, 324 bp, Artificial Sequence
  Synthetic Polynucloetide
gacatccagatgacccagagccccagcagcctgtctgccagcgtgggcgacagagtgaccatcacctgtagagccagccagagcatcagcagctacctgaactggtatcagcagaagcccggcaaggcccccaaactgctgatctacgacgccagcaacctggaaaccggcgtgcccagcagattttccggcagcggctctggcaccgacttcaccttcaccatcagctccctccagcccgaggacattgccacctactactgccagcagtacgacaacctgcccctgacctttggcggaggcaccaaggtggacatcaagaga

SEQ ID NO: 117 - DNA, 339 bp, Artificial Sequence
  Synthetic Polynucloetide
gacgtcgtgatgacccagagccctctgagcctgcctgtgtccctgggcgatcaggccagcatctcctgcagatccagccagagactggtgcacagcaacggcaacacctacctgcactggtatctgcagaagcccggccagagccccaagctgctgatctaccgggtgtccaacagattccccggcgtgcccgatagattcagcggctctggcagcggcaccgacttcaccctgaagatcagccgggtggaagccgaggacctgggcatctatttctgcagccagagcacccacgtgccctacacctttggcggaggcaccaagctggaaatcaagcgg

SEQ ID NO: 118 - DNA, 327 bp, Artificial Sequence
  Synthetic Polynucloetide
agctacgagctgacccagcctcctagcgtgtccgtgtctcctggacagaccgccaccatctcttgcagcggcgatcaactgggcgggaagtacggccactggtatcagaagaagcccggccagagccccgtgctggtgctgtaccaggacagaaaacggcctgccggcatccccgagagattcagcggaagcagcagcggcaacaccatcaccctgaccatcagcggcacccaggccgtggatgaggccgactactactgccaggcttgggacaccaatctgggcggcgtgttcggcggaggcaccaaagtgacagtgctgggacag

SEQ ID NO: 119 - DNA, 339 bp, Artificial Sequence
  Synthetic Polynucloetide
aacttcatgctgacccagccccacagcgtgtccgagagccctggcaagaccgtgaccatctcctgcaccagaagcagcggctctatcgccagcaaatacgtgcagtggtatcagcagaggcccggcagcagccctaccaccgtgatctacgaggacaaccagaggcctagcggcgtgcccgatagattcagcggcagcatcgacaccagcagcaacagcgccagcctgaccatcagcggcctgagaacagaggacgaggccgactactactgccacagctacgacagcaacaaccactccgtgttcggcggaggcaccaaagtgacagtgctgggacag

SEQ ID NO: 120 - DNA, 324 bp, Artificial Sequence
  Synthetic Polynucloetide
gacatccagatgaaccagagccccagcagcctgagcgccagcctgggcgataccatcaccatcacctgtcacgccagccagaacatcaacgtgtggctgagctggtatcagcagaagcccggcaacatccccaagctgctgatctacaaggccagcaacctgcacaccggcgtgcccagcagattttctggcagcggctctggcaccggcttcaccattaccatcagctccctccagcccgaggacattgccacctactactgccagcagggccagagctacccctggacatttggcggaggcaccaagctggaaatcaagaga

SEQ ID NO: 121 - DNA, 324 bp, Artificial Sequence
  Synthetic Polynucloetide
gacatcctgctgacacagagccccgccatcctgtccgtgtctccaggcgagagagtgtcctttagctgccgggccagccagaacatcggcaccagcatccactggtatcagcagcggaccaacggcagccccagactgctgattaagtacgccagcgagtccgtgtccggcatccccagcagattttctggcagcggctccggcaccgacttcaccctgagcatcaacagcgtggaaagcgaggacattgccgactactactgccagcacaccaatagctggcccaccacctttggcggaggcaccaagctggaaatcaagaga

SEQ ID NO: 122 - DNA, 339 bp, Artificial Sequence
  Synthetic Polynucloetide
gacatcgtgatgacccagagccccgatagcctggccgtgtctctgggagagagagccaccatcaactgcaagagcagccagagcctgctgaacagcggcgaccagaagaactacctgacctggtatcagcagaagcccggccagccccccaagctgctgatctactgggccagcaccagagaaagcggcgtgcccgatagattcagcggcagcggaagcggcaccgacttcaccctgaccatcagttctcttcaggccgaggacgtggccgtgtactactgccagaacgactacagctaccccctgaccttcggccagggcaccaaggtggaaatcaag

SEQ ID NO: 123 - DNA, 321 bp, Artificial Sequence
  Synthetic Polynucloetide
gacatccagatgacccagagccccagcagcctgtctgccagcgtgggcgacagagtgaccatcacatgcaaggccagccaggacgtgtccattgccgtggcctggtatcagcagaagcccggcaaggcccccaaggtgctgatctacagcgccagctacagatacaccggcgtgcccgacagattcagcggctctggcagcggcaccgacttcaccttcaccatcagctccctccagcccgaggatattgccgtgtactactgccagcagcactacatcacccccctgacctttggcggaggcaccaaggtggaaatcaag

SEQ ID NO: 124 - DNA, 330 bp, Artificial Sequence
  Synthetic Polynucloetide
caggctgtcgtgacacagcctcctagcgcctctggcacaccaggccagagagtgaccatctcctgtagcggcagcagcagcaacatcggcagcaacaccgtgaactggtatcagcaggtgcccggcaccgctcccaagctgctgatctacagcaacaaccagcggcccagcggcgtgcccgatagattttctggcagcaagagcggcaccagcgccagcctggctatctctggactccagtccgaggacgaggccgactactattgcgccgcctgggacgatagcctgaacggctgggtgttcggcggaggcaccaagctgacagtgctg

SEQ ID NO: 125 - DNA, 321 bp, Artificial Sequence
  Synthetic Polynucloetide
gacatccagatgacccagagccccagcacactgagcgccagcgtgggcgacagagtgaccatcacctgtcgggccagccagaacatcaacaagtggctggcctggtatcagcagaggcccggaaaagccccccagctgctgatctacaaggccagcagcctggaaagcggcgtgcccagcagattttctggcagcggctctggcaccgagtacaccctgaccatcagctccctccagcccgacgacttcgccacctactactgccagcagtacaacagctacgccaccttcggccagggcaccaaggtggaaatcaagaga

SEQ ID NO: 126 - DNA, 327 bp, Artificial Sequence
  Synthetic Polynucloetide
cagagcgtcgtgacacagcctcctagcgtgtcagtggcccctggcaagaccgccagaatcacctgtggccggaacaacatcggcagcaagagcgtgcactggtatcagcagaagcccggccaggctcctgtgctggtggtgtacgacgacagcgacagacccagcggcatccccgagagattcagcggcagcaactccggcaataccgccaccctgaccatcagcagagtggaagccggcgacgaggccgactactactgccaagtgtgggacagcagcagcgatcacgtggtgtttggcggaggcaccaagctgacagtgctgggt

SEQ ID NO: 127 - DNA, 333 bp, Artificial Sequence
  Synthetic Polynucloetide
gacatcgtgctgacacagagccctgcttctctggccgtgtctctgggacagagagccaccatcagctgtagagccagcgagagcgtggacaactacggcaacaccttcatgcactggtatcagcagaagcccggccagcctcctaagctgctgatctacagagccagcaacctggaaagcggcatccccgccagattttctggcagcggcagcagaaccgacttcaccctgaccatcaatcccgtggaagccgacgacgtggcaacctactactgccagcagagcaacgaggaccctcctacatttggagccggcaccaagctggaactgaaa

SEQ ID NO: 128 - DNA, 324 bp, Artificial Sequence
  Synthetic Polynucloetide
gagatcgtgctgacacagagccctggcaccctgagcctgtctccaggcgaaagagccacactgagctgtcgggccagccagagcgtgtccaatacctacctggcctggtatcaccagaggcccggacaggctccccggctgctgatctatggcgcttctagcagagccaccggcatccccgatagattcagcggctctggcagcggcaccgacttcgccctgacaatcagctccctggaacccgaggacttcgccgtgtactactgccagcagtacagcaactcctggaccttcggccagggcaccaaggtggaaatcaagaga

SEQ ID NO: 129 - DNA, 324 bp, Artificial Sequence
  Synthetic Polynucloetide
gagctgacacaggaccctgctgtgtctgttgccctgggccagacagtgcggattacctgtcaaggcgacagcctgagaagcaactacgccaactggtatcagcagaagcccggacaggctcccgtgctggttatctacggccagaacaacagacccagcggcatccccgatagattcagcggctctagctctggcaataccgccagcctgacaatcactggcgctcaggctgccgatgaggccgactactactgcgatagcagagtgtccaccggcaatcacgtggtgtttggcggcggaacaaagctgacagtgctcggacaa

SEQ ID NO: 130 - DNA, 318 bp, Artificial Sequence
  Synthetic Polynucloetide
gacatccagatgacacagagccctagcagcctgtctgccagcgtgggagacagagtgaccatcacctgtagcgccaccagcagcatcagctacatgcactggtatcagcagaagcccggcaaggcccctaaaggctggatctacgataccagcaaactggcccacggcgtgcccagcagattttctggttctggcagcggcaccgacttcaccctgacaatatctagcctccagcctgaggacttcgccacctactactgccaccagagaagaagctaccccttcaccttcggccagggcaccaaggtggaaatcaaa

SEQ ID NO: 131 - DNA, 324 bp, Artificial Sequence
  Synthetic Polynucloetide
gacatccagatgacacagagccctagcagcctgtctgccagcgtgggagacagagtgaccatcacatgcaaggccagccagggcttcaacaaatacgtggcctggtatcagcagaagcccggcaaggctcctaagctgctgatctactacaccagcacactccagcctggcgtgcccagcagattttctggctctggcagcggcagagactacaccctgacaatatccagcctccagccagaggacttcgccacctactactgtctccagtacggcaacctgctgtacgcctttggacagggcaccaaggtggaaatcaagaga

SEQ ID NO: 132 - DNA, 321 bp, Artificial Sequence
  Synthetic Polynucloetide
gacatccagatgacacagagccctagcagcctgtctgccagcgtgggagacagagtgaccatcacctgtagagccagccaggacatccggtactacctgaactggtatcagcagaagcccggcaaggcccctaagctgctgatctatgtggcctccagcctccagagcggagtgccttctagattttctggcagcggctccggcaccgagtttaccctgacagtgtctagcttgcagcccgaggacttcgccacctactactgcctgcaagtgtacagcacccctcggacctttggacagggcaccaaggtggaaatcaaa

SEQ ID NO: 133 - DNA, 321 bp, Artificial Sequence
  Synthetic Polynucloetide
gagatcgtgatgacccctagcagcgccacactgagtgtgtctccaggcgaaagagccacactgtcctgtagagccagccagagcgtgtccagaaacctggcctggtatcagcagaagcctggacaggctccccggctgttgatctacggcgcttctacaagagccaccggcattcccgccagattttctggctctggcagcggcaccgagttcaccctgacaatctctagcctccagagcgaggacttcgccgtgtactactgccaccagtacagcaactggatgtgcagcttcggccagggcaccaagctggaaatcaaa

SEQ ID NO: 134 - DNA, 324 bp, Artificial Sequence
  Synthetic Polynucloetide
gacatccagatgacccagagccccagcagcctgtctgccagcgtgggcgacagagtgaccatcacatgcaaggccagcaagaacatcagaagctacctggcctggtatcagcagaagcccggcaaggcccccaagctgctgatctacagcggcagcacactgcacagcggcgtgcccagcagattttccggctctggcagcggcaccgacttcaccctgaccatctctagcctccagcccgaggacttcgccacctactactgccagcagcaccacgagtaccccctgacattcggccagggcaccaaggtggaaatcaagaga

SEQ ID NO: 135 - DNA, 330 bp, Artificial Sequence
  Synthetic Polynucloetide
cagtctgtggtcacacagcctccatccgtgtctgctgcccctggacagaaagtgaccatctcctgtagcggcagcagcagcaacatcggcaacaactacgtgtcctggtatcagcagctccccggcacagctcccaaactgctgatctacgacaacaacaagcggcccagcggcatccccgatagattttctggcagcaagagcggcaccagcgccacactgggaattaccggacttcagacaggcgacgaggccgactactactgtggcacatgggatggcagcctgtacaccatgcttttcggcggaggcaccaagctgacagtgctt

SEQ ID NO: 136 - DNA, 339 bp, Artificial Sequence
  Synthetic Polynucloetide
cagtctgtgctgacacagcctcctagtgtgtctggcgctcctggacagagagtgaccatctcttgtaccggcagcagcagcaatatcggagccggctatgacgtgcactggtatcagcagctccctggcacagcccctaaactgctgatcttcggcaacagcaacagacccagcggcgtgcccgatagattcagcggctttaagagcggcacaagcgccagcctggctatcactggactgcaagccgaggacgaggccgactacttctgccagagctacgatagcagcctgagcggcagcggagtgtttggcacaggcaccaaagtgacagtgcttggc

SEQ ID NO: 137 - DNA, 342 bp, Artificial Sequence
  Synthetic Polynucloetide
ctgcctgttctgacacagcctccatctgcctctggcacacctggacagagagtgaccatcagctgtagcggcagaagcagcaacatcggcagcaacagcgtgaactggtacagacagcttcctggcgctgcccctaagctgctgatctacagcaacaaccagcggcctcctggcgtgccagtcagattttctggcagcaagagcggcacaagcgccagcctggctatttctggactccagtctgaggacgaggccacctactactgtgccacctgggacgacaacctgaacgtgcactacgtgttcggcaccggcaccaaagtgacagtgcttggaagtaga

SEQ ID NO: 138 - DNA, 333 bp, Artificial Sequence
  Synthetic Polynucloetide
gacatcgtgctgacacagagccctgcttctctggccgtgtctctgggagagagagccaccatcaactgtagagccagcgagagcgtgtccgtgattggagcccacctgatccactggtatcagcagaagcctggacagcctcctaagctgctgatctacctggcctccaacctggaaacaggcgtgccagccagattttctggcagcggctctggcaccgatttcaccctgacaatcagcagcctccaggccgaagatgccgccatctactactgcctccagagccggatcttccccagaacctttggacagggcaccaagctggaaatcaaa

SEQ ID NO: 139 - DNA, 336 bp, Artificial Sequence
  Synthetic Polynucloetide
gacatcgtgctgacacagtctcccgccacactgtcactgagccctggcgatagagccacactgagctgtagagccagcgagagcgtgacaatcctgggcagccacctgatctactggtatcagcagaagcccggacaggcccctagactgctgattcagctcgccagcaatgtgcagacaggcatccctgccagattttccggcagcggcagcagaaccgatttcaccctgaccataagcagcctggaacctgaggacttcgccgtgtactactgcctccagagccggacaatccccagaacctttggacagggcaccaagctggaaatcaagaga

SEQ ID NO: 140 - DNA, 339 bp, Artificial Sequence
  Synthetic Polynucloetide
gacttcgtgatgacacagagccctgatagcctggccgtgtctctcggcgagcgagtgaccatgagctgcaagtctagccagagcctgctgaacagcggcaaccagaagaactacctgacctggtatcagcagaagcccggccagcctcctaagctgctgatctactgggccagcaccagagaaagcggcgtgcccgatagattttctggctctggcagcggcaccgacttcaccctgacaatttctagcctgcaagccgaggacgtggccgtgtactactgccagaacgactacagctacccctacaccttcggccagggcaccaagctggaaatcaaa

SEQ ID NO: 141 - DNA, 339 bp, Artificial Sequence; identical to SEQ ID NO: 140
  Synthetic Polynucloetide

SEQ ID NO: 142 - DNA, 324 bp, Artificial Sequence
  Synthetic Polynucloetide
gacgtgcagatcacacagagccctagctacctggctgcctctcctggcgagacaatcaccatcaactgtcgggccagcaagagcatcagcaaggacctggcctggtatcaagagaagcccggcaagaccaacaagctgctgatctacagcggcagcacactccagtctggcatccccagcagattttccggctctggcagcggcaccgatttcaccctgaccataagcagcctggaacctgaggacttcgccatgtactactgccagcagcacaacaagtacccctacacctttggcggaggcaccaagctggaaatcaagaga

SEQ ID NO: 143 - DNA, 318 bp, Artificial Sequence
  Synthetic Polynucloetide
gagatcgtgctgacacagagccctaccagcatgacagcctctccaggcgagcaagtgaccatcacctgtagagccagcagcagcatcaactacatgcactggtatcagcagaagcctggcgcaagccccagaccttggatctacgagacaagcaagctggcctccggcgtgcccgatagattttctggatctgccagcggcaccagctacagcctgaccatcaacaacatggaagccgaggacgccgccacctactactgccagcagtggaattacccctcctggacctttggcggaggcaccaagctggaacttaaa

SEQ ID NO: 144 - DNA, 339 bp, Artificial Sequence
  Synthetic Polynucloetide
gacatcgtgatgacacagagcccttctagcctggccgtgtctgagggcgagacagtgaccatcaactgcaagagcagccagagcttcctgtctagcggcgacggcaagaattacgtggcctggtatcagtacaagcccggacagagccccaagctgctgatctactgggccagcacaagacagagcggcgtgcccgatagattcatcggctctggcagcggcaccgacttcaccctgacaatctctacagtgcaggccgaggacctggctatctactactgccagcagtattacgacacccctctgacctttggctccggcaccaagctggaaatcaaa

SEQ ID NO: 145 - DNA, 339 bp, Artificial Sequence
  Synthetic Polynucloetide
gacgtgctgatgacccagacacctgtgtctctgccagtgtctctcggaggccaggtgtccatctcctgtagaagcagccagagcctggtgcactccgacggcgatacctacctgcactggtatctccagaagcctggacagagccctcagctcctgatctaccgggtgtccaacagattcagcggcgtgcccgatagattttccggcagcggctctggcaccgacttcaccctgaagatcagcagagtggaacccgaggacctgggcctgtactactgtctccagaccacacacttcccaccttggacctttggcggaggcaccaagctggaaatgaaa

SEQ ID NO: 146 - DNA, 333 bp, Artificial Sequence
  Synthetic Polynucloetide
gagatcgtgctgacacagagccccgatttccagagcgtgacccctaaagaaaaagtgaccatcacctgtcgggccagcgagagcgtggacacattcggcatcagcttcatgaactggttccagcagaagcccgatcagagccccaagctgctgattcacgccgccagcaatcaaggcagcggagtgcctagcagattttccggctctggcagcggcaccgatttcaccctgaccatcaatagcctggaagccgaggatgccgccacctactactgccagcagagcaaagaggtgcccttcacctttggcggaggcaccaaggtggaaatcaaa

SEQ ID NO: 147 - DNA, 321 bp, Artificial Sequence
  Synthetic Polynucloetide
gccattcagctcacacagagcccttctagcctgagcgcctctgtgggcgacagagtgaccatcacatgtagagccagccagggcatcagcagcgcccagcagaaacctggaaaggcccctaagctgctgatcctggcctggtacagcagcctggaaagcggagtgcctagcagattcagcggctacgatgcctctggcagcggcaccgatttcaccctgacaatatccagcctccagcctgaggacttcgccacctactactgccagcagttcaacagctacccctacaccttcggccagggcaccaagctggaaatcaaa

SEQ ID NO: 148 - DNA, 336 bp, Artificial Sequence
  Synthetic Polynucloetide
gacatcgtgatgacacagagccccgccacactgtcactgtctccaggcgaaagagccacactgagctgtcggagcagcaagagcctccagaacgtgaacggcaacacctacctgtactggttccagcagaagcccggccagtctcctcagctcctgatctacagaatgagcaacctgaacagcggcgtgcccgacagattttctggcagcggaagcggcaccgagttcaccctgaccataagcagcctggaacctgaggacttcgccgtgtactactgtatgcagcacctggaataccccatcaccttcggagccggcaccaagctggaaatcaaa

SEQ ID NO: 149 - DNA, 324 bp, Artificial Sequence
  Synthetic Polynucloetide
gacatccagatgacacagagccctagcagcctgtctgccagcgtgggagacagagtgaccatcacatgcaaggccagcgaccacatcaacaactggctggcctggtatcagcagaagcctggacaggcccctaagctgctgatctacggcgctaccacactggaaacaggcgtgcccagcagattttctggcagcggctctggcaccgactacaccctgacaatatccagcctccagcctgaggacttcgccacctactactgtcagcagagctggaacaccccttggacattcggccagggcaccaagctggaaatcaagaga

SEQ ID NO: 150 - DNA, 333 bp, Artificial Sequence
  Synthetic Polynucloetide
cagatcgtgctgtctcagtctcctgccatcctgagcgcttccccaggcgagaaagtgaccatgacctgtagagccagcagcagcgtgtcctacatgcactggtatcagcagaagcccggcagcagccctaagccttggatctacgccaccagcaatctggcctctggcgtgccagccagattttctggctctggcagcggcaccagctacagcttcacaatcagcagagtggaagccgaggacgccgccacctactattgtcagcagtggaccttcaatcctcctaccttcggcggaggcacccggctggaaatcaaaagaacagtggctgct

SEQ ID NO: 151 - DNA, 321 bp, Artificial Sequence; identical to SEQ ID NO: 56
  Synthetic Polynucloetide

SEQ ID NO: 152 - DNA, 321 bp, Artificial Sequence
  Synthetic Polynucloetide
gacatccagatgacacagagccctagcagcctgtctgccagcgtgggagatagagtgaccatcaactgcaaggccagccaggacatcaacagctacctgagctggttccagcagaagcctggcaaggcccctaagacactgatctaccgggccaacagactggtggatggcgtgccaagcagattttctggcagcggcagcggccaggattacaccctgacaatatccagcctccagcctgaggacttcgccacctactactgcctccagtacgacgagttccctctgacctttggcggaggcaccaaggtggaaatcaaa

SEQ ID NO: 153 - DNA, 336 bp, Artificial Sequence
  Synthetic Polynucloetide
gacatcgtgatgacccagacacctctgagcctgagcgtgacacctggacagcctgccagcattagctgcaagagcagccagtctctgctggacggcgacggcaagacctacctgaattggctgctccagaagcctggacagagccctcagcggctgatctacctggtgtccaagctggatagcggcgtgcccgatagattttctggcagcggctctggcaccgacttcaccctgaagatcagcagagtggaagccgaggacgtgggcgtgtactactgttggcagggcacacacttccccagaacattcggccagggcacaaagctggaaatcaaa

SEQ ID NO: 154 - DNA, 318 bp, Artificial Sequence
  Synthetic Polynucloetide
gacatccagatgacacagagccctagcagcctgtctgccagcgtgggagacagagtgaccatcacatgcaaggccagccaggatgtgtctacagccgtggcctggttccagcagaagcctggaaaagcccctaagctgctgatctacagccccagctacagatacaccggcgtgcccagcagattttctggcagcggctctggcaccgacttcaccctgacaatatccagcctccagcctgaggacttcacctactactgccagcagctctacagcaccccttacacattcggccagggcaccaaggtggaaatcaaa

SEQ ID NO: 155 - DNA, 333 bp, Artificial Sequence
  Synthetic Polynucloetide
gacatccagatgacacagagccctagcagcctgtctgccagcgtgggagacagagtgaccatcacctgtagagccagccagagcgtgtccaccagcagctacaactacatgcactggtatcagcagaagcccggcaagcctcctaagctgctgattaagtacgccagcaacctggaaagcggcgtgcccagcagattttctggcagcggctctggcaccgacttcaccctgacaatatccagcctccagcctgaggacttcgccacctactactgtcagcactcctgggagatccctctgacattcggccagggcaccaaggtggaaatcaaa

SEQ ID NO: 156 - DNA, 324 bp, Artificial Sequence
  Synthetic Polynucloetide
gagatcgtgctgacacagtctccagccacactgagcgcttctccaggcgagagagtgaccctgacctgtagagccagcagcaacgtgatctccagctacgtgcactggtatcagcagaagcctggcagcagccccagactgtttctgtacagcaccagcaatctggcctccggcgtgccaagcagattttctggctctggcagcggcaccgacttcacctttaccatctctagcctggaagccgaggacgccgccacctactactgtcagcagtacagcggctaccctctgaccttcggccagggcacaagactggaaatcaaa

SEQ ID NO: 157 - DNA, 324 bp, Artificial Sequence
  Synthetic Polynucloetide
gagatcgtgctgacacagtctcccgccacactgtcactgtctccaggcgaaagagccacactgagctgtagagccagcagcaacgtgatctccagctacgtgcactggtatcagcagaagcctggacaggcccctcggctgctgatctacagcacaagcaatctggcctctggcatccccgccagattttctggctctggaagcggcaccgacttcaccctgaccataagcagcctggaacctgaggacttcgccgtgtactactgccagcagtatagcggctaccctctgaccttcggccagggcacaagactggaaatcaaa

SEQ ID NO: 158 - DNA, 336 bp, Artificial Sequence
  Synthetic Polynucloetide
gacgtggtcatgacacagaccccactgagcctgcctgtgtctctgggagatcaggccagcatctcctgtagaagcagccagagcctggtgcacagcaacggcaacacctacctgcggtggtatctccagaagcctggacagagccccaaggtgctgatctacaaggtgtccaacagagtgtccggcgtgcccgatagattttctggcagcggctctggcaccgacttcaccctgaagatcaatagagtggaagccgaggacctgggcgtgtacttctgtagccagagcacccatgtgccttggacctttggcggaggcaccaagctggaaatcaag

SEQ ID NO: 159 - DNA, 330 bp, Artificial Sequence
  Synthetic Polynucloetide
tctgtgctgacccagcctagctccgtgtctgctgctcctggacagaaagtgaccatctcctgtagcggcagcaccagcaacatcggcaacaactacgtgtcctggtatcagcagcaccccggcaaggcccctaagctgatgatctacgacgtgtccaagaggcccagcggcgtgccagatagattttccggcagcaagagcggcaacagcgccagcctggatattagcggactccagtctgaggacgaggccgactactattgcgccgcctgggatgatagcctgagcgagtttctgtttggcaccggcaccaagctgacagtgcttgga

SEQ ID NO: 160 - DNA, 339 bp, Artificial Sequence
  Synthetic Polynucloetide
cagtctgtggtcacacagcctccatctgtgtctggcgctccaggccagagagtgaccatctcttgtaccggcagcagcagcaatatcggagccggctatgacgtgcactggtatcagcagctccctggcacagcccctaaactgctgatctacggcaacagcaacagacccagcggcgtgcccgatagattttccggctctaagagcggcacaagcgccagcctggctattactggactccaggccgaggacgaggccgactactactgtcagagctacgacagcagcctgagcggcagctatgtgtttggcaccggcaccaagctgacagtgcttgga

SEQ ID NO: 161 - DNA, 333 bp, Artificial Sequence
  Synthetic Polynucloetide
cagtctgtggttacacagcctgcctccgtgtctggctctcctggccagagcatcaccatcagctgtaccggcaccagctctgatgtcggcggctacaattacgtgtcctggtatcagcagcaccccggcaaggcccctaagctgatgatctacgacgtgtccaagaggcccagcggcgtgtccaatagattcagcggcagcaagagcggcaacaccgccagcctgacaatttctggactgcaagccgaggacgaggccgactactactgtagcagctacaccagcagcagcacactggtgtttggcggaggcaccaagctgacagttcttgga

SEQ ID NO: 162 - DNA, 324 bp, Artificial Sequence
  Synthetic Polynucloetide
gacgtggtcatgacacagagcccttctagcctgtctgccagcgtgggcgacagagtgacaatcacctgtcagagcagcctggacatcagccactacctgaactggtatcagcagaagcccggcaaggcccctaagctgctgatctacgacgccagcaatctggaaaccggcgtgcccagcagattttctggcagcggaagcggcacccacttcaccttcacaatatccagcctccagcctgaggacttcgccacctactactgccagcagtacgacaacctgcctctgacctttggcggaggcaccaagctggaaatcaagaga

SEQ ID NO: 163 - DNA, 372 bp, Artificial Sequence
  Synthetic Polynucloetide
gacgtgatgctgacccagacaccactgagcctgcctgtgtctctgggcgatcaggccagcatctcctgtagaagcagccagagcatcctgcacagcaccggcgatacctacctggaatggtatctccagaagcctggacagagccccaagctgctgattaacaaggtgtccaaccggctgagcggcgtgcccgatagattttctggcagcggctctggcaccgacttcaccctgaagatcagcagagtggaagccgaggacctgggcgtgtactactgcttccaaggcagccatgttccttggacctttggcggaggcaccaagctggaaatcaagagagctgacgccgctcctaccgtgtccatctttcct

SEQ ID NO: 164 - DNA, 324 bp, Artificial Sequence
  Synthetic Polynucloetide
ctgcctgttctgacacagcctccatccgtgtctgtggcccctggaaagaccgccagaatcacatgcggcggcaacaacatcggcagcaagagcgtgcactggtatcagcagaagcctggacaggctcctgtgctggtggtgtacgacgacagcgatagacctagcggcatccccgagagattcagcggcagcaattccggcaataccgccacactgaccatcagcagagtggaagctggcgacgaggccgactactactgccaagtgtgggacagcagcagcgactacgtggtgtttggcggcggaacaaagctgacagtgctt

SEQ ID NO: 165 - DNA, 333 bp, Artificial Sequence
  Synthetic Polynucloetide
gagctggtcatgacacagagccctgcttctctggccgtgtcactgggacagagagccaccatctcttgcagagccagcgagagcgtggacagctacggcaagagcttcatgcactggtatcagctcaagcccggccagcctcctaagctgctgatctacagagcctccaacctggaaagcggcgtgccagccagattttctggcagcggcagcagaaccgacttcaccctgaccattgatcccgtggaagccgatgatgccgccacctactactgccagcagaacaacgaggacccctggacatttggcggaggcaccaagctggaaatcaaa

SEQ ID NO: 166 - DNA, 336 bp, Artificial Sequence; identical to SEQ ID NO: 139
  Synthetic Polynucloetide

SEQ ID NO: 167 - DNA, 336 bp, Artificial Sequence
  Synthetic Polynucloetide
gatattgtgctgactcagagccctgccactctgagccttagtccaggcgacagagctaccatctcctgtagggcctctgaatccgtgaccattctgggctctcatctcatatattggtatcaacaaaagccgggccagcctccacggctgctcattcaactggcctctaacgtgcagaccggcgtgccagctagattttctggctctggctcccggaccgactttacactgacaatcagctccgtggaacccgaagattttgccgtctattattgcctccagtccaggaccattcctcggacattcggccagggaacaaaactcgaaatcaagcgg

SEQ ID NO: 168 - DNA, 321 bp, Artificial Sequence
  Synthetic Polynucloetide
gacgtggtcatgacacagagcccttctagcctgtctgccagcgtgggcgacagagtgaccatcacctgtatggcctccgaggacatctacatccggctggcctggtatcagcagaagcctggaaacgcccctaagctgctgatctacgccgccacctctctggaaacaggcgtgccaagcagattttccggcagcggctctggcaccgatttcaccctgacaatatccagcctccagcctgaggacttcgccacctactactgccagcagtattggagcagcccctggacatttggcggaggcaccaaggtggaaatcaaa

SEQ ID NO: 169 - DNA, 318 bp, Artificial Sequence
  Synthetic Polynucloetide
tcttctgagctgacacaggaccctgccgtgtctgttgctctgggccagacagtgcggattacctgtcagggcgatagcctgagaagctactacgcctcctggtatcagcagaagccaggccaggctcctgtgctggtcatctacggcaagaacaacagacccagcggcatccccgatagattcagcggaagcagctctggcaataccgccagcctgacaattactggcgctcaggccgaggacgaggccgactactactgcaacagcagagatagcagcggctgggttttcggcggaggcacaaaactgacagtgctg

SEQ ID NO: 170 - DNA, 336 bp, Artificial Sequence
  Synthetic Polynucloetide
caatctgctctgacacagcctgccagcgtgtcaggatctcctggacagagcatcaccatctcttgcaccggcaccagctctgatgtcggcggctacaattacgtgtcctggtatcagcagcaccccggcaaggcccctaagctgatgatctacgacgtgtccaacagacccagcggcgtgtccaatagattctccggcagcaagagcggcaacaccgccagcctgacaatttctggactgcaagccgaggacgaggccgactactactgtagcagctacaccagcagcagcacactggtgtacgtgttcggcacaggcaccaaagtgaccgtgctt

SEQ ID NO: 171 - DNA, 330 bp, Artificial Sequence
  Synthetic Polynucloetide
caatctgtgctgacccagcctagatccgtgtctggctctcctggacagagcgtgaccatctcttgtaccggcaccagctctgatgtcggcggctacaattacgtgtcctggtatcagcagcaccccggcgaagcccctaagctgattatctacgacgccgacaagcggcccagcggcatcagcaatagattcagctctggcaagagcggcaacaccgccagcctgacaatcagcggactccaggtggaagatgaggccgactactactgctgctcctatgccggcggaagcacctgggttttcggaggcggtacaaaagtgaccgtgctg

SEQ ID NO: 172 - DNA, 336 bp, Artificial Sequence
  Synthetic Polynucloetide
caatctgctctgacacagcctgccagcgtgtcaggatctcctggacagagcatcaccatctcttgcaccggcaccagctctgatgtcggcggctacaattacgtgtcctggtatcagcagcaccccggcaaggcccctaaagtgattatcagcgaagtgaacaacagacccagcggcgtgtcccacagattcagcggctctaagtctggcaacaccgccagcctgacaatctctggactgcaagccgaggacgaggccgactacttctgtagcagctacaccagcggcagaaccctgtacgtgttcggcacaggcagcaaagtgacagtgctggga

SEQ ID NO: 173 - DNA, 333 bp, Artificial Sequence
  Synthetic Polynucloetide
caatctgctctgacacagcctgccagcgcctctggatctcctggacagagcgtgaccatctcctgtaccggcacctcttctgatgtcggcggctacaactacgtgtcctggtatcagcagcaccccggcaaggcccctaagctgatgatctacgacgtgtccaacagacccagcggcgtgtccaatagattctccggcagcaagagcggcaacaccgccagcctgacaatttctggactgcaagccgaggacgaggccgactactactgtagcagctacaccagcagcagcacactgtacgtgttcggcacaggcacccagctcacagttctt

SEQ ID NO: 174 - DNA, 327 bp, Artificial Sequence
  Synthetic Polynucloetide
gagatcgtgctgacacagtctcccgccacactgtcactgtctccaggcgaaagagccacactgagctgtagcgccagcagcagcgtgtcctacatgtactggtatcagcagaagcccggacaggcccctagactgctgatctacagaaccagcaacctggcctctggcatccccgccagattttctggctctggcagcggcaccgatttcaccctgaccataagcagcctggaacctgaggacttcgccgtgtactactgccagcagtaccacagctaccccaccacctttggacagggcaccaaggtggaaatcaagcggacagtt

SEQ ID NO: 175 - DNA, 321 bp, Artificial Sequence
  Synthetic Polynucloetide
gacgtggtcatgacacagagcccttctagcctgtctgccagcgtgggcgacagagtgaccatcacctgtaaagccagcgaggacatctacatccggctggcctggtatcagcagaagcctggaaaggcccctaagctgctgatctacgccgccacctctctggaaacaggcgtgccaagcagattttccggcagcggctctggcaccgatttcaccctgacaatatccagcctccagcctgaggacttcgccacctactactgccagcagtattggaccacaccttggacctttggcggaggcaccaaggtggaaatcaaa

SEQ ID NO: 176 - DNA, 324 bp, Artificial Sequence
  Synthetic Polynucloetide
gacatccagctgactcagagccctagctttctgagcgccagcgtgggcgacagagtgaccattacatgtagagccagccagggcatcagcaccgacctgaactggtatcagcagaagcctggcaaggcccctaagctgctgatctacgccgccagcaatctggaaagcggcgtgccaagcagattttccggctctggcagcggcaccgagttcaccctgacaatatctagcctccagcctgaggacttcgccacctactactgccagcagagctacaactggccctacacctttggcggaggcaccaaggtggaaatcaagaga

SEQ ID NO: 177 - DNA, 324 bp, Artificial Sequence
  Synthetic Polynucloetide
gacatccaactgactcagagccccagctttctgagcgcctctgtgggcgacagagtgaccatcacatgtagtctcagcctgggcatcagcacatggcgggattggtttccgccgaggcttggcaggggccttgagccgctgacctacgccgccagcacactgcaaagcggagtgcctagcagattttccggcagcggctctggcaccgagttcaccctgacaatatccagcctccagcctgaggacttcgccacctactactgccagcagctcaacagctaccctctgacctttggcggaggcaccaaggtggaaatcaagaga

SEQ ID NO: 178 - DNA, 324 bp, Artificial Sequence
  Synthetic Polynucloetide
gacatccagatgacccagaccacaagcagcctgtctgccagcctgggcgacagagtgaccatctcttgtagagccagccaggacatcagcaactacctgaactggtatcagcagaaacccgacggcaccgtgaagctgctgatctactacaccagcatcctgcacagcggcgtgcccagcagattttctggctctggcagcggcaccgactacagcctgaccatcagcaatctggaacaagaggacttcgctacctacttctgccagcaaggcaacaccctgccttggacatttggcggaggcaccaagctggaaatcaaagct

SEQ ID NO: 179 - DNA, 348 bp, Artificial Sequence
  Synthetic Polynucloetide
gacatcgtgatgacacagagccctgatagcctggccgtgtctctgggagagagagccaccatcaactgcaagagcagccagagcctgctgtacagaagcaaccagaagaactacctggcctggtatcagcagaagcccggccagcctcctaagctgctgatctactgggccagcaccagagaaagcggcgtgcccgatagattttctggctctggcagcggcaccgacttcaccctgacaatttctagcctgcaagccgaggacgtggccgtgtactactgccagcagtattacaactaccccagaaccttcggccagggcaccaaggtggaaatcaagagaacagtt

SEQ ID NO: 180 - DNA, 339 bp, Artificial Sequence
  Synthetic Polynucloetide
gacgtggtcatgacacagagccctctgagcctgcctgtgacacttggacagcctgccagcatcagctgtagaagcagccagagcctgctgcacagcagcggcaatacctacctggaatggtatcagcagaggcccggacagagccccagacctctgatctacaagatcagcacccggttcagcggcgtgcccgatagattttctggctctggcagcggcaccgacttcaccctgaagattagcagagtggaagccgaggacgtgggcgtgtactactgcttccaaggcagccacgtgccatacacctttggcggcggaacaaaggtggaaatcaagaga

SEQ ID NO: 181 - DNA, 327 bp, Artificial Sequence
  Synthetic Polynucloetide
gacatccagatgacacagagccctagcagcctgtctgccagcgtgggagacagagtgaccatcacctgtagagccagcgagaacatctacagcaacctggcctggtatcagcagaagcctggcaaggcccctaagctgctgatctacgccgccaccaatctggctgatggcgtgccaagcagattttccggctctggcagcggcaccgatttcaccctgacaatatccagcctccagcctgaggacttcgccacctactactgccagcacttttggggcacccctacattcggccagggcaccaaggtggaaatcaagagaacagtt

SEQ ID NO: 182 - DNA, 339 bp, Artificial Sequence
  Synthetic Polynucloetide
gacttcgtgatgacacagagccctctgagcctgcctgtgacacctggcgaacctgccagcatcagctgtagaagcagccagagcatcgtgcacagcaacggcaacacctacctggaatggtatctccagaagcctggacagagcccacagctgctgatctacaaggtgtccaacagattcagcggcgtgcccgacagattttctggcagcggctctggcaccgacttcaccctgaagattagcagagtggaagccgaggacgtgggcgtgtactactgcttccaaggctctcacgtgcccctgacctttggacagggcaccaagctggaaatcaagaga

SEQ ID NO: 183 - DNA, 318 bp, Artificial Sequence
  Synthetic Polynucloetide
gacatccagctgactcagagccctagctttctgagcgccagcgtgggcgacagagtgaccatcacatgtagcgccagatccagcatcagcttcatgtactggtatcagcagaagcccggcaaggcccctaagctgctgatctacgacaccagcaatctggcctctggcgtgcccagcagattttctggaagcggcagcggcaccgagttcaccctgacaatctctagcctggaagccgaggatgccgccacctactattgccagcagtggtccagctatcccctgacatttggacagggcaccaagctggaaatcaaa

SEQ ID NO: 184 - DNA, 336 bp, Artificial Sequence
  Synthetic Polynucloetide
cagctggtgctgacacagtctccaagcgcctctgccagcctgggatctagcgtgaagctgacctgtacactgagcagcggccacaagaccgacaccatcgactggtatcagcagcagcctggcaaggcccctagatacctgatgaagctggaaggcagcggcagctacaacaaaggctctggcgtgcccgatagattcagcggcagttcttctggcgctgattggtatctgaccatcagcagcctccagagcgaggacgaggccgattactactgcggcacagactaccccggcaactacctgtttggcggcggaacacagctgacagtgcttggc

SEQ ID NO: 185 - DNA, 333 bp, Artificial Sequence
  Synthetic Polynucloetide
gacatcgtgctgacacagagccctccaagcctggctatgagcctgggaaagagagccaccatcagctgtagagccagcgagagcgtgacaatcctgggctctcacctgatccactggtatcagcagaagcccggccagcctcctacactgctgattcagctggcctccaatgtgcagacaggcgtgccagccagattttctggcagcggcagcagaaccgacttcaccctgaccattgatcccgtggaagaggacgacgtggccgtgtactactgcctccagagcagaacaatccccagaacctttggcggaggcaccaagctggaaatcaaa

SEQ ID NO: 186 - DNA, 324 bp, Artificial Sequence
  Synthetic Polynucloetide
gatatccagctcactcaaagcccctctagtctctctgcctcagtgggggatcgggtcagttttacttgtcaagcttcacaggatatcaacaacttccttaattggtatcagcagaagccaggaaaagcacccaagctgctcatctatgatgcctcaaatttggagacgggtgttcccagtcgattctctgggtcagggtccgggaccgactttacgtttacgatctcctctctgcagcccgaagacatcgccacatactattgtcaacagtacggcaacttgcctttcacatttgggggcgggactaaggttgaaatcaagagg

SEQ ID NO: 187 - DNA, 324 bp, Artificial Sequence
  Synthetic Polynucloetide
gatattcaactgacacaatcccccagctcactcagcgccagcgtgggggacagggttagctttacctgtcaagcctctcaggatataaataactttctgaactggtatcaacagaagcctgggaaggcgcccaaactcctgatctatgatgcgtccaacctggaaactggcgtgccttcacgctttagcggctctggcagtggtacagacttcacttttaccatctcttcacttcagccggaggacatcgccacatattactgtcaacagtacggaaacttgccctttacttttggaggcggcaccaaagttgaaatcaaaaga

SEQ ID NO: 188 - DNA, 324 bp, Artificial Sequence
  Synthetic Polynucloetide
gacattcagatgacccaaagcccgtccagcctgtccgccagcctgggagatagagtgacaatcacgtgtagagcttcccaagggataagaaatgatctcgggtggtatcagcagaagcccggcaaagcccccaaaaggcttatatatgctagtagtacactgcagtctggagttccttcccgattttcaggtagcggctccggtacagagttcaccctcacgataagctcactccagcctgaggatttcgcaacgtactactgcctccagcacaacaattttccctggactttcggccagggcaccaaggtggagatcaagagg

SEQ ID NO: 189 - DNA, 327 bp, Artificial Sequence
  Synthetic Polynucloetide
gagattgtgttgacacagtctcccgataccctgtcactgtcacccggcgagaaggcaacgctgagttgcagagcaagccagtcagtctcctcttcttttctggcctggtatcagcaaaaaccaggtcaggcaccatctctcctgatttacgttgccagcagacgggcggctggcattcccgacaggttctctggaagcggatctgggaccgattttaccctgacaattagccgcttggagcccgaagactttggtatgttttactgccagcactacggaaggacacctttcacatttggcccgggcacgaaagtcgatataaaacgc

SEQ ID NO: 190 - DNA, 324 bp, Artificial Sequence
  Synthetic Polynucloetide
gacatccaactgactcagagccccagctttctgagcgcctctgtgggcgacagagtgaccatcacatgtagagccagccagggcatcagcagctacctggcttggtatcagcagaagcctggcaaggcccctaaactgctgatctacgccgccagcacactccagtctggcgtgccaagcagattttctggcagcggctctggcaccgagttcaccctgacaatatccagcctccagcctgaggacttcgccacctactactgccagcaagtgaacagctaccctctgacctttggcggaggcaccaaggtggaaatcaagaga

SEQ ID NO: 191 - DNA, 336 bp, Artificial Sequence
  Synthetic Polynucloetide
cagtctgctctgacccagcctagatccgtgtctggctctcctggacacagcgtgaccatcagctgtaccggcacctcttccgacgtgggcgactacaattacgtgtcctggtatcagcagaggcccggcaaggtgccaaagctgctgatctacgacgtgtccaagaggccaagcggcgtgcccgatagattttccggcagcaagtctggcaacaccgccagcctgacaatctctggactgcaagccgaggacgaggccatctacttttgtgccagctacgccggcaactacaacgtggtgtttggcggaggcaccaagctgacagtgcttggacaa

SEQ ID NO: 192 - DNA, 324 bp, Artificial Sequence
  Synthetic Polynucloetide
gacatccagatgacacagagccctagcagcctgtctgccagcgtgggagacagagtgaccatcacatgtagcgccagccagggcatcaacaactacctgaactggtatcagcagaagcccggcaaggcccctaagctgctgatccactacacatctggactgcacgctggcgtgcccagcagattttctggctctggcagcggcaccgactacaccctgacaatatctagcctccagcctgaggacgtggcaacctactactgccagcagtacagcatcctgccttggacctttggcggaggcaccaaggtggaaatcaagaga

SEQ ID NO: 193 - DNA, 339 bp, Artificial Sequence
  Synthetic Polynucloetide
gacattcagatgacacagagccctagcagcctgagcgcctctgtgggagacagagtgaccatcacatgcaagagcagccagagcgtgctgtactccagcaatcagaagaactacctggcctggttccagcagaagcctggcaaggctcctaagctgctgatctactgggccagcaccagagaaagcggcgtgccaagcagattttctggcagcggctctggcaccgacttcaccctgacaatatccagcctccagcctgaggacttcgccacctacttttgccaccagtacctgagcagctacacattcggacagggcaccaaggtggaaatcaagcgg

SEQ ID NO: 194 - DNA, 324 bp, Artificial Sequence
  Synthetic Polynucloetide
gacatccagatgacacagagccctagcagcctgtctgccagcgtgggagacagagtgaccatcacctgtagagccagccaggacatcagcaactacctgaactggtatcagcagaagcccggcaaggcccctaagctgctgatctactacaccagcagactgcacagcggcgtgcccagcagattttctggctctggcagcggcaccgacttcaccctgacaatatctagcctccagcctgaggacttcgccacctactattgccagcagggcaacaccctgccttacacatttggacagggcaccaaggtggaaatcaagaga

SEQ ID NO: 195 - DNA, 327 bp, Artificial Sequence
  Synthetic Polynucloetide
gacatccagatgacacagagccctagcagcctgtctgccagcgtgggagacagagtgaccatcacctgtaccgccagcagcagagtgtccagcagctacctgcactggttccagcagaagcctggcaaggcccctaagctgctgatctacagcaccagcaatctggcctctggcgtgcccagcagattttctggctctggcagcggcaccgacttcaccctgacaatatctagcctccagcctgaggacttcgccacctactactgccaccagtaccacagaagcccctacacattcggccagggcaccaaggtggaaatcaagaga

SEQ ID NO: 196 - DNA, 318 bp, Artificial Sequence
  Synthetic Polynucloetide
gacatccagatgacacagagccctagcagcctgtctgccagcgtgggagacagagtgaccatcacatgtagcgccagcagcagcgtgacctacatgtactggtatcagcagaagcccggcaaggcccctaagctgctgatctacgacaccagcaatctggcctctggcgtgcccagcagattttctggctctggcagcggcaccgactacaccctgacaatatctagcctccagcctgaggacttcgccacctactactgccagcagtggtccaactatcccctgacattcggccagggcaccaaggtggaaatcaaa

SEQ ID NO: 197 - DNA, 321 bp, Artificial Sequence
  Synthetic Polynucloetide
gagatcgtgctgacacagagcccttctagcctgtctgccagcgtgggcgacagagtgaccatcacatgtagagccagcgagaacatctacagctacctggcctggtatcagcagaagcctggcaaggcccctaagctgctgatctacaacaccaagacactcggcgagggcgtgcccagcagattttctggttctggcagcggcaccgacttcaccctgaccatatctagcctgcagcctgaggacttcgccacctactactgccagcaccactacggcacccctttcacatttggccctggcaccaaggtggacatcaaa

SEQ ID NO: 198 - DNA, 321 bp, Artificial Sequence
  Synthetic Polynucloetide
caaattgtgctgacacagagccccgccatcatgagcgcttctccaggcgagaaagtgaccatgacctgtagcgccagcagctccgtgtcttacatgcactggtatcagcagaagtccggcacaagccccaagcggtggatctacgataccagcaaactggcctccggcgtgcccgatagattttctggcagcggcagcggaaccagctacttcctgaccatcaacaacatggaagccgaggacgccgccacctactactgccagcagtggaacatcaaccctctgacctttggagccggcaccaagctggaactgaagaga

SEQ ID NO: 199 - DNA, 324 bp, Artificial Sequence
  Synthetic Polynucloetide
gacatccagatgacacagagcagcgcctacctgagcgtgtcccttggaggcagagtgaccatcacatgcaaggccagcgaccacatcaacaactggctggcctggtatcagcacaagcccggcaatgcccctagactgctgatctctggcgctaccacactggaaacaggcgtgcccagcagattttctggcagcggctctggcaaggactacaccctgagcatcaccagcctccagaccgaggatgtggctacctactactgccagcagagctggaacaccccttggacatttggcggaggcaccaagctggaaatcaagaga

SEQ ID NO: 200 - DNA, 324 bp, Artificial Sequence
  Synthetic Polynucloetide
gaaatcgtgctgacacagagccccggcacactgtcactttctccaggcgaaggcgctaccctgtcttgtagagctggacagtctgtgcggagcagctacctcggatggtatcagcagaagcctggacaggcccctcggctgttgatctacggtgcttctagcagagccacaggcatccccgatagattttctggcagcggctccggcaccgacttcaccctgacaatcagcagactggaacccgaggacttcgccgtgtattactgccagcagtacggctacagccctcctacatttggcggaggcaccaagctggaaatcaag

SEQ ID NO: 201 - DNA, 333 bp, Artificial Sequence
  Synthetic Polynucloetide
gacatcgtgctgacacagagccctccaagcctggctatgagcctgggaaagagagccaccatcagctgtagagccagcgagagcgtgacaatcctgggctctcacctgatccactggtatcagcagaagcccggccagcctcctacactgctgattcagctggcctccaatgtgcagacaggcgtgccagccagattttctggcagcggcagcagaaccgacttcaccctgaccattgatcccgtggaagaggacgacgtggccgtgtactactgcctccagagcagaacaatccccagaacctttggcggaggcaccaagctggaaatcaag

SEQ ID NO: 202 - DNA, 321 bp, Artificial Sequence
  Synthetic Polynucloetide
gagatcgtgctgacacagtctcccgccacactgtcactgtctccaggcgaaagagccacactgagctgtagagccagccagagcgtgtcctcttacctggcctggtatcagcagaagcctggacaggctccccggctgctgatctacgatgccagcaatagagccacaggcatccccgccagattttctggctctggcagcggcaccgatttcaccctgaccataagcagcctggaacctgaggacttcgccgtgtactactgccagcagagaagcaactggcccagaacattcggccagggcaccaaggtggaaatcaaa

SEQ ID NO: 203 - DNA, 327 bp, Artificial Sequence
  Synthetic Polynucloetide
gagatcgtgctgacacagagccctggcacactgtcactgtctccaggcgaaagagccacactgagctgtagagccagccagagcgtgtccagctcttacctggcttggtatcagcagaagcccggacaggctcccagactgctgatctacggtgcctctagcagagccacaggcatccccgatagattttctggcagcggctccggcaccgacttcaccctgacaatcagcagactggaacccgaggacttcgccgtgtactactgccagcagtaccaccactctccactgacctttggcggaggcaccaaggtggaaatcaagaga

SEQ ID NO: 204 - DNA, 324 bp, Artificial Sequence
  Synthetic Polynucloetide
gagatcgtgctgacacagagccctggcacactgtcactgtctccaggcgaaagagccacactgagctgtagagccagccagagcgtgtccagcgattacctggcttggtatcagcagaagcccggacaggctcccagactgctgatctatggtgcctctcggagagccacaggcatccccgatagattttctggcagcggctccggcaccgacttcaccctgacaatcagcagactggaacccgaggacttcgccgtgtactactgccagcagtacgtgtcctactggacctttggcggaggcaccaaggtggaaatcaagaga

SEQ ID NO: 205 - DNA, 327 bp, Artificial Sequence
  Synthetic Polynucloetide
gacatccagatgacacagagccctagcagcctgtctgccagcgtgggagacagagtgaccatcacctgtagagccagccaggacgtgaacacagccgtggcttggtatcagcagaagcctggcaaggcccctaagctgctgatctacagcgccagctttctgtacagcggcgtgcccagcagattcagcggaagcagaagcggcaccgacttcaccctgacaatatccagcctccagcctgaggacttcgccacctactactgccagcagcactacaccacacctccaacattcggccagggcaccaaggtggaaatcaagagaaca

SEQ ID NO: 206 - DNA, 321 bp, Artificial Sequence
  Synthetic Polynucloetide
gatattcagatgacacagagccccagcagcgtgtccgcctctgtgggagatagagtgaccatcacctgtagagccagccagggcatcacaagatggctggcctggtatcagcagaagccaggcaaggcccctaagctgctgatctacgccgcttctgtgctccagagcggagtgcctagcagattttctggcagcggctccggcaccgatttcaccctgacaatatccagcctccagcctgaggacttcgccacctactactgccagcagagcaacagcttccccagaacattcggacagggcaccaaggtggaaatcaag

SEQ ID NO: 207 - DNA, 321 bp, Artificial Sequence
  Synthetic Polynucloetide
gatattcagatgacacagagccccagcagcgtgtccgcctctgtgggagatagagtgaccatcacctgtcgggccagccaggacattagcagatggctggcttggtatcagcagaagccaggcaaggcccctaagctgctgatttcagccgccagcagactccagagcggagtgcctagcagattttctggctctggcagcggcaccgacttcaccctgacaatatctagcctccagcctgaggacttcgccatctactattgccagcaggccaagagcttccccagaacatttggacagggcaccaaggtggaaatcaag

SEQ ID NO: 208 - DNA, 336 bp, Artificial Sequence
  Synthetic Polynucloetide
gataccgtgatgacccagacacctctgagcagccacgtgacacttggacagcctgccagcatcagctgtagaagcagccagagcctggtgcacagcgacggcaatacctacctgtcttggctccagcagaggccaggacagcctcctagactgctgatctaccggatcagcagacggttcagcggcgtgcccgatagattttctggaagcggagccggcaccgacttcaccctggaaatcagcagagtggaagccgaggatgtgggcgtctactactgtatgcagagcacccacgtgccacggacctttggacagggcaccaaggtggaaatcaag

SEQ ID NO: 209 - DNA, 321 bp, Artificial Sequence
  Synthetic Polynucloetide
gatattcagctgactcagagccccagcttcctgtctgcctctgtgggcgacagagtgaccatcacatgttgggccagccagggcatcaacaactacctggcctggtatcagcagaagcccggcaaggctcctaagctgctgatctacgccgccagcacactgcaaacaggcgtgccaagcagattttccggctctggcagcggcaccgagttcaccctgacaatatctagcctccagcctgaggacttcgccacctactactgccagcagctgaacagctaccctctgacctttggaggcggcaccaaggtggaaatcaag

SEQ ID NO: 210 - DNA, 324 bp, Artificial Sequence
  Synthetic Polynucloetide
gaaattgtgctgacacagagccccggcacactgtcactttctccaggcgaaagagccacactgagctgtagagccagccagagcgtgaacaagaactacctggcttggtatcagcagaagcccggacaggctcccagactgctgatctacggtgcctctagcagagccacaggcatccccgatagattttctggcagcggctccggcaccgacttcaccctgacaatcagcagactggaacccgaggacttcgccgtgtattattgccagcagtacgacagaagccctctgacctttggaggcggcaccaaggtggaaatcaag

SEQ ID NO: 211 - DNA, 336 bp, Artificial Sequence
  Synthetic Polynucloetide
gatgtggtcatgacacagacccctctgagcctgcctgtgacacttggacagcctgccagcatcagctgtagatccagccagagcctggtgtacagagatggcaacacctacctgagctggttccagcagaggcctggacagtctcctcggcggctgatctacaaggtgtccaactggcagagcggcgtgcccgatagattttctggcggtggcagcggcaccgacttcaccctgaagatcagcagagtggaagccgaggacgtgggcgtgtactactgtatgcagggcacacactggcctccaacattcggccagggaacaaaggtggaaatcaag

SEQ ID NO: 212 - DNA, 318 bp, Artificial Sequence
  Synthetic Polynucloetide
atcgtgatgacccagactcctaagttcctgctggtgtctgccggcgacagagtgaccatcacctgtaaagccagccagagcgtgaacaacgacgtgtcctggttccagcagaagcccggccaatctcctacactgctgatctactacgccagcaacagatacaccggcgtgcccgatagattcaccggctctggctacggcaccgacttcacctttaccatcagcaccgtgcaggccgaggacctggctgtgtacttctgccagcaagactacagcagcccttacacctttggaggcggcaccaagctggaaatcaag

SEQ ID NO: 213 - DNA, 318 bp, Artificial Sequence
  Synthetic Polynucloetide
gacattcagatgacacagagccctagcagcctgagcgcctctgtgggagacagagtgacaattacctgtcgggccagccagtctatcaacaactacctgaactggtatcagcagaagcccggcaaggcccctacactgctgatctatgccgccagctctctccagagcggagtgcctagcagattcagcggaagcagaagcggcaccgacttcaccctgacaatatccagcctccagcctgaggacttcgccgcctacttttgccagcagacctacagcaaccccacctttggccagggcaccaaggtggaagtgaag

SEQ ID NO: 214 - DNA, 324 bp, Artificial Sequence
  Synthetic Polynucloetide
agctacgagctgacacagcctccaagcgtgtccgtgtctcctggacagacagccagcatcacctgtagcggcgataagctgggcgataagtacgccagctggtatcagcagaagcccggccagtctcctgtgctggtcatctaccaggacaacagaaggcccagcggcatccccgagagattcagcggcagcaatagcggcaataccgccacactgaccatcagcggcacccaggctatggacgaggccgactactattgccaggcttgggacagcgacacctacgtgttcggcaccggcaccaaagtgacagtgcttggacaa

SEQ ID NO: 215 - DNA, 321 bp, Artificial Sequence
  Synthetic Polynucloetide
gatattcagatgacacagagccccagcagcctgtctgcctctgtgggagacagagtgaccatcacctgtagagccagccagagcatcagcagctacctgaactggtatcagcagaagcccggcaaggcccctaaactgctgatctatgccgcctccagtctgcagagcggagtgcctagcagattttctggctctggcagcggcaccgacttcaccctgacaatatctagcctgcagcctgaggacttcgccacctactactgccagcagagctacatcacccctctgacattcggtggcggcaccaaggtggaaatcaag

SEQ ID NO: 216 - DNA, 339 bp, Artificial Sequence
  Synthetic Polynucloetide
gacatcgtgctgacacagagccctgcttctctggccgtgtctcttggacagggcgctaccatcagctgtagagccagcaagagcgtgtccaccagcggctacacctacatgcactggtatcagcagaagcccggccagcctcctaagctgctgatctacctggcctccaacctggaaagcggagtgcctgccagattttctggcagcggctctggcaccgacttcaccctgaatatccatcctgtggaagaagaggacgccgccacctactactgtcagcactctggcgaactgccacctagctttggcggaggcaccaagctggaaatcaagagagct

SEQ ID NO: 217 - DNA, 336 bp, Artificial Sequence
  Synthetic Polynucloetide
gacatccagatgacacagagccctagcagcctgtctgccagcgtgggagacagagtgaccatcacatgtagcgccagccagggcatcagaaactacctgaactggtatcagcagaaacccggcaaggtgcccaagctgctgatctactacaccagcagactgcacagcggcgtgcccagcagattttctggctctggcagcggcaccgacttcaccctgacaatatctagcctccagcctgaggacgtggcaacctactactgtcagcagtacggcaagctgccctacacattcggccagggcaccaagctggaaatcaagagaacagtggctgcc

SEQ ID NO: 218 - DNA, 348 bp, Artificial Sequence
  Synthetic Polynucloetide
gacatcgtgatgacacagagccccgatagcctggccgtgtctctgggagaaagagccaccatcaactgtagagccggcgagagcgtggacatcttcggcgtgggatttctgcactggtatcagcagaagcccggccagcctcctaagctgctgatctacagagccagcaacctggaaagcggcgtgcccgatagattttctggcagcggctctggcaccgacttcaccctgacaatcagacctctccaggccgaggatgtggccgtgtattattgccagcagaccaacgaggacccctacacatttggacagggcaccaagctggaaatcaagagaacagtggccgcc

SEQ ID NO: 219 - DNA, 336 bp, Artificial Sequence
  Synthetic Polynucloetide
gacatcgtgctgacacagtctcccgccacactgtcactgtctccaggcgaaagagccacactgagctgtagagccagccagaacatcgtgttcaacctggcctggtatcagcagaagcctggacaggctccccggctgctgatctacgatgccagcaatagagccaccggcgtgcccgccagattttctggttctggcagcggcaccgacttcaccctgaccatatctagcctggaacctgaggacttcgccgtgtactactgccagcagaaaaagtccatgcctctgaccttcggccagggcaccaaggtggaaatcaagagaacagtggctgcc

SEQ ID NO: 220 - DNA, 339 bp, Artificial Sequence
  Synthetic Polynucloetide
cagacagtggtcacccaagagcctagcctgacagtgtctcctggcggaaccgtgacactgacatgtggcagttctaccggcgctgtgaccaccagcaattacgccaactgggtgcagcagaagccaggccaagctcctagaggactgatcggcggcacaaacaagagagcccctggcacaccagccagattttctggctctctgctcggcggaaaggccgctcttacactgtctggtgtccagcctgaggacgaggccgagtattattgcgccctgtggtacagcaacctgtgggttttcggcggaggcaccaagctgacagtgctgactgttgctgct

SEQ ID NO: 221 - DNA, 342 bp, Artificial Sequence
  Synthetic Polynucloetide
gaaattgtgctgacacagagccccggcacactgtcactttctccaggcgaaagagccacactgagctgtagagccagccagagcgtgtccagctcttacctggcttggtatcagcagaagcccggccaggctcctagactgctgatctacggtgccagcagcagagccacaggcatccccgatagattttctggcagcggctccggcaccgacttcaccctgacaatcagcagactggaacccgaggactttgccgtgtattattgccagcagtacaccaacgagcactactacaccttcggccagggcaccaaggtggaaatcaagagaacagtggccgcc

SEQ ID NO: 222 - DNA, 339 bp, Artificial Sequence
  Synthetic Polynucloetide
gagatcgtgctgacacagtctcccgccacactgtcactgtctccaggcgaaagagccacactgagctgtagcgtgtccagcagcatcagcagcagcaacctgcactggtatcagcagaagcctggacaggcccctcggctgctgatctacggcacatctaatctggcctctggcatccccgccagattttctggctctggaagcggcaccgacttcaccctgaccataagcagcctggaacctgaggacttcgccgtgtactactgccagcagtggtccagctatccccacacatttggcggaggcaccaaggtggaaatcaagagaacagtggctgcc

SEQ ID NO: 223 - DNA, 336 bp, Artificial Sequence
  Synthetic Polynucloetide
gacatccagatgacacagagccctagcagcctgtctgccagcgtgggagacagagtgaccatcacctgtaaagccggccagaacgtgggcacaagcgtggcatggtatcagcagaagcctggcaaggcccctaagctgctgatctacagcgccagctacagatacagcggcgtgcccagcagattttctggcagcggctctggcaccgacttcaccctgacaatatccagcctccagcctgaggacttcgccacctactactgccagcagtacatcacatacccctacaccttcggccagggcaccaaggtggaaatcaagagaacagtggctgcc

SEQ ID NO: 224 - DNA, 336 bp, Artificial Sequence
  Synthetic Polynucloetide
gacatccagatgacacagagccctagcagcctgtctgccagcgtgggagacagagtgaccatcacatgtagcgccagccaggacatcggcaactttctgaactggtatcagcagaagcccggcaaggcccctaagctgctgatctactacacctccagcctgtacagcggcgtgcccagcagattttctggcagcggctctggcaccgacttcaccctgacaatatccagcctccagccagaggacttcgccacctactactgccagcagtacagcaagctgcccctgacctttggacagggcaccaagctggaaatcaagagaacagtggctgcc

SEQ ID NO: 225 - DNA, 336 bp, Artificial Sequence
  Synthetic Polynucloetide
gatgtgcaagtgacacagagccctagcagcctgtctgcctctgtgggcgacagagtgacaatcacctgtcggagcagccagagcctggctaactcctacggcaataccttcctgagctggtatctgcacaagcccggaaaggctccccagctgctgatctacggcatcagcaacagattcagcggcgtgcccgataggtttagcggctctggaagcggcaccgacttcaccctgacaatatccagcctccagcctgaggactttgccacctactactgtctgcaaggcacccaccagccttacacattcggacagggcaccaaggtggaaatcaag

SEQ ID NO: 226 - DNA, 321 bp, Artificial Sequence
  Synthetic Polynucloetide
gacatccagatgacacagagccctagcagcctgtctgccagcgtgggagacagagtgaccatcacctgtagagccagccaggacatcagcaactacctgaactggtatcagcagaaacccggcaaggccgtgaagctgctgatctactacaccagcatcctgcacagcggcgtgcccagcagattttctggctctggcagcggcaccgactacaccctgacaatatctagcctccagcctgaggacttcgctacctacttctgccagcaaggcaacaccctgccttggacatttggcggaggcaccaaggtggaaatcaaa

SEQ ID NO: 227 - DNA, 324 bp, Artificial Sequence
  Synthetic Polynucloetide
gacatcgtgatgacccagagccagcggttcatgaccacaagcgtgggcgatagagtgtccgtgacatgcaaggccagccagagcgtggactctaacgtggcctggtatcagcagaagcccagacagagccccaaggctctgatctttagcgccagcctgagattcagcggagtgcccgctagattcacaggcagcggctctggcaccgatttcaccctgaccatcagcaacctccagagcgaggacctggccgagtatttctgccagcagtacaacaactaccctctgaccttcggagccggcaccaagctggaactgaagaga

SEQ ID NO: 228 - DNA, 324 bp, Artificial Sequence
  Synthetic Polynucloetide
gacatccagatgacacagagccctagcagcctgtctgccagcgtgggagacagagtgaccatcacctgtagagccagccaggacatcagcaactacctgaactggtatcagcagaagcccggcaaggcccctaagctgctgatctactacaccagcatcctgcacagcggcgtgcccagcagattttctggctctggcagcggcaccgacttcaccctgacaatatctagcctccagcctgaggacttcgccacctactattgccagcagggcaacaccctgccttggacctttggacagggcaccaaggtggaaatcaagaga

SEQ ID NO: 229 - DNA, 324 bp, Artificial Sequence
  Synthetic Polynucloetide
gacatccagatgacacagagccctagcagcctgtctgccagcgtgggagacagagtgaccatcacatgcaaggccagcgaccacatcaacaactggctggcctggtatcagcagaagcctggcaaggcccctaagctgctgatctacggcgctaccacactggaaacaggcgtgcccagcagattttctggcagcggctctggcaccgacttcaccctgacaatatccagcctccagcctgaggacttcgccacctactactgtcagcagagctggaacaccccttggacattcggccagggcaccaaggtggaaatcaagaga

SEQ ID NO: 230 - DNA, 324 bp, Artificial Sequence
  Synthetic Polynucloetide
agctacgtgctgacacagcctccatccgtgtctgtggctccaggacagaccgccagaatcacatgcggcggcaacaacatcggcagcaagagcgtgcactggtatcagcagccacctggacaggctccagtggtggtggtgtacgacgacagcgatagacctagcggcatccccgagagattcagcggcagcaattccggcaataccgccacactgaccatcagcagagtggaagctggcgacgaggccgtgtactactgccaagtgtgggacagcagcagcgatcacgtggtgtttggcggcggaacaaagctgacagtgctt

SEQ ID NO: 231 - DNA, 324 bp, Artificial Sequence
  Synthetic Polynucloetide
gacatccagatgacacagagccctagcagcctgtctgccagcgtgggagacagagtgaccatcacctgtatggcctccgaggacatctacatccggctggcctggtatcagcagaagcctggaaaggcccctaagctgctgatctacgccgccacctctctggaaacaggcgtgccaagcagattttccggcagcggctctggcaccgatttcaccctgaccataagcagcctgcagcctgaggacttcgccacctactactgccagcagtattggagcagcccctggacctttggacagggcaccaaggtggaaatcaagaga

SEQ ID NO: 232 - DNA, 336 bp, Artificial Sequence
  Synthetic Polynucloetide
gacatccagatgacacagagccctagcagcgtgtccgcctctgtgggagacagagtgaccatcacctgtagagccagcgagagcgtggacaactacggcatcagcttcatgaactggtatcagcagaagcccggcaaggcccctaagctgctgattagcgccgccagcaatagagccacaggcgtgccaagcagattttccggctctggcagcggcaccgatttcaccctgacaatatccagcctccagcctgaggacttcgccatctactactgccagcagagcaaagaggtgccctggacctttggacagggcaccaaggtggaaatcaagaga

SEQ ID NO: 233 - DNA, 336 bp, Artificial Sequence
  Synthetic Polynucloetide
gacatccagctgacacagagcccttctagcctgtctgccagcgtgggcgacagagtgaccatcacatgtagagccagcaagagcgtgtccaccagcggctacagctacatgcactggtatcagcagaagcccggcaaggcccctaagctgctgatctacctggtgtccaacctggaaagcggcgtgcccagcagattttctggcagcggctctggcaccgacttcaccctgacaatatccagcctccagcctgaggacttcgccacctactactgccagcagttcagcgagctgccttggacctttggacagggcaccaaggtggaaatcaagaga

SEQ ID NO: 234 - DNA, 327 bp, Artificial Sequence
  Synthetic Polynucloetide
gacatccagatgacacagagccctagcagcgtgtccgcctctgtgggagacagagtgaccatcacctgtcgggccagccagttcatcagcagcagctacctgagctggtatcagcagaagcctggcaaggcccctaagctgctgatctctggcagctctagcagagccacaggcgtgccaagcagattttctggcagcggctctggcaccgacttcaccctgacaatatccagcctccagcctgaggacttcgccatctactactgccagcagctgtactctagccccatgacattcggccagggcaccaaggtggaaatcaagaga

SEQ ID NO: 235 - DNA, 324 bp, Artificial Sequence; identical to SEQ ID NO: 230
  Synthetic Polynucloetide

SEQ ID NO: 236 - DNA, 324 bp, Artificial Sequence; identical to SEQ ID NO: 230
  Synthetic Polynucloetide

SEQ ID NO: 237 - DNA, 324 bp, Artificial Sequence; identical to SEQ ID NO: 230
  Synthetic Polynucloetide

SEQ ID NO: 238 - DNA, 324 bp, Artificial Sequence; identical to SEQ ID NO: 230
  Synthetic Polynucloetide

SEQ ID NO: 239 - DNA, 324 bp, Artificial Sequence; identical to SEQ ID NO: 230
  Synthetic Polynucloetide

SEQ ID NO: 240 - DNA, 324 bp, Artificial Sequence; identical to SEQ ID NO: 230
  Synthetic Polynucloetide

SEQ ID NO: 241 - DNA, 324 bp, Artificial Sequence; identical to SEQ ID NO: 230
  Synthetic Polynucloetide

SEQ ID NO: 242 - DNA, 324 bp, Artificial Sequence
  Synthetic Polynucloetide
agctacgtgctgacacagcctccatccgtgtctgtggctccaggacagaccgccagaatcacatgcggcggcaagaacatcggcagcaagagcgtgcactggtatcagcagccacctggacaggctccagtggtggtggtgtacgacgacagcgatagacctagcggcatccccgagagattcagcggcagcaattccggcaataccgccacactgaccatcagcagagtggaagctggcgacgaggccgtgtactactgccaagtgtgggacagcagcagcgatcacgtggtgtttggcggcggaacaaagctgacagtgctt

SEQ ID NO: 243 - DNA, 324 bp, Artificial Sequence
  Synthetic Polynucloetide
agctacgtgctgacacagcctccatccgtgtctgtggctccaggacagaccgccagaatcacatgcggcggcaacaacctcggcagcaagagcgtgcactggtatcagcagccacctggacaggctccagtggtggtggtgtacgacgacagcgatagacctagcggcatccccgagagattcagcggcagcaattccggcaataccgccacactgaccatcagcagagtggaagctggcgacgaggccgtgtactactgccaagtgtgggacagcagcagcgatcacgtggtgtttggcggcggaacaaagctgacagtgctt

SEQ ID NO: 244 - DNA, 324 bp, Artificial Sequence
  Synthetic Polynucloetide
agctacgtgctgacacagcctccatccgtgtctgtggctccaggacagaccgccagaatcacatgcggcggcaacaacatcggcggcaagagcgtgcactggtatcagcagccacctggacaggctccagtggtggtggtgtacgacgacagcgatagacctagcggcatccccgagagattcagcggcagcaattccggcaataccgccacactgaccatcagcagagtggaagctggcgacgaggccgtgtactactgccaagtgtgggacagcagcagcgatcacgtggtgtttggcggcggaacaaagctgacagtgctt

SEQ ID NO: 245 - DNA, 324 bp, Artificial Sequence
  Synthetic Polynucloetide
agctacgtgctgacacagcctccatccgtgtctgtggctccaggacagaccgccagaatcacatgcggcggcaacaacatcggcagcaagaccgtgcactggtatcagcagccacctggacaggctccagtggtggtggtgtacgacgacagcgatagacctagcggcatccccgagagattcagcggcagcaattccggcaataccgccacactgaccatcagcagagtggaagctggcgacgaggccgtgtactactgccaagtgtgggacagcagcagcgatcacgtggtgtttggcggcggaacaaagctgacagtgctt

SEQ ID NO: 246 - DNA, 324 bp, Artificial Sequence; identical to SEQ ID NO: 242
  Synthetic Polynucloetide

SEQ ID NO: 247 - DNA, 324 bp, Artificial Sequence; identical to SEQ ID NO: 243
  Synthetic Polynucloetide

SEQ ID NO: 248 - DNA, 324 bp, Artificial Sequence; identical to SEQ ID NO: 244
  Synthetic Polynucloetide

SEQ ID NO: 249 - DNA, 321 bp, Artificial Sequence
  Synthetic Polynucloetide
gagatcgtgctgacacagtctcccgccacactgtcactgtctccaggcgaaagagccacactgagctgtagagccagccagagcgtgtcctcttacctggcctggtatcagcagaagcctggacaggctccccggctgctgatctacgatgccagcaatagagccacaggcatccccgccagattttctggctctggcagcggcaccgatttcaccctgaccataagcagcctggaacctgaggacttcgccgtgtactactgccagcagagaagcaactggcccctgacctttggacagggcaccaaggtggaaatcaaa

SEQ ID NO: 250 - DNA, 339 bp, Artificial Sequence
  Synthetic Polynucloetide
gacatcgtgatgacacagagccctgatagcctggccgtgtctctgggagagagagccaccatcaactgcaagagcagccagagcgtgctgtactccagcaacaacaagaactacctggcctggtatcagcagaagcccggccagcctcctaagctgctgatctactgggccagcaccagagaaagcggcgtgcccgatagattttctggcagcggctctggcaccgacttcaccctgacaattagcagcctccaggccgaggatgtggccgtgtactactgccagcagtattacagcacccctctgaccttcggccagggcaccaaggtggaaatcaaa

SEQ ID NO: 251 - DNA, 324 bp, Artificial Sequence
  Synthetic Polynucloetide
gacatccagatgacacagagccctagcagcctgtctgccagcgtgggagacagagtgaccatcacctgtagagccagccagagcatcaacaagtggctgaactggtatcagcagaagcccggcaaggcccctaagctgctgatctatgccgccagctctctccagagcggagtgcctagcagattttctggcagcggctccggcaccgatttcaccctgacaatatccagcctccagcctgaggacttcgccacctactactgccagcaggactacaacttcccctacaccttcggccagggcaccaaggtggaaatcaaaaga

SEQ ID NO: 252 - DNA, 318 bp, Artificial Sequence
  Synthetic Polynucloetide
cagatcgtgctgtctcagtctcctgccatcctgagtgcctctccaggcgagaaagtgaccatgacctgtagagccagcagcagcgtgtcctacatccactggttccagcagaagcctggcagcagccctaagccttggatctacgccaccagcaatctggcctctggcgtgccagtcagattttctggcagcggctctggcaccagctacagcctgacaatcagcagagtggaagccgaggatgccgccacctactactgtcagcagtggacctccaatcctcctacctttggcggaggcaccaagctggaaatcaaa

SEQ ID NO: 253 - DNA, 321 bp, Artificial Sequence
  Synthetic Polynucloetide
gatattcagctgacccagagccacaagtttctgagcaccagcgtgggcgacagagtgtccatcacctgtaaagccagccaggacgtgtacaacgccgtggcctggtatcagcagaagcctggacagagccccaagctgctgatctacagcgccagcagcagatacacaggcgtgcccagcagattcaccggctctggatctggccccgacttcacctttaccatcagctctgtgcaggccgaggacctggccgtgtacttttgtcagcagcacttcagaacccctttcaccttcggcagcggcaccaagctggaaatcaag

SEQ ID NO: 254 - DNA, 318 bp, Artificial Sequence
  Synthetic Polynucloetide
gacatccagctgacacagagcccttctagcctgtctgccagcgtgggcgacagagtgaccatcacctgtaaagccagccaggacgtgggcacaagcgtggcatggtatcagcagaagcctggcaaggcccctaagctgctgatctactggaccagcaccagacacacaggcgtgcccagcagattttctggcagcggctctggcaccgacttcaccttcacaatatccagcctccagcctgaggacattgccacctactactgccagcagtacagcctgtaccgctctttcggccagggcaccaaggtggaaatcaaa

SEQ ID NO: 255 - DNA, 315 bp, Artificial Sequence
  Synthetic Polynucloetide
gacatccagctgacacagagcccttctagcctgtctgccagcgtgggcgacagagtgaccatcacctgtagcacaagcagcagcgtgtcctacatgcactggtatcagcagaagcccggcaaggcccctaagctgctgatctacagcaccagcaatctggcctctggcgtgcccagcagattttctggctctggcagcggcaccgacttcaccttcacaatatccagcctccagcctgaggacattgccacctactactgccaccagtggtctagctaccccacattcggccagggcaccaaggtggaaatcaaa

SEQ ID NO: 256 - DNA, 327 bp, Artificial Sequence
  Synthetic Polynucloetide
gacatccagatgacacagagccctagcagcctgtctgccagcgtgggagacagagtgaccatcacctgtagagccagccaggacgtgaacacagccgtggcttggtatcagcagaagcctggcaaggcccctaagctgctgatctacagcgccagctttctgtacagcggcgtgcccagcagattcagcggaagcagaagcggcaccgacttcaccctgacaatatccagcctccagcctgaggacttcgccacctactactgccagcaggcttacaccacacctccaacattcggccagggcaccaaggtggaaatcaagagaaca

SEQ ID NO: 257 - DNA, 333 bp, Artificial Sequence
  Synthetic Polynucloetide
gagatcgtgctgacacagagccctggcacactgtcactgtctccaggcgaaagagccacactgagctgtagagccagccagagcgtgtccagcgattacctggcttggtatcagcagaagcccggacaggctcccagactgctgatctacggtgcctctagcagagccacaggcatccccgatagattttctggcagcggctccggcaccgacttcaccctgacaattagcagactgcccgaggacttcgccgtgtactactgccagcagtacgtgtcctactggacctttggcggaggcaccaaggtggaaatcaaaagaacagtggctgcc

SEQ ID NO: 258 - DNA, 327 bp, Artificial Sequence
  Synthetic Polynucloetide
agctacgagctgatccagcctccttctgccgctgtgacactgggcaataccgtgtctctgacctgtgtgggagatgagctgcccaagagatacgcctactggtatcagcagaagcccgaccagagcatcgtgcgcgtgatctacgaagatagcgtgcggcctcctggcatcagcgatagattttctggcagcagcagcggcaccaccgccacactgacaattagagatgcccagaacgaggacgaggccgactactactgtcagagcacctacggcgacgacaagctgtacatctttggcggaggcaccaagctgacagtgcttgga

SEQ ID NO: 259 - DNA, 327 bp, Artificial Sequence
  Synthetic Polynucloetide
agcgtgatcgagctgacacagagccccaagttcatgagcaccagcgtgggcgacagagtgaacgtgacatacaaggccagccagaacgtgggcaccaacgtggcatggttccagcagaagcctggacagagccctaaggtgctgatctacagcgccagctacagatacagcggcgtgcccgatagattcacaggctctggcagcggcaccgacttcaccctgacaatcagcaacgtgcagagcgaggacctggccgagtatttctgccagcagtaccacacataccctctgacctttggcggaggcaccaagctggaaatcaagaga

SEQ ID NO: 260 - DNA, 324 bp, Artificial Sequence
  Synthetic Polynucloetide
gacatccagatgacacagagccctagcagcgtgtccgcctctgtgggagacagagtgaccatcacctgtagagccagccagagcgtgtccagctacctgaactggtatcagcagaagcccggcaaggcccctaagctgctgatctatgctgccagctctctgcagtctggcgtgcccagcagattttctggcagcggctctggcaccgacttcaccctgaccatatctagcctgcagcctgaggacttcgccacctactactgccagcagagctacagcaccccttggacctttggacagggcaccaagctggaaatcaagaga

SEQ ID NO: 261 - DNA, 333 bp, Artificial Sequence
  Synthetic Polynucloetide
cagtctgctctgacccagcctagatccgtgtctggctctcctggacagagcgtgaccatcagctgtaccggcacctcttctgacgtgggcagctacaactacgtgtcctggtatcagcagagccccggcaaggcccctaagctgatgatctacgacgtgtccaacagacccagcggcgtgtccaatagattctccggcagcaagagcggcaacaccgccagcctgacaatctctggactccagtctgaggacgaggccgactactactgtaccagctacggcagctacgacatccccgtgatttttggcggaggcaccaaggtggaaatcaaa

SEQ ID NO: 262 - DNA, 324 bp, Artificial Sequence
  Synthetic Polynucloetide
gacgtggtcatgacacagagcccttctagcctgtctgccagcgtgggcgacagagtgaccatcacctgtaaagccagccagagcgtgtccagctacctgaactggtatcagcagaagcccggcaaggcccctaagctgctgatctatgctgccagcagcctggaaacaggcgtgcccagcagattttctggcagcggctctggcaccgacttcaccctgacaatatccagcctccagcctgaggacttcgccacctactactgtcagcagagctacagcaccccttggacctttggccagggcaccaaggtggaaatcaagaga

SEQ ID NO: 263 - DNA, 324 bp, Artificial Sequence
  Synthetic Polynucloetide
gacatccagatgacacagagccctagcagcgtgtccgcctctgtgggagacagagtgaccatcacctgtagagccagccagagcatcagcagctacctgaactggtatcagcagaagcccggcaaggcccctaaactgctgatctatgccgccagctctctccagagcggagtgcctagcagattttctggcagcggctccggcaccgatttcaccctgacaatatccagcctccagcctgaggacttcgccacctactactgccagcagagctacagcaccccttggacctttggacagggcaccaaggtggaaatcaagaga

SEQ ID NO: 264 - DNA, 321 bp, Artificial Sequence
  Synthetic Polynucloetide
gacacagtgctgacacagtctccagctctggctgtgtctcctggcgagagagtgaccatctcttgcaaggccagcgagagcgtgtccaccagaatgcactggtacagacagaagcccggccagcagccaaagctgctgatctacaagaccagcaacctggcctctggcgtgccagccagattttctggctctggcagcggcaccgacttcaccctgaccattgatcccgtggaagccgacgacaccgccacctacttttgtcagcagtcctggaacggccctctgacatttggaagcggcaccaagctggaaatcaagaga

SEQ ID NO: 265 - DNA, 342 bp, Artificial Sequence
  Synthetic Polynucloetide
gacctggtcatgacacagagcccttttagcctggccgtgtccgagggcgagatggtcacaatcaagtgcaagagcagccagagcctgctgagcagcagacaccagaagaactttctggcctggtacagacagaagcccggacagtctcccaagctgctgatctaccacgccagcacaagacagagcggcgtgcccgatagattcatcggctctggcagcggcaccgacttcaccctgacaatctctgatgtgcaggccgaggacctggccgactactattgtctccagcactacacaagcccctacacctttggagccggcaccaagctggaactgaaaaga

SEQ ID NO: 266 - DNA, 327 bp, Artificial Sequence
  Synthetic Polynucloetide
gacatccagctgactcagagccctagctttctgagcgccagcgtgggcgacagagtgaccattacatgtagagccagccaggacatcagcagctacctggcctggtatcagcagaagcctggcaacgcccctaaactgctgatctacgccgccagcctgctgcaatctggcgtgccaagcagattcagcgcctttggcagcggcaccgagttcaccctgacaatatctagcctccagccagaggacttcgccacctactactgccagcacctgaagtcttaccctctgttcaccttcggacccggcaccaaggtggacatcaaaaga

SEQ ID NO: 267 - DNA, 321 bp, Artificial Sequence
  Synthetic Polynucloetide
gaactccagatgacacagagccctagcagcctgtctgccagcgtgggagacagagtggctatcacctgtagagccagccagagcatcagcagccacctgaactggtatcagcagaagcctggcaaggcccctaagctgctgatctatgccgccagctctctccagagcggagtgcctagcagattttctggcagcggctccggcaccgatttcaccctgacaatatccagcctccagcctgaggacttcgccacctactactgccagcagagctacagcaccccttacacattcggccagggcaccaagctggaaatcaaa

SEQ ID NO: 268 - DNA, 324 bp, Artificial Sequence
  Synthetic Polynucloetide
gacatcgtgatgacccagagccacaagttcatgagcaccagcgtgggcgacagagtgtccatcatctgcaaggccagccaggatgtgggcacagccgtggattggtatcagcagaagcctggacagagccccaagctgctgatctactgggccagcacaagacacaccggcgtgcccgatagattcacaggctctggcagcggcaccgatttcaccctggccatcacaaacgtgcagagcgaggacctggccgactacttctgccagcagtacaacagctaccctctgacctttggagccggcaccaagctggaaatcaagaga

SEQ ID NO: 269 - DNA, 324 bp, Artificial Sequence
  Synthetic Polynucloetide
gacatccagatgacacagagccctagcagcctgtctgccagcgtgggagacagagtgaccatcacatgcaaggccagccaggatgtgggcacagccgtggattggtatcagcagaagcctggcaaggcccctaagctgctgatctactgggccagcacaagacacacaggcgtgcccagcagattttctggcagcggctctggcaccgacttcaccctgacaatatccagcctccagcctgaggacttcgccacctactactgccagcagtacaacagctaccctctgaccttcggccagggcaccaaggtggaaatcaaaaga

SEQ ID NO: 270 - DNA, 330 bp, Artificial Sequence
  Synthetic Polynucloetide
gacatccagatgacacagagccctagcagcctgtctgccagcgtgggagacagagtgaccatcacatgcaaggccagccaggatgtgggcacagccgtggattggtatcagcagaagcctggcaaggcccctaagctgctgatctcttgggccagcacaagacacacaggcgtgcccagcagattttctggcagcggctctggcaccgacttcaccctgacaatatccagcctccagcctgaggacttcgccacctacttttgccagcagtacaacagctaccctctgaccttcggccagggcaccaaggtggaaatcaagagaacagtt

SEQ ID NO: 271 - DNA, 324 bp, Artificial Sequence; identical to SEQ ID NO: 269
  Synthetic Polynucloetide

SEQ ID NO: 272 - DNA, 324 bp, Artificial Sequence; identical to SEQ ID NO: 268
  Synthetic Polynucloetide

SEQ ID NO: 273 - DNA, 321 bp, Artificial Sequence
  Synthetic Polynucloetide
gagatcgtgctgacacagtctcccgccacactgtcactgtctccaggcgaaagagccacactgagctgtagcgccaccagcagcgtgtcctacatccactggtatcagcagaagcccggacaggcccctagactgctgatctacagcaccagcaatctggcctctggcatccccgccagattttctggctctggaagcggcaccgacttcaccctgacaatcggcagactggaacccgaggacttcgccgtgtactactgccagcagagaagcagcagccccttcacctttggacagggcaccaaggtggaaatcaagaga

SEQ ID NO: 274 - DNA, 318 bp, Artificial Sequence
  Synthetic Polynucloetide
cagatcgtgctgacacagagccctgccatcatgagtgcctctccaggcgaggaagtgaccctgacctgtagcgccaccagcagcgtgtcctacatccactggtttcagcagaggcccggcacaagccctaagctgtggatctacagcaccagcaatctggcctctggcgtgccagtgcggtttagcggatctggctacggcaccagctacagcctgaccatcagcagaatggaagccgaggatgccgccacctactactgccagcagagaagcagcagccccttcacatttggcagcggcaccaagctggaaatcaaa

SEQ ID NO: 275 - DNA, 339 bp, Artificial Sequence
  Synthetic Polynucloetide
gacatcgtgctgacacagagccctgcttctctggccgtttctcctggacagagggccaccatcacatgcagagccagcaagagcgtgtccaccagcggctacagctacatgcactggtatcagcagaagcccggccagcctcctaagctgctgatctacctggcctccaacctggaaagcggagtgcctgccagattttctggcagcggctctggcaccgacttcaccctgacaatcaaccccgtggaagccaacgacaccgccaactactactgccagcacagcagagagctgcccttcacatttggcggaggcaccaaggtggaaatcaagagaaca

SEQ ID NO: 276 - DNA, 324 bp, Artificial Sequence
  Synthetic Polynucloetide
gacatccagatgacacagagccctagcagcctgtccgtgtccgtgggagacagagtgaccatcacatgcaaggccagccagaacgtgcggacagtggtggcttggtatcagcagaagcctggactggcccctaagacactgatctacctggcctccaacagacacaccggcgtgccaagcagattttctggcagcggctctggcaccgacttcaccttcacaatatccagcctccagcctgaggacattgccacctacttttgccagcagcactggtcttaccctctgacctttggacagggcaccaaggtggaagtgaagaga

SEQ ID NO: 277 - DNA, 339 bp, Artificial Sequence
  Synthetic Polynucloetide
gacattcagatgacacagagccctagcagcctgagcgcctctgtgggagacagagtgaccatcacatgcaagagcagccagagcctgctgtactccagcaatcagaagaactacctggcctggttccagcagaagcctggcaaggctcctaagctgctgatctactgggccagcaccagagaaagcggcgtgccaagcagattttctggcagcggctctggcaccgacttcaccctgacaatatccagcctccagcctgaggacttcgccacctacttttgccaccagtacctgagcagctacacattcggacagggcaccaaggtggaaatcaagcgg

SEQ ID NO: 278 - DNA, 339 bp, Artificial Sequence; identical to SEQ ID NO: 193
  Synthetic Polynucloetide

SEQ ID NO: 279 - DNA, 339 bp, Artificial Sequence; identical to SEQ ID NO: 277
  Synthetic Polynucloetide

SEQ ID NO: 280 - DNA, 324 bp, Artificial Sequence; identical to SEQ ID NO: 194
  Synthetic Polynucloetide

SEQ ID NO: 281 - DNA, 324 bp, Artificial Sequence
  Synthetic Polynucloetide
gacatccagatgacacagagccctagcagcctgtctgccagcgtgggagacagagtgaccatcacctgtagagccagccaggacatcagcagctacctgaactggtatcagcagaagcccggcaaggcccctaagctgctgatctactacaccagcagactgcacagcggcgtgcccagcagattttctggctctggcagcggcaccgacttcaccctgacaatatctagcctccagcctgaggacttcgccacctactattgccagcagggcaacaccctgccttacacatttggacagggcaccaaggtggaaatcaagaga

SEQ ID NO: 282 - DNA, 324 bp, Artificial Sequence
  Synthetic Polynucloetide
gacatccagatgacacagagccctagcagcctgtctgccagcgtgggagacagagtgaccatcacctgtagagccagccaggacatcagcaactacctgaactggtatcagcagaagcccggcaaggcccctaagctgctgatctactacaccagcagactgcacagcggcgtgcccagcagattttctggctctggcagcggcaccgacttcaccctgacaatatctagcctccagcctgaggacttcgccacctactattgccagcagggcaacaccctgccttggacatttggacagggcaccaaggtggaaatcaagaga

SEQ ID NO: 283-287 - skipped (5 entries)

SEQ ID NO: 288 - DNA, 375 bp, Artificial Sequence
  Synthetic Polynucloetide
gggggaggcggctctcaggtgcaactccagcagtctggcgctgagcttgtgaagcctggggccagcgtgaagattagctgcaaggccagcggctacgccttcagcagctactggatgaactgggtcaagcagcggcctggcaagggcctggaatggatcggccaaatctaccccggcgacggcgacaccacctacaacggcaagttcaagggcaaggccaccctgacagccgacaagagcagcagcaccgtgtacatgcaactgaacagcctgaccagcgaggacagcgccgtgtacttctgcgtgcggtactactacggcagctccggctacttcgactattggggccagggcaccacactgaccgtgtcctct

SEQ ID NO: 289 - DNA, 360 bp, Artificial Sequence
  Synthetic Polynucloetide
gctctccagctccagcagtctggcgcagaactcgtgcggcctggcgcttctgtgaccctgagctgtaaagccagcggctacaccttcaccgactacgagatgcactgggtcaagcagacccctgtgcacggcctggaatggatcggagccatcgaccctgagacaggcggcaccgcctacaaccagaagttcgagggcaaggccatcctgaccgccgacaagagcagcagcacagcctacatggaactgcggagcctgacctccgaggacagccccgtgtactactgtgccagacggcggtactacggcagcagctccttcgactattggggccagggcaccaccctgaccgtgtctagt

SEQ ID NO: 290 - DNA, 351 bp, Artificial Sequence
  Synthetic Polynucloetide
caggtgcagctggtgcagtctggccccgaagtgaagaaacccggcgagtccgtgaagatcagctgcaaggccagcggctacaccttccggcactacagcatgaactgggtcaagcaggccccaggccagggcctgaagtggatgggcagaatcaacaccgagagcggcgtgcccatctacgccgacgacttcaagggccggttcagcttcaccgtggacaccagcgccagcaccgcctacctggaaatctccagcctgaccagcgaggataccgccgtgtatttctgctccaacgactacctgtacagcctggatttctggggccagggaaccaccctgacagtgtcctct

SEQ ID NO: 291 - DNA, 363 bp, Artificial Sequence
  Synthetic Polynucloetide
caggtgcagctggtccagagcggcgccgaagtgaagaagcccggcagctccgtgaaagtgagctgcaaggccagcggcggcaccttcagcaactactggatgcactgggtgaggcaggcccccggacagggcctggagtggatgggcgccacctacaggggccacagcgacacctactacaaccagaagttcaagggccgggtgaccatcaccgccgacaagagcaccagcaccgcctacatggaactgagcagcctcaggagcgaggacaccgctgtgtattactgcgccaggggcgccatctacgacggctacgacgtgctggacaactggggccagggcacactggtgaccgtgtccagc

SEQ ID NO: 292 - DNA, 360 bp, Artificial Sequence
  Synthetic Polynucloetide
gaagtgcagctggtgcagtctggggccgaagtgaagaagcctggcgagagcctgaagatcagctgcaagggcagcggctacagcttcaccgactactacatgaagtgggccagacagatgcccggcaagggcctggaatggatgggcgacatcatccccagcaacggggccaccttctacaaccagaaattcaagggccaagtgaccatctccgccgacaagagcatcagcaccacctacctccagtggtccagcctgaaggccagcgacaccgccatgtactattgcgccagaagccatctgctgcgggccagttggttcgcctattggggccagggaacaatggtcacagtgtccagc

SEQ ID NO: 293 - DNA, 366 bp, Artificial Sequence
  Synthetic Polynucloetide
caggtgcaactccagcagtccggaagcgagcttatgatgccaggggcatcagtgaagatcagctgcaaggctactggctacaccttctctaattactggatagagtgggttaaacaaaggccagggcacggcctggaatggatcggcgagatcctgcctgggacaggccgaaccatttataacgagaagttcaaaggcaaggctactttcaccgcagatataagctctaatacagtgcaaatgcagctctcttccctgacaagtgaggatagtgccgtgtattattgcgcacgaagagattactatggaaatttttattacgctatggattattggggtcaaggaacaagtgtgaccgttagcagc

SEQ ID NO: 294 - DNA, 354 bp, Artificial Sequence
  Synthetic Polynucloetide
gaagtgcaactccagcagagcggccctgagcttgtgaagcctggcgcttccgtgaagatgagctgcaaggccagcggctacaccttcaccgactactacatgaagtggatgaagcagagccacggcaagtccctggaatggatcggcgacatcaaccccaacaacggcggcaccacctacaaccagaagttcaagggcaaggccaccctgaccgtggacaagagcagcagcaccgcctacatgcaactgaacagcctgaccagcgaggacagcgccgtgtactactgcgccagagactacggctacggctatttcgactactggggccagggcacaaccctgacagtgtcctct

SEQ ID NO: 295 - DNA, 360 bp, Artificial Sequence
  Synthetic Polynucloetide
caggtgcagctccaggaatctggccctggcctcgtgaagcctagccagaccctgagcctgacctgtaccgtgtctggcggcagcatcagcacaagcggcatgggcgtgggctggatcagacagcaccctggcaagggcctggaatggatcggccacatttggtgggacgacgacaagcggtacaaccccgccctgaagtccagagtgaccatcagcgtggacaccagcaagaaccagttcagcctgaagctgagcagcgtgacagccgccgataccgccgtgtattattgcgcccggatggaactgtggtcctactacttcgactactggggccagggaaccctcgtgaccgtgtctagt

SEQ ID NO: 296 - DNA, 360 bp, Artificial Sequence
  Synthetic Polynucloetide
gaggtgaaactgcaggagtcaggacctggcctggtggcgccctcacagagcctgtccgtcacatgcactgtctcaggggtctcattacccgactatggtgtaagctggattcgccagcctccacgaaagggtctggagtggctgggagtaatatggggtagtgaaaccacatactataattcagctctcaaatccagactgaccatcatcaaggacaactccaagagccaagttttcttaaaaatgaacagtctgcaaactgatgacacagccatttactactgtgccaaacattattactacggtggtagctatgctatggactactggggtcaaggaacctcagtcaccgtctcctca

SEQ ID NO: 297 - DNA, 360 bp, Artificial Sequence
  Synthetic Polynucloetide
caggtgcaactccaggaatctggccctggcctcgtgaagcccagcgagacactgagcctgacctgtaccgtgtccggcgtgtccctgcctgactatggcgtgtcctggatcagacagccccctggcaagggcctggaatggatcggagtgatttggggcagcgaaaccacctactacaacagctccctgaagtccagagtgaccatctccaaggacaactccaagaaccaggtgtccctgaagctgagcagcgtgacagccgccgacaccgccgtgtattactgcgccaagcactactactacggcggcagctacgctatggactactggggccagggaaccctcgtgaccgtgtctagt

SEQ ID NO: 298 - DNA, 366 bp, Artificial Sequence
  Synthetic Polynucloetide
gaagtgcagctggtggaatcaggcggcggactggtgcagcctggcagaagcctgagactgagctgtgccgccagcggcttcaccttcaacgactacgccatgcactgggtgcgccaggcccctggaaaaggactggaatgggtgtccacaatcagctggaacagcggcagcatcggctacgccgatagcgtgaagggccggttcaccatcagccgggacaacgccaagaagtccctgtacctccagatgaacagcctgcgggccgaggacacagccctgtactattgcgccaaggacatccagtacggcaactactactacggcatggacgtgtggggccagggaaccaccgtgaccgtgtcatct

SEQ ID NO: 299 - DNA, 357 bp, Artificial Sequence
  Synthetic Polynucloetide
caggtgcaactggtgcagagcggagccgaagtgaaaaagcccggcagcagcgtgaaggtgtcctgcaaggccagcggctacgccttcagctactcctggatcaactgggtgcgccaggcccctggacagggcctggaatggatgggcagaatcttccccggcgacggcgacaccgactacaacggcaagttcaagggcagagtgaccatcaccgccgacaagagcaccagcaccgcctacatggaactgagcagcctgcggagcgaggataccgccgtgtactattgtgccagaaacgtgttcgacggctactggctggtgtactggggccagggaacacttgtgaccgtgtccagc

SEQ ID NO: 300 - DNA, 360 bp, Artificial Sequence
  Synthetic Polynucloetide
gaagtgcaactggtggaaagcggaggcggcctggtgcagcctggcggatctctgagactgagctgtgccgccagcggctacgagttcagccggtcctggatgaactgggtgcgccaggcccctggcaagggactggaatgggtgggaagaatctaccccggcgacggcgacaccaactacagcggcaagttcaagggccggttcaccatcagcgccgacaccagcaagaacaccgcctacctccagatgaacagcctgcgggccgaggataccgccgtgtactactgtgccagagatggcagctcctgggactggtacttcgacgtgtggggacagggaacccttgtgaccgtgtccagc

SEQ ID NO: 301 - DNA, 351 bp, Artificial Sequence
  Synthetic Polynucloetide
caggtgcaactggtgcagagcggagccgaagtgaagaaacccggcagcagcgtgaaggtgtcctgcaaggcttccggcggcaccttcagcagctacgccatttcttgggtgcgccaggctcctggacagggcctggaatggatgggcggcatcatccctatcctgggcaccgccaactacgcccagaaattccagggcagagtgaccatcaccgccgacgagagcaccagcaccgcctacatggaactgagcagcctgcggagcgaggacacagccgtgtattattgcgccagatggggcggaggggccttcgacatttggggccagggaacaatggtcaccgtgtccagc

SEQ ID NO: 302 - DNA, 336 bp, Artificial Sequence
  Synthetic Polynucloetide
caggtgcaactgcagcagtggggagccggactgctgaagcctagcgagacactgagcctgacctgcgccgtgtacggcggcagcttcagcgcctactattggagctggatcagacagccccctggcaagggcctggaatggatcggcgacatcaatcacggcggaggcaccaactacaaccccagcctgaagtcccgcgtgaccatctccgtggacaccagcaagaaccagttctccctgaagctgaacagcgtgacagccgccgacacagccgtgtactactgtgccagcctgaccgcctattggggccagggatctcttgtgaccgtgtccagc

SEQ ID NO: 303 - DNA, 351 bp, Artificial Sequence
  Synthetic Polynucloetide
caggtgcaactggtgcagtccggcgctgaagtgaagaaacctggggccagcgtgaaggtgtcctgcaaggtgtccggctacacctttaccgactactacattacctgggtgcgccaggcccctggacaggccctggaatggatgggctggatctaccccggcagcggcaacaccaagtacagccagaagttccagggcagattcgtgttcagcgtggacaccagcgccagcaccgcctacctgcaactgtctagcctgaaggccgaagataccgccgtgtactactgcgccaactacggcaactattggttcgcctattggggccagggaacccttgtgaccgtgtcctct

SEQ ID NO: 304 - DNA, 357 bp, Artificial Sequence
  Synthetic Polynucloetide
gaagtgcaactggtgcagtctggcggagggctggtgcatcctgggggaagcctgagactgagctgtgccggctctggcttcgccttcagcagcagcaccatgcactggatcagacaggcccctggcaagggcctggaatggatcagcctgatcggaagcggagggggcatctactacggcgacagcgtgaagggccggttcaccatcagccgggacaacgccaagaacagcctgtacctccagatgaactccctgcgggccgaggacatggccgtgtactattgtgtgcggggctacttcgactgggtggactacttcgattactggggccagggcaccctcgtgaccgtgtcatct

SEQ ID NO: 305 - DNA, 360 bp, Artificial Sequence
  Synthetic Polynucloetide
gaagtgcaactggtggaatcaggcggcggactggtgcagcctggcggatctctgagactgagctgtgccgccagcggcttcaccttcagcagctacggaatgcactgggtgcgccaggcccctggcaaaggactggaatgggtggcctacatcaccaccagaagcagcaccatctactacgccgacagcgtgaagggccggttcaccatctccagagacaacgccaagaacagcctgtacctccagatgaactccctgcgggccgaggacaccgccgtgtactattgcaccagagagcccctgaccggctactacgctatggactattggggccagggcaccagcgtgaccgtgtctagt

SEQ ID NO: 306 - DNA, 348 bp, Artificial Sequence
  Synthetic Polynucloetide
gatgtgcaactccaggaaagcggccctggccttgtgaagcctagccagagcctgtccctgacctgtaccgtgaccggcttcagcatcaccagcgactactcttggaactggatcagacagttccctggcaacaaactggaatggatgggctacatcagctactccggccacacctcctacaaccccagcctggaaagccggatctccatcaccagagacaccagcaagaaccagttcttcttgcaactgaacagcgtgaccaccgaggataccgccacatattactgtaccagaggcaactgggacgtggtgtactggggccagggcacacttgtgaccgtgtctgct

SEQ ID NO: 307 - DNA, 354 bp, Artificial Sequence
  Synthetic Polynucloetide
caggtgcaactgcagcagcctggcgctgaggtcgtgaagccaggcgcttccgtgaagatgtcctgcaaggccagcggctacaccttcaccagctactacatccactggatcaagcagacccctggacagggcctggaatgggtgggagtgatctaccccggcaacgacgacatcagctacaaccagaagttccagggcaaggccaccctgaccgccgacaagtctagcaccaccgcctacatgcaactgtccagcctgaccagcgaggacagcgccgtgtactactgcgccagagaagtgcggctgcggtacttcgatgtgtggggccagggaaccaccgtgaccgtgtcatct

SEQ ID NO: 308 - DNA, 366 bp, Artificial Sequence
  Synthetic Polynucloetide
caggtgcagctggtgcagagcggtgccgaagtgaagaaaccaggtgcatccgttaaagtttcatgtaaggctagtggatataccttcaccaattacggaatgaactgggtgaaacaggcccctggccagggactgaagtggatggggtggattaacacctacaccggggagccgacttatgcagacgactttaaggggcgggtcacgatgacctccgacacctccaccagtaccgcctacctggagctgcacaaccttaggtcagacgataccgccgtgtattactgtgcccgatggtcttggtccgacggatactatgtctacttcgactattggggccaggggaccacagttaccgtgtcctct

SEQ ID NO: 309 - DNA, 366 bp, Artificial Sequence
  Synthetic Polynucloetide
cagatccaactggtgcagagcggcagcgagctgaagaaacctggggccagcgtgaaggtgtcctgcaaggccagcggctacacctttaccaactacggcatgaactgggtgcgccaggcccctggacagggcctgaaatggatgggctggatcaacaccaacaccggcgagcctaagtacgccgaagagttcaagggcagattcgccctgagcctggacaccagcgtgtccacagcctacctccagatcaacagcctgaaggccgaggataccgccgtgtacttctgcgccagaggctacggcaactacgccagaggggcttggctggcctattggggccagggaacactcgtgaccgtgtcctct

SEQ ID NO: 310 - DNA, 363 bp, Artificial Sequence
  Synthetic Polynucloetide
caggtgcagctgaaagagagcggccctgagctggaaaagcctggggccagcgtgaagattagctgcaaggccagcggctacagcttcaccgcctacagcatgaactgggtcaagcagaacaacggcatgagcctggaatggatcggcagcatcgacccctactacggcgacaccaaatacgcccagaagttcaagggcaaggccaccctgaccgtggataaggccagcagcaccgcctacctccagctgaagtctctgaccagcgaggacagcgccgtgtactactgcgccagacggatgattaccaccggcgactggtacttcgacgtgtggggagccggaaccaccgtgacagtgtctagc

SEQ ID NO: 311 - DNA, 363 bp, Artificial Sequence; identical to SEQ ID NO: 310
  Synthetic Polynucloetide

SEQ ID NO: 312 - DNA, 354 bp, Artificial Sequence
  Synthetic Polynucloetide
caggtgcagctggtgcagtctggggccgaagtgaagaaacctggggccagcgtgaaggtgtcctgcaaggccagcggatacacctttaccaactacggcatgaactgggtgcgccaggcccctggacagggcctggaatggatgggctggatcaacacctacaccggcgagcccacatacgccgacgccttcaagggcagattcgccttcagcctggacaccagcacctccaccgcctacctccagatcaacagcctgcggagcgacgacaccgccgtgtattattgcgccagagattacggcgactacgggatggactattggggccagggaaccaccgtgaccgtgtcctct

SEQ ID NO: 313 - DNA, 339 bp, Artificial Sequence
  Synthetic Polynucloetide
caggtgcaactgcagcagcctggcgctgaacttgtgcggccaggcgcctctgtgaagctgagctgtaaagccagcggctacaccttcaccagctactggatgaactgggtcaagcagcgcccaggccagggcctggaatggatcggaatgatcgaccccagcgacagcgagacacactacaaccacatcttcaaggacaaggccaccctgaccgtggacaagtccagcagcacagcctacctgcaactgtccagcctgaccagcgaggacagcgccgtgtactactgcgcccggaacctgtatctgtggggccagggaacaagcgtgaccgtgtctagc

SEQ ID NO: 314 - DNA, 351 bp, Artificial Sequence
  Synthetic Polynucloetide
gaagtccaacttgtggagtctggagggggcctggtgcagcccggcggctctctcagactgtcttgtgcggcaagcggctacaccttcagctcttactggatagaatgggtgaggcaggcacctggaaagggactggagtggattggagagattctgccaggagggggagatacaaattacaatgaaatcttcaaggggcgggccaccttttcagcggataccagcaagaatacagcttacctgcagatgaatagcctccgggcagaagataccgctgtttattattgcacgagacgggtgccaataagactggactattgggggcaagggactcttgtcaccgtcagttca

SEQ ID NO: 315 - DNA, 369 bp, Artificial Sequence
  Synthetic Polynucloetide
gaagtgcaactccagcagagcgtggccgagcttgtgaagcctggcgcttccgtgaagatgtcctgcaaggtgtccggctacaccctgacagaccacaccatccactggatgaagcagcggcctgagcagggcctggaatggatcggctacatctaccccagggacggcatcaccggctacaacgagaagttcaagggcaaggccacactgaccgccgacaccagcagcagcacagcctacatgcaactgaacagcctgaccagcgaggacagcgccgtgtacttctgtgccagatggggctacagctacagaaactacgcctactactacgactactggggccagggcacaaccctgaccgtgtctagt

SEQ ID NO: 316 - DNA, 375 bp, Artificial Sequence
  Synthetic Polynucloetide
caggtgcaactccaggaatctggccccggactggctaagcccagcgagacactgagcctgacctgtaccgtgtccggcgacagcatcaccagctactactggtcctggatcagacagccccctggcaagggcctggaatggatcggctacatctactacagcggcagcaccaactacaaccccagcctgaagtccagagtgaccatcagcgtggacaccagcaagaaccagttctccctgaagctgagcagcgtgacagccgccgacaccgccgtgtattattgcgccagagatcagcggagaatcgccgctgccggcacccacttttacggcatggatgtgtggggccagggcaccaccgtgaccgtgtcatct

SEQ ID NO: 317 - DNA, 348 bp, Artificial Sequence
  Synthetic Polynucloetide
caggtgcaactgctggaatctggcggcggactggtgcagcctggcggatctctgagactgagctgtgccgccagcggcttcaccttcagcagctacgccatgagctgggtgcgccaggcccctggaaaaggactggaatgggtgtccgtgatccggtccagcggcagcagcacctattacgccgatagcgtgaagggccggttcaccatcagccgggacaacagcaagaacaccctgtacctccagatgaacagcctgcgggccgaggacaccgccgtgtactattgtgctaggggaggcggctacttcgactactggggccagggaacactcgtgaccgtgtcctct

SEQ ID NO: 318 - DNA, 354 bp, Artificial Sequence
  Synthetic Polynucloetide
caggtgcaactgctggaatctggcggcggactggtgcagcctggcggatctctgagactgagctgtgccgccagcggcttcaccttcagcagccacggaatgcactgggtgcgccaggcccctggaaagggactggaatgggtgtccgtgatctccggcagcggcagcaataccggctacgccgatagcgtgaagggccggttcaccatcagccgggacaacagcaagaacaccctgtacctccagatgaacagcctgcgggccgaggacaccgccgtgtactattgtgccagacagtggggcagctacgccttcgattcttggggccagggcaccctcgtgaccgtgtcatct

SEQ ID NO: 319 - DNA, 354 bp, Artificial Sequence
  Synthetic Polynucloetide
caggtgcagctggaagagtctggacccgagcttgtgaagcctggggccagcgtgaagctgtcctgtaaagccagcggctacaccttcaccgagtacatcatccactgggtcaagcagcggagcggccagggcctggaatggatcggctggttttaccctggctccggcagcatcaagtacaacgagaagttcaaggacaaggccaccctgaccgccgacaagtccagcagcaccgtgtacatggaactgagcggcctgaccagcgaggacagcgccgtgtatttctgcgccagacacgacggctacagctacttcgactattggggccagggcaccacactgaccgtgtcctct

SEQ ID NO: 320 - DNA, 345 bp, Artificial Sequence
  Synthetic Polynucloetide
gaatctggaagaggactggtgcagcctggcggcagcagaaagctgtcttgtgccgccagcggcttcaccttcagcaccagcggaatgcactgggtgcgccaggcccctgagaagggactggaatgggtggcctacatcagctccggcagcaccaccatctaccacgccgataccgtgaagggccggttcaccatcagccgggacaaccccaagaataccctgttcctccagatgaccagcctgcggagcgaggacaccgccatgtactattgctgcgccagaagcggccagttcggcaactacttcgactactggggccagggcaccaccctgaccgtgtcatct

SEQ ID NO: 321 - DNA, 360 bp, Artificial Sequence
  Synthetic Polynucloetide
gaggtgcaactgcagcagtctggccccgagcttgtgaagcctggcgcctccgtgaagatgagctgcaaggccagcggctacacctttaccagctacttcatccactgggtcaagcagaaacccggccagggcctggaatggatcggcttcatcaacccttacaacgacggcagcaagtacaacgagaagttcaagggcaaggccaccctgaccagcgacaagagcagcagcaccgcctacatggaactgtccagcctgacatccgaggacagcgccgtgtactactgcaccagggacgacggctactacggctacgccatggactactggggccagggaacaagcgtcaccgtgtcctct

SEQ ID NO: 322 - DNA, 360 bp, Artificial Sequence
  Synthetic Polynucloetide
gaagtgcaactccagcagagcggccctgagcttgtgaagcctggcgcttccgtgaagatgagctgcaaggccagcggctacaccttcaccagctacgtgatgcactgggtcaagcagaaacctggacagggcctggaatggatcggctacatcaacccctacaacgacggcaccaagtacaacgagaagttcaagggcaaggccaccctgacaagcgacaccagcagcagcaccgcctacatggaactgaacagcctgaccagcgaggacagcgccgtgtacttctgcgccagacccatctacttcgacaacgactacttcgattactggggccagggcaccaccctgaaggtgtcctct

SEQ ID NO: 323 - DNA, 357 bp, Artificial Sequence
  Synthetic Polynucloetide
gaagtgcaactggtggaatcaggcggcggactggtgcagcctggcggatctctgagactgagctgtgccgccagcggcttcgacttcagccggtactggatgagctgggtgcgccaggcccctggcaaaggactggaatggatcggcgagatcaaccccgacagcagcaccatcaactacgcccccagcctgaaggacaagttcatcatcagccgggacaacgccaagaacagcctgtacctccagatgaactccctgcgggccgaggacaccgccgtgtactattgcgccagacccgacggcaactactggtacttcgacgtgtggggccagggaaccctcgtgaccgtgtcatct

SEQ ID NO: 324 - DNA, 360 bp, Artificial Sequence
  Synthetic Polynucloetide
caggtgcagctgcagcagcccggcgccgagctggtgagacccggcgccagcgtgaagctgagctgcaaggccagcggctacagcttcaccacctactggatgaactgggtgaagcagagacccggccagggcctggagtggatcggcatgatccaccccagcgacagcgagaccagactgaaccagaagttcaaggacaaggccaccctgaccgtggacaagagcagcagcaccgcctacatgcagctgagcagccccaccagcgaggacagcgccgtgtactactgcgccagaagcaccatgatcgccaccagagccatggactactggggccagggcaccagcgtgaccgtgagcagc

SEQ ID NO: 325 - DNA, 360 bp, Artificial Sequence
  Synthetic Polynucloetide
caggtgcaactggtgcagagcggagccgaagtgaagaaacctggggccagcgtgaaggtgtcctgcaaggtgtccggctacaccctgaccgagctgagcattcactgggtgcgccaggcccctggcaagggactggaatggatgggcggcttcgaccccgaagagaacgagatcgtgtacgcccagcggttccagggcagagtgacaatgaccgaggacaccagcaccgacaccgcctacatggaactgagcagcctgcggagcgaggataccgccgtgtactactgtgccatcgtgggcagcttcagcggaatcgcctacagaccttggggccagggcacaatggtcaccgtgtctagc

SEQ ID NO: 326 - DNA, 360 bp, Artificial Sequence
  Synthetic Polynucloetide
caggtgcaactggtgcagagcggagccgaagtgaagaaacctggggccagcgtgaaggtgtcctgcaaggtgtccggctacaccctgaccgagctgagcattcactgggtgcgccaggcccctggcaagggactggaatggatgggcggcttcgaccccgaagagaacgagatcgtgtacgcccagcggttccagggcagagtgacaatgaccgaggacaccagcaccgacaccgcctacatggaactgagcagcctgcggagcgaggataccgccgtgtactactgcgccatcgtgggcagcttcagccctctgacactgggcctgtggggccagggaactatggtcaccgtgtccagc

SEQ ID NO: 327 - DNA, 372 bp, Artificial Sequence
  Synthetic Polynucloetide
cagatcaccctgaaagagtccggccccaccctcgtgaagcctacccagaccctgacactgacctgcaccttcagcggcttcagcctgagcacaagcggcatgggcgtgggctggatcagacagcctcctggaaaggccctggaatggctggcccacatttggtgggacgacgtgaagcggtacagccccagcctgaagtcccggctgaccattaccaaggacaccagcaagaaccaggtggtgctgaccatgacaaacatggaccccgtggacaccgccacatattactgcgcccggatcgtgtccttcgacaacgacgtggtgtccgctatggactactggggccagggaaccctcgtgaccgtgtctagt

SEQ ID NO: 328 - DNA, 354 bp, Artificial Sequence
  Synthetic Polynucloetide
caggtgcaactggtgcagagcggagccgaagtgaagaaacctggggccagcgtgaaggtgtcctgcaaggccagcggctacacctttaccaactacggcatgaactgggtgcgccaggctcctggacagggcctggaatggatgggctggatcaacacctacaccggcgagcccacctacgccgacgacttcaagggcagagtgaccatgaccaccgacaccagcacctccaccgcctacatggaactgcggagcctgagaagcgacgacaccgccgtgtattattgcgcccggatcggcgacagcagccccagcgattattggggccagggaaccctcgtgaccgtgtcctct

SEQ ID NO: 329 - DNA, 357 bp, Artificial Sequence
  Synthetic Polynucloetide
caggtgcagctgaagcagagcggacctggcctggtgcagcctagccagagcctgtccatcacctgtaccgtgtccggcttcagcctgaccaactacggcgtgcactgggtgcgccagagccctggaaaaggactggaatggctgggagtgatttggagcggcggcaacaccgactacaacacccccttcaccagcagactgtctatcaacaaggacaacagcaagagccaggtgttcttcaagatgaacagcctccagagcaacgacaccgccatctactactgtgctagagccctgacctactatgactacgagttcgcctactggggccagggcacactcgtgacagtgtctgct

SEQ ID NO: 330 - DNA, 342 bp, Artificial Sequence
  Synthetic Polynucloetide
gagatccagctggtgcagagcggagccgaagtgaagaagcctggcgagagcctgcggatcagctgcaagggcagcggcttcaacatcgaggactactacatccactgggtgcgccagatgcccggcaagggcctggaatggatgggcagaatcgaccccgagaacgacgagactaagtacggccccatcttccagggccacgtgaccatcagcgccgacaccagcatcaacaccgtgtacctccagtggtccagcctgaaggccagcgacaccgccatgtactactgcgcctttagaggcggcgtgtactggggccagggcaccacagtgacagtgtctagc

SEQ ID NO: 331 - DNA, 381 bp, Artificial Sequence
  Synthetic Polynucloetide
gaggtgcaactgctggaatctgggggcggagtggtgcagcctggcagaagcctgagactgagctgtgccgccagcggcttcaccttcagctcctacggaatgcactgggtgcgccaggcccctggcaaaggactggaatgggtggccgtgatctcctacgacggcagcaacaagtactacgccgacagcgtgaagggccggttcaccatcagccgggacaacagcaagaacaccctgtacctgcagatgaacagcctgcgggccgaggacaccgccgtgtactactgcgccaaggatatgggctggggcagcggctggcggccttactactactacggcatggacgtgtggggccagggcaccaccgtgacagtgtcatct

SEQ ID NO: 332 - DNA, 360 bp, Artificial Sequence
  Synthetic Polynucloetide
gaagtgcagctgctggaacagtctggcgccgaacttgtgcggcctggcaccagcgtgaagatcagctgtaaagccagcggctacgccttcaccaactactggctgggctgggtcaagcagaggcctggacacggcctggaatggatcggcgacatctttcccggctccggcaacatccactacaacgagaagttcaagggcaaggccaccctgaccgccgacaagtctagcagcaccgcctacatgcagctgtccagcctgacctttgaggacagcgccgtgtatttctgtgcccggctgcggaactgggacgagcccatggattattggggccagggcaccaccgtgaccgtgtctagt

SEQ ID NO: 333 - DNA, 372 bp, Artificial Sequence
  Synthetic Polynucloetide
gtgcacgaggtccagcttgtgcagtccggggcagaggtcaagaagcctggttctagcgtaaaagtgagttgcaaagcctcaggtgggacattttcatcctacgcgatcagttgggttagacaggctcctggtcaagggctggaatggatgggcggaattattccaatcttcggaacagcgaattacgcgcagaagttccagggtagagtaaccatcactgctgacaagtccacctccaccgcatacatggaattgtctagtctccggagcgaggatacggcggtgtattattgtgctacgttcgccctgtttggcttccgcgaacaggctttcgacatctgggggcagggcacgacagtcacggttagtagt

SEQ ID NO: 334 - DNA, 366 bp, Artificial Sequence
  Synthetic Polynucloetide
agggcacacctggtgcagtctggcaccgccatgaagaaacctggcgcttccgtcagagtgtcctgtcagacaagcggctacaccttcacagcccacatcctgttctggttcagacaggccccaggcagaggactggaatgggtcggatggatcaagccccagtacggggccgtgaatttcggcggaggcttcagagacagagtgaccctgaccagggacgtgtaccgggaaatcgcctacatggacatccggggcctgaagcctgatgacaccgccgtgtactactgcgccagggatagaagctacggcgacagctcttgggctctcgatgcttggggacagggcacaacagtggtggtgtctgct

SEQ ID NO: 335 - DNA, 354 bp, Artificial Sequence
  Synthetic Polynucloetide
caggtccaactggtgcagagcggagccgaggtcgtgaagcctggcgcttccgtgaagattagctgcaaagccagcggctacacctttaccggctactttatgaactgggtcaagcagagccctggccagagcctggaatggatcggcagaatccacccctacgacggcgacaccttctacaaccagaagttccagggcaaggccaccctgacagtggacaagagcagcaacaccgcccacatggaactgctgagcctgaccagcgaggacttcgccgtgtactactgcaccagatacgacggcagccgggctatggactattggggccagggcaccaccgtgaccgtgtctagt

SEQ ID NO: 336 - DNA, 339 bp, Artificial Sequence
  Synthetic Polynucloetide
gaagtgcagctggtgcagtctggcgctgaggtggaaaagcctggggccagcgtgaagattagctgcaaggccagcggcagcagcttcaccggctacaacatgaactgggtgcgccagaacatcggcaagagcctggaatggatcggagccatcgacccctactacggcggcaccagctacaaccagaagttcaagggcagagccaccctgaccgtggacaagagcaccagcaccgcctacatgcacctgaagtccctgcggagcgaggacaccgccgtgtactactgtgtgtccggcatggaatattggggccagggcaccagcgtgaccgtgtctagt

SEQ ID NO: 337 - DNA, 363 bp, Artificial Sequence
  Synthetic Polynucloetide
caggtgcagctggtggaatctggacctggcgtggtgcagcctggcagaagcctgagaatcagctgtgccgtgtccggcttcagcgtgaccaactacggcgtgcactgggtgcgccagccacctggaaaaggactggaatggctgggcgtgatctgggctggcggcatcaccaactacaacagcgccttcatgtcccggctgaccatctccaaggacaacagcaagaacaccgtgtacctccagatgaacagcctgcgggccgaggacaccgccatgtactactgtgcttccagaggcggccactacggctacgccctggattattggggccagggaaccctcgtgaccgtgtcctctacgcgt

SEQ ID NO: 338 - DNA, 357 bp, Artificial Sequence
  Synthetic Polynucloetide
gaagtgaccctggtggaaagcggcggagacttcgtgaagcctggcggctctctgaaggtgtcctgtgccgccagcggcttcgcctttagccactacgccatgagctgggtgcgccagacccctgccaagagactggaatgggtggcctacatcagcagcggcggctccggcacctactactccgatagcgtgaagggccggttcaccatcagccgggacaacgccaagaacaccctgtacctccagatgcggagcctgcggagcgaggacagcgccatgtatttctgcaccagagtgaagctgggcacctattacttcgactcttggggccagggcaccaccctgaccgtgtcatct

SEQ ID NO: 339 - DNA, 354 bp, Artificial Sequence
  Synthetic Polynucloetide
gagcaactgaaagagtctggcggcggactgttcaagcccaccgataccctgaccctgacctgcaccgtgtccggcttcagcctgagctactacggcgtgaactgggtgcgccaggcccctggcaatggcctggaatggatcggcacaatcggcggcagcggcgacacctactatgcctcttgggccaagtccagaagcaccatcatcagaaacaccaacgagaacaccgtgaccctgaagatgaccagcctgacagccgccgacaccgccacctacttttgcgtcagatacgccaacatcggctacgagtatttcaacgtgtggggacccggcaccctcgtgaccgtgtcatct

SEQ ID NO: 340 - DNA, 363 bp, Artificial Sequence
  Synthetic Polynucloetide
gaagtgcaactggtggaatcaggcggcggactggtgcagcctggcgagtctctgagactgagctgtgtggcctccggcttcaccttcagccggtacaagatgaactgggtgcgccaggcccctggcaagggactggaatgggtgtcctacatcagccgcagcggcagagacatctactacgccgacagcgtgaagggccggttcaccatcagcagagacaacgccaagaacagcctgtacctccagatgaactccctgcgggacgaggacaccgccgtgtactactgtgccggaaccgtgaccacctattactacttcggcatggacgtgtggggccacggcaccaccgtgacagtgtcatct

SEQ ID NO: 341 - DNA, 348 bp, Artificial Sequence
  Synthetic Polynucloetide
gaagtgcagctcgttgagtctggcggcggactgattcaacctggcggaagcctgagactgagctgtgccgcttccggcttcaccttcagcaactacgccatgaactgggttcgacaggcccctggcaaaggactggaatgggtgtccaccatcaacggcagaggcagcagcaccatctacgccgattctgtgaagggcagattcaccatcagccgggacaacagcaagaacaccctgtacctccagatgaactccctgagagccgaggacaccgccacctattactgtgcccggtacatcagcagaggactgggcgattcttggggccagggcacactggttacagtg

SEQ ID NO: 342 - DNA, 351 bp, Artificial Sequence
  Synthetic Polynucloetide
gaagttcagctggttgaatctggcggcggactggttaagcctggcggatctctgagactgtcttgtgccgccagcggcttcaccttcagcgattactacatgagctggatcagacaggcccctggcaaaggactggaatgggtgtcctacatcagcagcagcggctccaccatctactacgccgatagcgtgaagggcagattcaccatcagccgggacaacgccaagaacagcctgtacctccagatgaactccctgagagccgaggacaccgccgtgtactattgcgccagaggctacggcaaagcctacgatcaatggggccagggcacactggtcaccgtttcttct

SEQ ID NO: 343 - DNA, 360 bp, Artificial Sequence
  Synthetic Polynucloetide
gaagtgcaactggtggaatctggcggcggactggtgcagcctggcggatctctgagactgagctgtgccgccagcggcttcaacatcaaggacacctacatccactgggtgcgccaggcccctggaaagggactggaatgggtggcccggatctaccccaccaacggctacaccagatacgccgacagcgtgaagggccggttcaccatcagcgccgacaccagcaagaataccgcctacctccagatgaacagcctgcgggccgaggataccgccgtgtactactgctcaagatggggaggcgacggcttctacgctatggacgtgtggggccagggcacccttgtgaccgtgtcatct

SEQ ID NO: 344 - DNA, 405 bp, Artificial Sequence
  Synthetic Polynucloetide
cagccccagctccaggaatctggccccacactggtggaagccagcgagacactgagcctgacctgtgccgtgtccggcgattctaccgccgcctgcaatagcttctggggctgggtgcgccagcctcctggaaagggactggaatgggtgggaagcctgagccactgcgccagctattggaaccggggctggacctaccacaaccccagcctgaagtccagactgaccctggccctggacacccccaagaacctggtgttcctgaagctgaacagcgtgacagccgccgacaccgccacctactactgtgccagatttggcggcgaggtgctgcggtacaccgactggcctaaacctgcctgggtggacctgtggggcagaggaacactcgtgaccgtgtccagc

SEQ ID NO: 345 - DNA, 384 bp, Artificial Sequence
  Synthetic Polynucloetide
ctggaacagagcggagccgaagtgaagaaacccggcagcagcgtgcaggtgtcctgcaaagcaagcggcggcaccttctctatgtacggcttcaactgggtgcgccaggctcctggacacggcctggaatggatgggcggcatcatccccatcttcggcacctccaactacgcccagaaattccggggcagagtgaccttcaccgccgaccaggccacaagcaccgcctacatggaactgaccaacctgcggagcgacgacaccgccgtgtattattgcgccagagacttcggccccgactgggaggatggcgacagctacgatggcagcggcagaggcttcttcgacttctggggccagggaacccttgtgaccgtgtcctca

SEQ ID NO: 346 - DNA, 354 bp, Artificial Sequence
  Synthetic Polynucloetide
gaagtgcaactgctggaatctggcggcggactggtgcagcctggcggatctctgagactgagctgtgccgccagcggcttcacctttagctggtacagcatgacctgggtgcgccaggcccctggcaaaggactggaatgggtgtccagcatcgtgccctggggcgatttcacccagtacgccgatagcgtgaagggccggttcaccatcagccgggacaacagcaagaacaccctgtacctgcagatgaacagcctgcgggccgaggacaccgccgtgtactattgtgccaagggacctggctggggcagcttcgatctgtggggcagaggaacccttgtgaccgtgtccagc

SEQ ID NO: 347 - DNA, 348 bp, Artificial Sequence
  Synthetic Polynucloetide
gaagtgcaactggtggaatctggcggcggactggtgcagcctggcggatctctgagactgagctgtgccgccagcggcttcagcctgaccaaatacggcgtgcactgggtgcgccaggcccctggaaaaggactggaatgggtgggagtgaagtgggctggcggctccaccgactacaacagcgccctgatgagccggttcaccatcagcaaggacaacgccaagaacagcctgtacctccagatgaactccctgcgggccgaggacaccgccgtgtactactgtgccagagatcaccgggacgctatggactactggggccagggaacactcgtgaccgtgtcctct

SEQ ID NO: 348 - DNA, 366 bp, Artificial Sequence
  Synthetic Polynucloetide
gaagtgcaactggtggaatcaggcggcggactggtgcagcctggcggatctctgagactgagctgtgccgccagcggcttcaccttcagcagaaacggcatgagctgggtgcgccaggcccctggaaaaggactggaatgggtggcaaccgtgtccagcggcggcagctacatctactacgccgacagcgtgaagggccggttcaccatctccagagacaacgccaagaacagcctgtacctccagatgaactccctgcgggccgaggacaccgccgtgtactattgtgccagacagggcaccaccgccctggctaccagattcttcgatgtgtggggccagggcaccctcgtgaccgtgtcatct

SEQ ID NO: 349 - DNA, 351 bp, Artificial Sequence
  Synthetic Polynucloetide
gaagtgcaactggtgcagtccggcggagggctggtgcagagcggaggatctctgagactgagctgcagagccagcggctacaccttcacccggtactggatgctgtgggtgcgccagaggccaggcaagggactggaatgggtggccgagatcaacccccggaacgaccggaccaactacaacgagaagttcaagacccggttcaccatcagcgtggacagaagcaagaacaccctgtacctgcagatggacagcctgcgggccgaggataccgccgtgtacttttgtgctctgggaggcggctacgctatggactactggggccagggaacccttgtgaccgtgtcctct

SEQ ID NO: 350 - DNA, 354 bp, Artificial Sequence
  Synthetic Polynucloetide
caggtgcaactggtgcagagcggagccgagcttgtgaagcctggcgcttccgtgaagatgagctgcaaagccagcggctacatcttcaccaactacaacatccactgggtcaagaagtccccaggccagggcctggaatggatcggagccatctaccccggaaacggcgacgccccttacagccagaagttccaggacagagccaccctgaccgccgacaccagcagcagcaccacctacatggaactgagcagcctgaccagcgaggacagcgccgtgtactattgcgtgcgggccaactgggatgtggccttcgcctattggggccagggcacactggtgtccgtgtcctct

SEQ ID NO: 351 - DNA, 357 bp, Artificial Sequence
  Synthetic Polynucloetide
caggtgcaactccagcagtctggcgcttccgtgaaggtgtcctgcaaggccagcgaactcgtgcggcctggcacaggctacgccttcaccaattacctgatcgagtgggtcaagcagaggcccggacagggcctggaatggatcggagtgattaacccaggcagcggcggcaccaactacaacgagaagttcaagggcaaggccaccctgaccgccgacaagagcagcagcacagcctacatgcaactgagcagcctgaccagcgacgacagcgccgtgtacttctgcgcccggtacagaagctacgactggtacttcgacgtgtggggagccggcaccaccgtgacagtgtcatct

SEQ ID NO: 352 - DNA, 357 bp, Artificial Sequence
  Synthetic Polynucloetide
caggtacagttgaaagaaagcgggcctggactggtagcgccttcccaatctctctccatcacgtgcaccatctctggcttctccctgacttcctatggagttcactgggtgaggcagccccccggcaagggactggaatggctggtcgtcatctggtccgacgggtccacaacctacaactccgctctgaaaagtcggctctctatttctaaagataatagcaagagccaggtgtttctgaaaatgaactctctgcagaccgatgatacggccatttactactgcgcttcacactatggctcaaccttggcattcgcttcctggggccacggaacactggtgaccgtttccgcagcc

SEQ ID NO: 353 - DNA, 381 bp, Artificial Sequence
  Synthetic Polynucloetide
gaggtacagctggaggaaagcggtggaggactggtgcaacctggagggtctatgaagctctcttgcgtagcttctgggttcacgttctccaattactggatgaactgggtgcggcagtcccccgagaaaggcctggaatgggtagcagaaattcggttcaagtcccataactatgctacacactttgccgagtctgtcaaaggccggttcactattagtcgagacgacagcaagtcttcagtctacctgcagatgaataacttgcgggcagaggacacaggtatctactactgcaccaggagaatcggcaactccgactatgactggtggtactttgacgtctggggagcaggcaccagcgtgacggtgagttcagcctca

SEQ ID NO: 354 - DNA, 354 bp, Artificial Sequence
  Synthetic Polynucloetide
gatgtgcagctccaggaatctggccccggactcgtgaagcctagccagagcctgagcctgacatgcaccgtgaccggctacagcatcaccatcgactacacctggaactggatcagacagttccccggcaacaaactggaatggatgggctacatcacctacagcggcagcaccgactacaaccccagcctgaagtccagaagctccatcaccagagacacctctatgaaccagttcttcttgcagctgaacagcgtgaccaccgaggacaccgccacctactattgcgccagactgggcagaagatacgccctggactattggggccagggcaccagcgtgacagtgtcctct

SEQ ID NO: 355 - DNA, 354 bp, Artificial Sequence
  Synthetic Polynucloetide
gatgtgcagctccaggaaagcggccctggcctcgtgaagcctagccagagcctgagcctgacatgcaccgtgaccggctacagcatcaccagcgactacacctggaactggatcagacagttccccggcaacaagctggaatggatgggctacatcacctacagcggcagcaccagctacaaccccagcctgaagtcccggaactccatcaccagagacaccagcaagaaccagttcttcttgcagctgaacagcgtgaccaccgaggacaccgccacctactactgcgccagactgggcagacggtacaccatggactattggggccagggcacctccgtgaccgtgtctagc

SEQ ID NO: 356 - DNA, 354 bp, Artificial Sequence
  Synthetic Polynucloetide
gacgtgcagctgcaggagagcggccccggcctggtgaagcccagccagagcctgagcctgacctgcaccgtgaccggctacagcatcaccagcgactacacctggaactggatcagacagttccccggcaacaagctggagtggatgggctacatcacctacagcggcagcaccagctacaaccccagcctgaagagcagaaacagcatcaccagagacaccagcaagaaccagttcttcctgcagctgaacagcgtgaccaccgaggacaccgccacctactactgcgccagactgggcagaagatacacaatggactactggggccagggcaccagcgtgaccgtgagcagc

SEQ ID NO: 357 - DNA, 360 bp, Artificial Sequence
  Synthetic Polynucloetide
gaggtgcagctggtggaatctgggggcggcctggtccaacctaagggatcactcaagctctcttgtgcggccagcggattctctttcaatacctatgctatgaattgggtgagacaggcgcccggaaagggcctcgaatggatagcccatatccggtcaaaatcaaacaatttcgcaacctactatgcggactccgtgaaggaccgattttccatctcccgagatgcctccgagaatattctgttcctgcagatgaataacctcaagacagaggacaccgccatgtactactgtgtgcgccagggcggtgactttcccatggattactgggggcaggggaccagcgtgaccgtgagctct

SEQ ID NO: 358 - DNA, 360 bp, Artificial Sequence
  Synthetic Polynucloetide
caggtgcaactggtggaatctggcggcggagtggtgcagcctggcagaagcctgagactgagctgtgccgccagcggcttcacctttagcagctacgccatgcactgggtgcgccaggcccctggaaaaggcctggaatgggtggccgtgatctcctacgacggctccaacaagtattacgccgacagcgtgaagggccggttcaccatctccagagacaacagcaagaacaccctgtacctccagatgaacagcctgcgggccgaggacaccgccgtgtactattgtgccagggctcacaacagcagctcttggagcttcgactactggggccagggcaccctcgtgaccgtgtcatct

SEQ ID NO: 359 - DNA, 372 bp, Artificial Sequence
  Synthetic Polynucloetide
gaagtgcggctgcagcagtctggccccgacctgattaagcctggggccagcgtgaagatgagctgcaaggccagcggctacaccttcaccggctacgtgatgcactgggtcaagcagaggccaggccagggcctggaatggatcggcttcatcaacccctacaacgacgacatccagagcaacgagcggttccggggcaaggccaccctgaccagcgataagagcagcaccaccgcctacatggaactgagcagcctgacctccgaggacagcgccgtgtactactgtgctaggggagccggctacaacttcgacggggcctacagattcttcgacttttggggccagggcaccacactgaccgtgtcctct

SEQ ID NO: 360 - DNA, 357 bp, Artificial Sequence
  Synthetic Polynucloetide
caggtgcaactggtggaaagcggagccgaagtgaagaaacctggggccagcgtgaaggtgtcctgcaaggccagcggctacacctttaccggctactacatgcactgggtgcgccaggctccaggccagggactggaatggatgggccggatcaaccccaatagcggcggcaccaactacgcccagaaattccagggcagagtgaccatgaccagagacaccagcatcagcaccgcctacatggaactgagccggctgagaagcgacgacaccgccgtgtactactgcgccagccctagaggcagaggcagcgccttcgatatttggggccagggcacactcgtgaccgtgtcctct

SEQ ID NO: 361 - DNA, 354 bp, Artificial Sequence
  Synthetic Polynucloetide
gaagtgcaactggtggaaagcgggggaggcgtggtgcagccaggcggatctctgagactgagctgtgccgccagcggcttcaccttcagcagctacgccatgagctgggtgcgccaggcccctggaaaaggcctggaatgggtgtccgccatctctggctctggcggcagcacctactacgccgatagcgtgaagggccggttcagcatcagccgggacaacagcaagaacaccctgtacctccagatgaacagcctgcgggccgaggacaccgccgtgtactactgtgccagaaccagaagctccggggccttcgacatctggggccagggaacactcgtgaccgtgtcctct

SEQ ID NO: 362 - DNA, 357 bp, Artificial Sequence
  Synthetic Polynucloetide
gaagtgcaactccagcagagcggcccagagcttgtgaagcctggcgcttccgtgaagattagctgcaaagccagcggctacagcttcaccggctacttcatgaactgggtcaagcagagccacggcaagagcctggagtacatcggcagattcaacccctacaacggcgagacactgtacaaccagaagttcaagggcaaggccaccctgaccgtggacaagagcagcagcaccgtgcacatggaactgctgagcgtgaccagcgaggacagcgccgtgtactactgtggcagaagcggcaacgacgacgctatggactattggggccagggcaccagcgtgaccgtgtctagtgct

SEQ ID NO: 363 - DNA, 348 bp, Artificial Sequence
  Synthetic Polynucloetide
caggtgcaactccagcagtccgacgccgagcttgtgaagcctggcgcttccgtgaagattagctgcaaggccagcggctacaccttcaccgaccacgccattcactgggtcaagcagaagcccgagcagggcctggaatggatcggctacttcagccccggcaacggcgacatcaagtacaacgagaagttcaagggcaaggccaccctgaccgccgacaagagcagcagcacagcctacatgcaactgaacagcctgaccagcgaggactccgccgtgtacttctgcaagcggagctacggcaactacgactactggggccagggcaccacactgaccgtgtctagt

SEQ ID NO: 364 - DNA, 348 bp, Artificial Sequence
  Synthetic Polynucloetide
caggtgcagctggtgcagtctggggccgaagtgaagaaaaccggcagcagcgtgaaggtgtcctgcaaggccagcggctacacctttaccgaccacgccattcacgtgtggcggcaggctccaggacaggccctggaatggatgggccacttcagccccggcaacaccgacatcaagtacaacgacaagttcaagggcagagtgaccctgaccgtggaccgcagcatgagcaccgcctacatggaactgagcagcctgcggagcgaggacaccgccatgtactattgcaagaccagcaccttctttttcgactactggggccagggaacaatggtcaccgtgtccagc

SEQ ID NO: 365 - DNA, 363 bp, Artificial Sequence
  Synthetic Polynucloetide
cagatccaactggtgcagagcggccacgaagtgaagaaacctggggccagcgtgaaggtgtcctgcaaagccagcggctacacctttaccaactacggcatgaactgggtgcgccaggcccctggacagggcctggaatggatgggctggatcaacaccaagaccggcgagcccacctacgccgaagagttcaagggcagattcgtgttcagcctggaaaccagcgcctccaccgcctacctccagatcagctctctgaaggccgaggacaccgccatgtacttttgcggcagaggcggctacggcagcagctactggtacttcgatgtgtggggccagggcaccaccgtgaccgtgtcatct

SEQ ID NO: 366 - DNA, 363 bp, Artificial Sequence
  Synthetic Polynucloetide
cagatgcaactggtgcagagcggagccgaagtgaaagagcctggcgagagcctgcggatctcctgcaagggcagcggctacagcttcaccaatttctggatctcttgggtgcgccagatgcccggcaagggcctggaatggatgggcagagtggaccccggctactcctacagcacctacagccctagcttccagggccacgtgaccatcagcgccgacaagagcaccagcaccgcctacctccagtggaacagcctgaaggccagcgacaccgccatgtactactgcgccagagtgcagtacagcggctattacgattggttcgacccctggggccagggcacactcgtgacagtgtcaagc

SEQ ID NO: 367 - DNA, 354 bp, Artificial Sequence
  Synthetic Polynucloetide
caggtgcagctggtgcagtctggggccgaagtgaagaagcctggcgagagcctgaagatcagctgcaagggctccggctacaacttctctaacaagtggatcggctgggtgcgccagctgcctggcagaggactggaatggatcgccatcatctaccccggctacagcgacatcacctacagccccagcttccagggccgcgtgacaatcagcgccgacaccagcatcaacaccgcctacctgcactggcacagcctgaaggccagcgacaccgccatgtactactgcgtgcggcatacagccctggctggcttcgattattggggcctgggcaccctcgtgaccgtgtctagt

SEQ ID NO: 368 - DNA, 363 bp, Artificial Sequence
  Synthetic Polynucloetide
gaagtgcaactggtgcagtctggcggaggggtcatgcggcctggcggatctctgagactgtcttgtgccgccagcggcttcaccttcgacgactacggcatgagctgggtgcgccaggcccctggaaaaggcctggaatgggtgtccggcatcaactggaatggcggcagcaccggctacgccgattctgtgcggggcagattcaccatcagccgggacaacgccaagaacagcctgtacctgcagatgaactccctgcgggccgaggacaccgccctgtactattgcgccagagagcggggctacggctaccacgaccctcacgattattggggccagggcacccttgttaccgtgtcctct

SEQ ID NO: 369 - DNA, 354 bp, Artificial Sequence
  Synthetic Polynucloetide
cagattcagctggtgcagtctggccccgagctgaagaaacctggcgagacagtgaagatcagctgcaaggccagcggctacatcttcaccaattacggcatgaactgggtcaagcaggcccctggcaagagcttcaagtggatgggctggatcaacacctacaccggcgagagcacatacagcgccgacttcaagggcagattcgccttcagcctggaaaccagcgccagcacagcctacctgcacatcaacgacctgaagaacgaggacaccgccacctacttttgcgccagaagcggcggctacgaccctatggattattggggccagggcaccagcgtgaccgtttcttct

SEQ ID NO: 370 - DNA, 357 bp, Artificial Sequence
  Synthetic Polynucloetide
caggtgcaactggtggaatctggcgggggagtggtgcagcctggcagaagcctgagactgtcttgtgccgccagcggcttcaccttcagcagctacgacatgcactgggtgcgccaggcccctggcaaaggactggaatgggtggccgtgatctcctacgacggcaccaacgagtattacgccgacagcgtgaagggccggttcaccatctccagagacaccagcaagaacaccctgtacctccagatgaacagcctgcgggccgaggacacagccgtgtattattgcgccagagagcggtacttcgactggtccttcgactactggggccagggaaccctggtgtccgtgtctagt

SEQ ID NO: 371 - DNA, 354 bp, Artificial Sequence
  Synthetic Polynucloetide
gaagttcagctggtgcagagcggagccgaagtgaagaaacctggggcctctgtgaaggtgtcctgcaaggcttccggctacacctttaccagctacgccatgcactgggtccgacaggcacctggacaacggcttgaatggatgggctggatcaacgccggcaacggcaacaccaagtacagccagaaattccagggccgcgtgaccatcaccagagatacaagcgccagcaccgcctacatggaactgtctagcctgagatccgaggacaccgccgtgtactactgtgccagagacatcagctacggcagcttcgactattggggccagggcacactggtcaccgttagctct

SEQ ID NO: 372 - DNA, 348 bp, Artificial Sequence
  Synthetic Polynucloetide
gaagtgcaactggttcagagcggagccgaagtgaagaaacctggggcctctgtgaaggtgtcctgcaaggcttccggctacacctttaccaatttctggattcactgggtccgacaggctccaggccaaggactggaatggatcggagagatcgaccccagcgacagctacaccaactacaaccagaaattcaaaggccgggtcaccatcaccagagacaccagcacaagcaccgcctacctggaactgagcagcctgagaagcgaggacaccgccgtgtactactgcgccagggaaatcaccaccgtggattattggggccagggaaccctggtcaccgtgtcatct

SEQ ID NO: 373 - DNA, 363 bp, Artificial Sequence
  Synthetic Polynucloetide
gaagttcagcttgtgcagagcggagccgaagtgaagaaacctggggcctctgtgaaggtgtcctgcaaagccagcggctacacctttaccagctactggatcggctgggtccgacaggctcctggacaaggactggaatggatcggcgacatctatcccggcggaggctacaccaactacaacgagaagttcaagggccgcgtgacaatcaccagagacacctctacaagcaccgcctacctggaactgagcagcctgagaagcgaggacaccgccgtgtactactgcgccagactggatggcagcagctacagaggcgctatggattcttggggccagggcacactggtcaccgtttcttct

SEQ ID NO: 374 - DNA, 354 bp, Artificial Sequence
  Synthetic Polynucloetide
gaagtgcagcttgttgaatctggcggcggactggctaagcctggcggatctctgagactgtcttgtgccgccagcggcttccggttcaccttcaacaactactacatggactgggtccgacaggcccctggacaaggacttgaatgggtgtccagaatcagcagcagcggcgaccctacttggtacgccgattctgtgaagggcagattcaccatcagcagagagaacgccaagaacaccctgttcctccagatgaactccctgagagccgaggacaccgccgtgtactattgtgcctctctgaccaccggcagcgattcttggggacagggcgtgctggttaccgtgtcatct

SEQ ID NO: 375 - DNA, 360 bp, Artificial Sequence
  Synthetic Polynucloetide
gaagttcagctccttgagtcaggtggcggcctggttcaacctggcggatctctgagactgagctgtgccgccagcggcttcacctttagcagatacgccatgaactgggtccgacaggcccctggcaaaggactggaatgggtgtccggcatctctggaagcggcggcagaacctactacgccgattctgtgaagggcagattcaccatcagccgggacaacagcaagaacaccctgtacctccagatgaacagcctgagagccgaggacacagccgtgtattattgcgccaaggaccgggacttttggagcggcccttttgactattggggccagggaaccctggtcaccgttagctct

SEQ ID NO: 376 - DNA, 372 bp, Artificial Sequence
  Synthetic Polynucloetide
caggtgcaactccaggaatctggccccggactcgtgaagcccagcgagacactgagcctgacctgtaccgtgtccggctacaccatcaccagcggctacgactggtcctggatcagacagcctcctggcaagggcctggaatggatcggctacatcaactacggcggctccaccaactacaagcccagcctgggaagccgcgtgacaatcagcgtggacacctccaagaaccagttcagcctgaagctgagcagcgtgacagccgccgataccgccgtgtactactgcgcccggtacaacgagtacaagagctacatctacgattggtacttcgacttctggggccagggaaccctcgtgaccgtgtctagt

SEQ ID NO: 377 - DNA, 372 bp, Artificial Sequence
  Synthetic Polynucloetide
gaagtgcaactggtggaatctggcggcggactggttaagcctggcggatctctgagactgtcttgtgccgccagcggcttcaccttcagcaatgcctggatgagctgggttcgacaggcccctggaaaaggactggaatgggtcggattcatccggtccaaagcctacggcggcaccacagaatatgccgcctctgtgaagggcagattcaccatcagccgggacgacagcaagtctatcgcctacctccagatgaacaacctgaaaaccgaggacaccgccgtgtactactgcgccagagatggcctgtacagcagctcttggtacgacagcgattactggggccagggcacactggtcacagtgtcatct

SEQ ID NO: 378 - DNA, 378 bp, Artificial Sequence
  Synthetic Polynucloetide
caaatgcaactggttcaaagcggcggtggcctggtgcaacctggaagaagtctgagactgagctgtgccgccagcggcttcaccttcgatgattacgccatgcactgggtccgacaggcccctggaaaaggactggaatgggtgtccggcatctcctggaatagcggctctatcggctacgccgacagcgtgaagggcagattcaccatcagccgggacaacgccaagaacagcctgtacctccagatgaactccctgagagccgaggatacagccctgtactactgcgccaaggacatccacagcggcagctactacggcctgctgtactacgctatggacgtgtggggccagggcacaaccgtgacagtttcttct

SEQ ID NO: 379 - DNA, 375 bp, Artificial Sequence
  Synthetic Polynucloetide
cttgaaatggctcaggtgcagctggtgcagagcggagccgaagtgaagaaacctggcagcagcgtgaaggtgtcctgcaaagcttctggcggcaccttcagcagctacgccatctcttgggttcgacaggcccctggacaaggactggaatggatgggcagaatcatccccatcctgggaatcgccaactacgcccagaaattccagggcagagtgacaatcaccgccgacaagagcaccagcaccgcctacatggaactgagcagcctgagaagcgaggacaccgccgtgtactattgtgcaagaggcggctactacagccacgacatgtggagcgaagattggggccagggcacactggtcacagtgtcatct

SEQ ID NO: 380 - DNA, 351 bp, Artificial Sequence
  Synthetic Polynucloetide
caagttcagctggtgcagtctggctccgagctgaagaaacctggcgagtccgtgaagatcagctgcaaggccagcggctacaccttcaccgactacagcatcaactgggtcaagcaggcccctggacagggactgaaatggatgggctggatcaacaccgagacaagagagcccgcctacgcctacgacttcagaggcagattcgtgttctccctggacaccagcgccagcacagcctatctccagatcagctctctgaaggccgaggataccgccgtgtacttctgcgccctggactacagctacgctatggactattggggccagggcaccctggtcacagtctcttct

SEQ ID NO: 381 - DNA, 351 bp, Artificial Sequence
  Synthetic Polynucloetide
caagttcaactggtgcagagcggctccgagctgaagaaacctggcgagtccgtgaagattagctgcaaggccagcggctacaccttcacacactacagcatgaactgggtccgacaggctccaggccaaggactggaatggatgggcagaatcaacaccgagacaggcgagcccctgtacgccgacgatttcaagggcagattcgtgttcagcctggacaccagcgccagcacagcctatctccagatcagctctctgaaggccgaggacaccgccgtgtattattgcagcaacgactacctgtactccctggactattggggccagggcacactggtcacagtgtctagt

SEQ ID NO: 382 - DNA, 360 bp, Artificial Sequence
  Synthetic Polynucloetide
gaagtgcaactggttcagagcggagccgagctgaagaaacctggggccagcgtgaaggtgtcctgtaaagccagcggctacacctttaccgactactacatgaaatgggtccgacaggccccaggccagggactcgaatggatcggcgatattatccccagcaacggggccaccttctacaaccagaaattcaagggccgcgtgaccatcaccgtggacaagagcacaagcaccgcctacatggaactgagcagcctgagaagcgaggacaccgccgtgtattattgcgccagaagccatctgctgcgggccagttggttcgcctattggggacagggaaccctggtcaccgttagctct

SEQ ID NO: 383 - DNA, 360 bp, Artificial Sequence
  Synthetic Polynucloetide
caagtgcaactggttcagagcggagccgagctgaagaaacctggggccagcgtgaaggtgtcctgtaaagccagcggctacacctttaccgactactacatgaaatgggtccgacaggccccaggccagggactcgaatggatcggcgatattatccccagcaacggggccaccttctacaaccagaaattcaagggccgcgtgaccatcaccgtggacaagagcacaagcaccgcctacatggaactgagcagcctgagaagcgaggacaccgccgtgtattattgcgccagaagccatctgctgcgggccagttggttcgcctattggggacagggaaccctggtcaccgttagctct

SEQ ID NO: 384 - DNA, 345 bp, Artificial Sequence
  Synthetic Polynucloetide
caagttcaactgcaacagcctggggccgagcttgttagacctggcgcttctgtgaagctgagctgcaaggccagcggctacaccttcaccagctactggatgaactgggtcaagcagcggcctgaccagggcctcgaatggatcggcagaatcgacccctacgacagcgagacacactacaaccagaagttcaaggacaaggccatcctgaccgtggacaagagcagctccaccgcctacatgcaactgagcagcctgacctctgaggatagcgccgtgtactattgcgccagaggcaactgggacgactattggggccagggcacaaccctgacagtgtctagt

SEQ ID NO: 385 - DNA, 357 bp, Artificial Sequence
  Synthetic Polynucloetide
gaagtgcagctcgttgagtctggtggcggactggttcagcctggaagaagcctgaagctgagctgtgccgccagcggcttcaccttcagcgactacaatatggcctgggtccgacaggcccctaagaaaggactggaatgggtcgccaccatcctgtacgatggcggcagaacctactaccggggcagcgtgaagggcagattcaccatcagcagagacaacgccaagagcaccctgtacctgcggatggactctctgagaagcgaggataccgccacatattactgtgccacacacagccggggcaccgactactttgattattggggccagggcgtgatggttaccgtgtctagt

SEQ ID NO: 386 - DNA, 363 bp, Artificial Sequence
  Synthetic Polynucloetide
gaagtgaagctgcaagagtctggccccagcctggtgcagagtagccaaacactgagcctgacctgtaccgtgtccggctttagcctgaccagctaccacatccactgggtccgacagacccctggcaaaggactggaatggatgggcgtgatgtggagcgacggcgacaccagctataacagcgccctgaagtcccggctgagcatcagcagagatacaagccagagccaggtgttcctgaagatgaacagcctccagaccgaggacaccgccacctactattgtgccagaggctactacagcagctacctgtacctttggttcgcctattggggccagggcaccctggttacagtcagctct

SEQ ID NO: 387 - DNA, 375 bp, Artificial Sequence
  Synthetic Polynucloetide
caggttcagctccagcagtctggacccgagcttagaaggccaggatctagcgtcagactgagctgcaaggccagcggctaccggatcaaggacttcctgatccactggattaagaacagacccgagcacggcctggaatggatcggatggattgaccctgaggacggcgagactaagtacgcccagaagttccagaccaaggccacactgaccgccgacacctctagcaacaccgcctacatgcaactgagcagcctgaccagcgaggacaccgccacctacttttgtgctagatggggcgacgtgtactacggcctgatgagaggccatgtgatggatgcctggggccagggaacaagcgtgacagtctcttct

SEQ ID NO: 388 - DNA, 363 bp, Artificial Sequence
  Synthetic Polynucloetide
gaagtgcagctcgttgagtctggtggcggactggttcaacctggcggaagcctgagactgtcttgtgccgccagcggcttcaccttcagcagctcttggatgaactgggtccgacaggcccctggcaaaggactggaatgggtcggaagaatctaccccggcgacggcgacaccaactacaacggcaagttcaagggcagattcaccatcagccgggacgacagcaagaacagcctgtacctgcagatgaactccctgaaaaccgaggacaccgccgtgtactactgtgccagatccggcttcatcaccaccgtgctggacttcgattattggggccagggcaccctggtcaccgtttcttct

SEQ ID NO: 389 - DNA, 363 bp, Artificial Sequence
  Synthetic Polynucloetide
gaagtgcaactggttcagagcggagccgaagtgaagaagcctggcgagagcctgaagattagctgcaaaggctccggctacagcttcagcagctcttggatcggctgggtccgacagatgcctggcaaaggactggaatggatgggcatcatctaccccgacgacagcgacaccagatacagccctagcttccagggccaagtgacaatcagcgccgacaagagcatcagaaccgcctacctccagtggtcctctctgaaggccagcgataccgccatgtactactgcgccagacacgtgaccatgatctggggagtgattatcgacttctggggccagggaaccctggtcacagtctcttct

SEQ ID NO: 390 - DNA, 363 bp, Artificial Sequence
  Synthetic Polynucloetide
gaagtgcaactggttgaatctggcggcggactggttaagcctggcggatctctgaagctgagctgtgccgccagcggctacacctttaccagctacgtgatgcactgggtccgacaggcccctggcaaaggacttgagtggatcggctacatcaacccctacaacgatggcaccaagtacaacgagaagttccagggcagagtgaccatcagctccgacaagagcatcagcaccgcctacatggaactgagcagcctgagaagcgaggataccgccatgtactattgcgccagaggcacctactactacggcaccagagtgttcgactactggggccagggaaccctggtcacagtctcttct

SEQ ID NO: 391 - DNA, 363 bp, Artificial Sequence
  Synthetic Polynucloetide
caagttcagcttcaacagcctggcgctgagctggtcaaacctggcgcttctgtgaagatgagctgcaaagccagcggctacgccttcagcagctactggatcaactggatgaagcagaaacccggccagggactcgaatggatcggccaaatctatcccggcgacggcgacaccaactacaacggcaagttcaagggcagagccacactgaccgccgatacctctagcagcacagcctacatgcagctgagcagcctgaccagcgaagatagcgccgtgtacttctgtgcccggtccatcacaacagtcgtgggctgcgctatggactattggggccagggaacaagcgtgaccgtgtctagt

SEQ ID NO: 392 - DNA, 360 bp, Artificial Sequence
  Synthetic Polynucloetide
caagttcagctggttcagtctggggccgaagtgaagaaacctggggcctctgtgaaggtgtcctgcaaggcttccggctacacctttaccagctacaatatgcactgggtccgacaggctcccggccagagacttgaatggatgggcggcatctaccccggcaatggcgacacctcctacaaccagaaattcaagggccgcgtgacaatcaccagagacacctctgccagcaccgcctacatggaactgagcagcctgagaagcgaggacaccgccgtgtactactgcgccagatacgactacaactacgctatggactactggggccagggaaccctggtcacagtgtctagtgcttcc

SEQ ID NO: 393 - DNA, 366 bp, Artificial Sequence
  Synthetic Polynucloetide
gaggtgcagcttgttgagtctggcggaggactggtgcagcccgatagaagcctgagactgtcttgtgccgccagcggcttcaccttccacgattatgccatgcactgggtccgacaggcccctggcaaaggacttgaatgggtgtccaccatctcttggaacagcggcacaatcggctacgccgactctgtgaagggcagattcaccatcagccgggacaacgccaagaacagcctgtacctccagatgaactccctgagagccgaggacacagccctgtactactgcgccaaggacatccagtacggcaactactactacggcatggacgtgtggggccagggcacaacagtgacagtctcttct

SEQ ID NO: 394 - DNA, 351 bp, Artificial Sequence
  Synthetic Polynucloetide
caggtgcaactggtgcagtctggggccgaagtgaagaaacctggggcctctgtgaaggtgtcctgcaaagccagcggctacacctttaccaactacgacatcaactgggtccgacaggctccaggccaaggactggaatggatcggctggatctatcctggcgacggcagcaccaagtacaacgagaagttcaaggccaaggccacactgaccgccgataccagcacaagcaccgcctacatggaactgcggagcctgagaagcgacgacaccgccgtgtactattgtgcctccggctacgaggacgctatggactattggggccagggcaccaccgtgacagtgtctagt

SEQ ID NO: 395 - DNA, 342 bp, Artificial Sequence
  Synthetic Polynucloetide
caagtgcaactggttcagagcggagccgaagtgaagaaacctggggcctctgtgaaggtgtcctgcaaggccagcggctacaccttcaaggacacctacatccactgggtccgacaggcccctggacaaggacttgagtggatgggcagaatcgaccccgccaacggcaacaccaaatacgaccccaagttccagggcagagtgaccatgaccagagacaccagcatcagcaccgcctacatggaactgagccggctgagatccgatgacaccgccgtgtactattgcgctagaagaggcggagtggattggggccagggaacactggttaccgtgtctagt

SEQ ID NO: 396 - DNA, 363 bp, Artificial Sequence
  Synthetic Polynucloetide
gaagtgcaactggttcagagcggagccgaagtgaagaaacctggggcctctgtgaaggtgtcctgcaaagccagcggctacacctttaccgactactacctggacgtggtcgtgcggcaagctcctggacaaggactggaatggatcggcagagtgaacccctacaacggcggcaccatctacaaccagaaattcaagggaagagtgaccctgaccagagacaccagcacctccacagcctacctggaactgagcagcctgagaagcgaagataccgccgtgtactactgcgccagggaccactacagatatgaccctctgctggactactggggccagggaaccctggttacagtgtctagt

SEQ ID NO: 397 - DNA, 366 bp, Artificial Sequence
  Synthetic Polynucloetide
gaagtgcaactggttcagagcggagccgaagtgaagaaacctggggcctctgtgaaggtgtcctgcaaggccagcggctacagcttcaccgactattatatgcactgggtccgacaggctccaggccagggacttgagtggatcggcagaatcaacccctacaacggcgctgccttctacagccagaacttcaaggatagagtgaccctgaccgtggacaccagcaccagcacagcctacctggaactgagcagcctgagaagcgaggacaccgccgtgtactactgcgccattgagagaggcgctgacctggaaggctacgctatggattattggggccagggaaccctggtcaccgtgtcatct

SEQ ID NO: 398 - DNA, 369 bp, Artificial Sequence
  Synthetic Polynucloetide
caagttcagctgcaagagtctggccctggcctggtcaagcctagcgaaacactgagcctgacctgcgccgtgtctggctactctatcaccagcgcctactattggaactggatcagacagcctcctggcaaaggactggaatggatcggctacatcagctacgacggcagaaacaactacaaccccagcctgaagaaccggatcaccatcaatcccgacaccagcaagaaccagttcagcctccagctgaacagcgtgacccctgaggataccgccgtgtactactgtgccagagaaggcgactacgacgtgggcaactactacgctatggactactggggccagggaaccctggtcacagtctcttct

SEQ ID NO: 399 - DNA, 369 bp, Artificial Sequence
  Synthetic Polynucloetide
gaagtgcaactggtggaaagtggcggcggactggtgcaacctggaagaagcctgagactgtcctgtgccgccagcggctactctatcacaagcgcctactactggaactgggtccgacaggctcctggcaaaggactggaatgggtgtcctacatcagctacgacggcagaaacaactacaaccccagcctgaagaaccgcttcaccatcagccgggacaacgccaagaagtccctgtacctccagatgaacagcctgagagccgaggacacagccctgtactattgcgccaaagagggcgactacgacgtcggcaactactacgctatggactactggggccagggaaccaccgtgactgtctcttct

SEQ ID NO: 400 - DNA, 354 bp, Artificial Sequence
  Synthetic Polynucloetide
ggcgtgaagctggacgagacaggcggaggacttgttcaacctggcggagccatgaagctgagctgtgtgaccagcggctttaccttcggccactactggatgaactgggtccgacagtcccctgagaaaggactggaatgggtcgcccagttcagaaacaagccctacaactacgaaacctactacagcgacagcgtgaagggcagattcaccatcagccgggacgacagcaagtccagcgtgtacctccagatgaacaacctgcgcgtggaagataccggcatctactactgtaccggggccagctacggcatggaatatctcggccagggcaccagcgtgaccgtgtctaca

SEQ ID NO: 401 - DNA, 378 bp, Artificial Sequence
  Synthetic Polynucloetide
caggtgcaactggtggaatctggcggcaatctggttcagcctggcggctctctgagactgtcttgtgccgccagcggcttcaccttcggcagcttttctatgagctgggtccgacaagctcctggcggaggacttgaatgggtggcaggactgtctgccagaagcagcctgacacactacgccgactctgtgaagggcagattcaccatcagccgggacaacgccaagaacagcgtgtacctccagatgaacagcctgagagtggaagataccgccgtgtactactgcgccagaagaagctacgacagcagcggctactggggccacttctacagctacatggatgtgtggggccagggcaccctggttacagtttct

SEQ ID NO: 402 - DNA, 342 bp, Artificial Sequence
  Synthetic Polynucloetide
gaagttcaactggtggaaaccggcggcaacctggttcaacctggcgcttctctgagactgagctgtgccgccagcggctttagctttagcggaacagccatgcactgggtccgacaggcacctggcaaaggactggaatgggtgtccaccatcagcagcacaggcagaagcacctactaccgggacagcgtgaagggcagattcaccatctccagagacaacagcaagaacaccctgtacctccagatgaacagcctgagaggcgaggacaccgccgtgtactattgtgccagagtgtccttcgactactggggccagggaaccctggtcacagtctcttct

SEQ ID NO: 403 - DNA, 354 bp, Artificial Sequence
  Synthetic Polynucloetide
gaagttcagctggttgaaagcggcggagcctttgttcagcctggcggatctctgagactgagctgtgccgccagcggcttcacattttccagctacgccatgacctgggtccgacaggctcctggcaaaggactggaatgggtgtccaccatctccggcagaggcagaagcaccttctacgccgatagcgtgaagggcagattcacaatcagccgggacaacagcaagaacaccctgtacctccagatgaacagcctgagagccgaggataccgccgtgtactactgtgcccggtactatcacgctggcgcctttgatctttggggccagggaacactggtcaccgtgtcatct

SEQ ID NO: 404 - DNA, 369 bp, Artificial Sequence
  Synthetic Polynucloetide
caagttcaactggttcaatcaggcggaggcgtggtgcaacctggtggctctctgagagtgtcttgtgctgcctctggcgtgaccctgagcgactatggaatgcactgggtccgacaggcccctggcaaaggacttgagtgggtcgccttcatcagaaacgacggcagcgacaagtattacgccgacagcgtgaagggcagattcaccatcagccgggacaacagcgagaaaaccgtgtctctccagatgtctagcctgagagccgaggacaccgccgtgtactactgtgccaagaatggcgagagcggccctctggactactggtatctggatctgtggggcagaggcaccctggtcacagtctcttct

SEQ ID NO: 405 - DNA, 342 bp, Artificial Sequence
  Synthetic Polynucloetide
caagtgaagctccagcagagcggccctagccttgtgaaacctggcgcttccgtgaagatgagctgcaaggccagcggctacaccttcaccgatttctacatgaaatgggtcaagcagagccacggcaagtctctggaatggatcggcgacatcaaccccaacatcggagacaccttctacaaccagaagttcaagggcaaagccacactgaccgtggacaagagcagcagcaccgcctacatgcagctcaacagcctgaccagcgaggacagcgccgtgtacttttgttccgtgggctacttcgacgtgtggggagccggaacaaccgtgacagtctcttct

SEQ ID NO: 406 - DNA, 390 bp, Artificial Sequence
  Synthetic Polynucloetide
gaagttcaactggtgcagagcggagccgaagtgaagaagccaggcgagagcctgaagattagctgcaaaggcagcggctacagcttcaccagctactggatcggctgggtccgacagatgcctggcaaaggactggaatggatgggcatcatctaccccggcgacagcgacaccagatacagccctagctttcagggccaagtgaccatctccgccgacaagagcatcagcacagcctacctccagtggtcctctctgaaggccagcgataccgccatgtactactgcgccagacaagtctggggatggcaaggcggcatgtaccccaggtctaactggtggtacaacctggactcttggggccagggcacactggtcacagtctcttct

SEQ ID NO: 407 - DNA, 360 bp, Artificial Sequence
  Synthetic Polynucloetide
gaagtgcagctcgaacagtctggccccgagcttgtgaaacctggcgcttccgtgaagatgagctgcaaggccagcggctacaccttcaccaactactacatgaaatgggtcaagcagagccacggcaagtccctggaatggatcggcgatctgaaccccaacaacggcgacaccttctacaaccagaagttcaagggcaaagccacactgaccgtggacaagagcagcaacaccgcctacatgcagctcaactccctgaccagcgaggacagcgccgtgtactactgtgccagaaccggcagatacgaagagaacgctatggactactggggccagggcacaagcgtgacagtctcttct

SEQ ID NO: 408 - DNA, 351 bp, Artificial Sequence
  Synthetic Polynucloetide
caggttcagctggtgcagtctggcagcgagctgaagaaacctggcgagagcgtgaagatcagctgcaaggccagcggctacaccttcacacactacagcatgaactgggtccgacaggcccctggacaaggactggaatggatgggcagaatcaacaccgagacaggcgagcccctgtacgccgacgatttcaagggcagattcgtgttcagcctggacaccagcgccagcacagcctatctccagatcagctctctgaaggccgaggacaccgccgtgtactactgctccaacgactacctgtactccctggactattggggccagggcacactggtcacagtgtctagt

SEQ ID NO: 409 - DNA, 351 bp, Artificial Sequence
  Synthetic Polynucloetide
caggtgcagctcgttcagagtggccccgaagtgaaaaagccaggcgagtccgtgaagatttcctgcaaagcctccggctacacattccggcactactctatgaattgggtcaagcaggccccaggccagggccttaagtggatgggacgcatcaataccgagtccggcgtgccaatctacgccgatgacttcaaaggccggttcagcttcaccgtggatacctctgcctccaccgcctacctggaaatcagcagcctgaccagcgaggatacagctgtgtacttctgtagcaacgattacctctacagcctggatttctggggacagggaaccacactgaccgtgtctagc

SEQ ID NO: 410 - DNA, 354 bp, Artificial Sequence
  Synthetic Polynucloetide
caggttcagctgcaagagtctggccccggactggtcaagcctagccaaacactgagcctgacctgtaccgtgtccggctacagcatcaccagcgactacacctggaactggatcagacagcctcctggcaacggactggaatggatcggctacatcacctacagcggcagcaccagctacaaccccagcctgaaaagccgggtgctgatctccgtggacaccagcaagaatcaggtgtccctgaagctgagcagcgtgacagccgctgataccgccgtgtactactgtgccagactggggagaagatacacaatggactactggggccagggcaccaccgtgacagtttcttct

SEQ ID NO: 411 - DNA, 372 bp, Artificial Sequence
  Synthetic Polynucloetide
gaggtgcaactggttgagtctggcggaggactggtgcagcctggaagaagcctgagactgtcttgtgccgccagcggcttcaccttcgacgattatgccatgcactgggtccgacaggcccctggcaaaggacttgaatgggtgtccggcatctcctggaacagcggctctatcggctacgccgattccgtgaagggcagattcaccatcagccgggacaacgccaagaacagcctgtacctccagatgaactccctgagagccgaggacacagccctgtactactgcgccaaagacaaaggcggaggctactacgacttttggagcggcagcgattattggggccagggcacactggtcacagtgtctagc

SEQ ID NO: 412 - DNA, 381 bp, Artificial Sequence
  Synthetic Polynucloetide
gaagtgcagctccagcagtctggacctggcctggttaagcctagccagacactgagcctgacctgtgccatcagcggcgatagcgtgctgagcaacagcgacacctggaactggatcagacagagccctagcagaggactggaatggctgggcagaacctaccacagaagcacttggtacgacgactacgccagctctgtgcggggcagagtgtccatcaatgtggacaccagcaagaaccagtacagcctgcaactgaacgccgtgacacctgaggataccggcgtgtactactgcgccagagacagactccaggacggcaactcttggagcgacgcctttgatgtgtggggccagggcacaatggtcaccgtttctagc

SEQ ID NO: 413 - DNA, 366 bp, Artificial Sequence
  Synthetic Polynucloetide
caggtgcaactggttcagtctggggccgaagtgaagaaacctggggcctctgtgaaggtgtcctgcaaggcttccggctacacctttaccagctacgacatcaactgggtccgacaggccacaggccaaggactggaatggatgggctggatgaaccccaacagcggcaataccggctacgcccagaaattccagggcagagtgaccatgaccagaaacaccagcatcagcaccgcctacatggaactgagcagcctgagaagcgaggacaccgccgtgtactattgcgccagaggcgacagcaactactggtcctactacggcatggacgtgtggggccagggaacactggttacagtttctagc

SEQ ID NO: 414 - DNA, 381 bp, Artificial Sequence
  Synthetic Polynucloetide
gaagtgcagctccagcagtctggacctggcctggttaagcctagccagacactgagcctgacctgtgccatcagcggcgatagcgtgtcctctaatagcgccgcctggaactggatcagacagagccctagcagaggactggaatggctgggcagaacctactaccgcagcaagtggtacagcgactacgccgtgtccgtgaagtcccggatcaccatcaatcccgacaccagcaagaaccagttcagcctgcaactgaacagcgtgacccctgaggataccgccgtgtactactgcgccagagatccctacgacttttggagcggctaccccgacgcctttgacatctggggacagggcacaatggtcaccgtttctagc

SEQ ID NO: 415 - DNA, 381 bp, Artificial Sequence
  Synthetic Polynucloetide
gaagtgcagctccagcagtctggacctggcctggttaagcctagccagacactgagcctgacctgtgccatcagcggcgattccatgctgagcaacagcgacacctggaactggatcagacagagccccagcagaggcctggaatggctgggcagaacataccacagaagcacttggtacgacgactacgccagctctgtgcggggcagagtgtccatcaatgtggacaccagcaagaaccagtacagcctgcaactgaacgccgtgacacctgaggataccggcgtgtactactgtgccagagtgcggctccaggacggcaattcttggagcgacgcctttgatgtgtggggccagggcacaatggtcaccgtttctagc

SEQ ID NO: 416 - DNA, 360 bp, Artificial Sequence
  Synthetic Polynucloetide
gaagtgcagctggttgaatcaggtggcggcctggttcaacctggcggatctctgagactgtcttgtgccgccagcggcttcagcttcaacacctacgccatgaactgggtccgacaggctcctggcaaaggactggaatgggtgtcccacatcagaagcaagagcaacaacttcgccacctactacgccgacagcgtgaaggacagattcaccatcagccgggacaacgccaagaacagcctgtacctccagatgaactccctgagagccgaggacaccgccgtgtattattgcgccagacaaggcggcgacttccctatggattattggggccagggcaccctggtcaccgtttcttct

SEQ ID NO: 417 - DNA, 354 bp, Artificial Sequence
  Synthetic Polynucloetide
caggtgcagctccaagagtctggccctggactggtcaagcctagccagacactgagcctgacctgtaccgtgtccggctacagcatcaccatcgactacacctggaactggatcagacagcctcctggcaaaggactggaatggatcggctacatcacctacagcggcagcaccgactacaaccccagcctgaaaagccgggtgctgatctccgtggacaccagcaagaatcaggtgtccctgaagctgagcagcgtgacagccgctgataccgccgtgtactactgtgccagactgggcagaagatacgccctggattattggggccagggcaccaccgtgacagtgtcatct

SEQ ID NO: 418 - DNA, 366 bp, Artificial Sequence
  Synthetic Polynucloetide
gaagttcagctggttgaatcaggcggaggactcgtgaaacctggcggctctctgagactgtcttgtgccgccagcggcttcaccttcagcaacttcgagatgaactgggtccgacaggccccaggcaaaggactggaatgggtgtccggcatcagctccaatggccggtacatcaactacgccgacagcgtgaagggcagattcaccatcagccgggacaacgccaagaacagcctgtacctccagatgaactccctgagagccgaggacaccgccgtgtactattgtgccagagtggtggacttcgaccaggactacaacggcttcgactattggggccagggcaccctggttaccgttagctct

SEQ ID NO: 419 - DNA, 360 bp, Artificial Sequence
  Synthetic Polynucloetide
gaagttcaactggttgagtctggtggcggcctggttaagcctggcggatctctgagactgagctgtgccgccagcggcttcacctttagcacatacggcatgagctgggtccgacaggcccctggaaaaggacttgagtgggtcgcctacatcaacaacggctccggctacatctactacgccgacagcgtgaagggcagattcaccatcagccgggacaacgccaagaacagcctgtacctccagatgaactccctgagagccgaggacaccgccgtgtactattgtgccagaggacagtggtggagcggcggagactttgattattggggccagggcaccctggtcaccgtttcttct

SEQ ID NO: 420 - DNA, 366 bp, Artificial Sequence
  Synthetic Polynucloetide
gaagtgcaactggttgaatctggcggcggactggttaagcctggcggatctctgaagctgagctgtgccgcctctggcttcgccttcagcatctacgatatgagctgggtccgacagacccctgagaagagactggaatgggtcgcctacatctctagcggcggagggacctactatcccgacacagtgaagggcagattcaccatctccagagacaacgccaagaacaccctgtacctccagatgagcagcctgaagtccgaggacaccgccatgtactactgcgccagacacagcggctatggcacacattggggagtgctgtttgcctactggggccagggaacactggtcacagtttctgct

SEQ ID NO: 421 - DNA, 372 bp, Artificial Sequence
  Synthetic Polynucloetide
gaagttcagctgcttgaatcaggcggcggactggttcaacctggcggatctctgagactgagctgtgccgccagcggctacagcatcacaagcgactatgcctggaactgggtccgacaggcccctggcaaaggactggaatgggtgtcctacatcagcaacagcggcagcaccagctacaaccccagcctgaagtcccggttcaccatcagcagagacaacagcaagaacaccctgtacctccagatgaacagcctgagagctgaggacaccgccgtgtattattgcgccaaagagcggaactacgactacgacgattactactacgctatggactactggggccagggaaccctggtcacagtctcttct

SEQ ID NO: 422 - DNA, 360 bp, Artificial Sequence
  Synthetic Polynucloetide
caagttcagctggttcagagcggagccgaagtgaagaaacctggggcctctgtgaaggtgtcctgcaaagcctctggcctgaccatcgaggactactacatgcactgggtccgacaggcccctggacaaggacttgaatggatgggctggatcgaccccgagaacggcgatacagagtacggccctaagttccagggcagagtgaccatgaccagagacaccagcatcaacaccgcctacatggaactgagccggctgagatccgatgacaccgccgtgtactattgcgccgtgcacaatgcccactacggcacttggtttgcctattggggccagggcacactggtcaccgttagctct

SEQ ID NO: 423 - DNA, 348 bp, Artificial Sequence
  Synthetic Polynucloetide
gaagtgcagctggttgaatcaggtggcggcctggttcaacctggcggatctctgagactgagctgtgccgcctctggcttcagcctgacaaattacggcgtgcactgggtccgacaggcccctggaaaaggactggaatgggtgtccgtgatttggagcggcggcagcaccgattacaacgccgccttcatcagccggttcaccatcagcgccgacaccagcaagaataccgcctacctccagatgaactccctgagagccgaggacaccgccgtgtactattgcgccagagaactgatccacgctatggacaactggggccagggaaccctggtcacagtctcttct

SEQ ID NO: 424 - DNA, 357 bp, Artificial Sequence
  Synthetic Polynucloetide
gaagtgcagctggttgaaagcggagccgaagtgaagaaacctggggcctctgtgaaggtgtcctgcaaggccagcggctacacctttaccagctactggattcactgggtccgacaggcccctggacaaggacttgagtggatgggcgagaacgacccctccaacggcaggaccaactacaacgagaagttcaagaaccgcgtgaccctgaccgtggacaccagcatctctaccgcctacatggaactgagccggctgagatccgatgacaccgccgtgtactattgcgccagaggacccaactacttttacagcatggactactggggccagggcacaatggtcaccgttagctct

SEQ ID NO: 425 - DNA, 357 bp, Artificial Sequence
  Synthetic Polynucloetide
caggttcagctggttcagtctggggccgaagtgaagaaacctggggcctctgtgaaggtgtcctgcaaggcttccggctacacctttaccggctcttggatgaactgggtccgacaggctcctggacagggactcgaatggatcggcagaatctatcctggcgacggcgagacaaactacaacggcaagttcaaggaccgcgtgacaatcaccgccgacaagagcacaagcaccgcctacatggaactgagcagcctgcggagcgaagataccgccgtgtactactgcgcccggatctacggcaacaacgtgtacttcgatgtgtggggccagggcacaaccgtgacagtctcttct

SEQ ID NO: 426 - DNA, 363 bp, Artificial Sequence
  Synthetic Polynucloetide
caagaacagctggttgaaagcggcggaggactggttcaacctggcggttctctgagactgagctgtgccgccagcggcttcaccttcagcgactactacatgagctggatcagacaggccccaggcaaaggactggaatgggtcgccacaatctaccccagcagcggcaagacctactacgccgattctgccaagggcagactgaccatctccagcgacaacgccaaggacagcctgtacctccagatgaacagcctgagagccgaggacaccgccgtgtactactgcaccagagatagctacgccgacgacgccgctctgtttgacatttggggccagggcaccaccgtgaccgtttcttct

SEQ ID NO: 427 - DNA, 351 bp, Artificial Sequence
  Synthetic Polynucloetide
caaatccagctggtgcagtctggccccgagctgaagaaacctggcgagacagtgaagatcagctgcaaggccagcggctacaccttcaccgactacagcatcaactgggtcaagagagcccctggcaagggcctgaaatggatgggctggatcaacaccgaaaccagagagcccgcctacgcctacgacttcagaggcagattcgccttcagcctggaaaccagcgccagcacagcctacctccagatcaacaacctgaagtacgaggacaccgccacctacttttgcgccctggactacagctacgctatggactattggggccagggcaccagcgtgacagtctcttct

SEQ ID NO: 428 - DNA, 372 bp, Artificial Sequence
  Synthetic Polynucloetide
caggtacagctgcaggaatctgggcccggacttgtcaagccaagtcagacactttctcttacatgtaccgtgagcggcggaagtataagcagtggaggcttttactggtcttggatacggcagcacccaggcaaaggcttggagtggattggatacattcatcattcaggatctacacactataatccatcccttaagtcccgggtcaccattagcattgatacgtctaagaatctgttcagtctcaggctgtcctccgtcactgctgccgacacagccgtgtactactgcgcctccttggtttactgcggaggcgactgttatagcggctttgattattgggggcaggggaccctcgtaaccgtgagctct

SEQ ID NO: 429 - DNA, 366 bp, Artificial Sequence
  Synthetic Polynucloetide
caggtccaactgcaagaaagcggacccggactggtgaagccttctgagacacttagtctgacgtgcacggtcagtggcggctccatctcctcctattattggtcatggatacgacaacccccaggtaagggcctggaatggattggctatatctactattcaggaagcacgaactacaatcccagcctgaagtcccgagtgacaatttcagtagataccagtaaaaaccagttcagtcttaaactgtcaagcgtgacagctgccgacaccgctgtgtattactgcgtctcactggtgtattgtggaggggattgttatagcgggttcgattattggggacagggaaccctggtgactgtatcttcc

SEQ ID NO: 430 - DNA, 381 bp, Artificial Sequence
  Synthetic Polynucloetide
caagttactttgaaggagtctggacctgtactggtgaagccaaccgagacactgacactcacgtgtacagtgagtggtttttccttgatcaacgcaaggatgggcgtcagctggatcaggcaaccccctggcaaggctctggaatggctcgctcacatattcagcaatgccgaaaaaagctaccggacaagcctgaaatcccgcctgactatttccaaggacacttctaagtctcaggtggtgctgaccatgaccaacatggacccggtggacaccgccacctattactgcgcaagaatccctgggtatggtgggaatggtgactaccattattatgggatggatgtgtgggggcaaggcacaaccgtaacggtctcaagc

SEQ ID NO: 431 - DNA, 360 bp, Artificial Sequence
  Synthetic Polynucloetide
cagatccagttggtggaatcagggggcggtgtggtgcagccgggtaggagcctgagactgtcatgcgtggcgtctggcttcacattcaagaactacggcatgcactgggtgcgacaggcccccggaaagggtttggagtgggtcgccgtgatctggtacgacggatctaatgagtattacggagatcctgtgaagggaaggttcaccatctcccgcgacaatagcaaaaatatgctctacctgcaaatgaactcactcagggcggatgatacggcggtctactattgcgctcgctcagggattgctgtggccggcgcattcgattactggggacagggtaccctggtgacagtatcaagc

SEQ ID NO: 432 - DNA, 366 bp, Artificial Sequence
  Synthetic Polynucloetide
caactgcaactgcaagagtctggccctggcctggtcaagcctagcgaaacactgagcctgacctgtaccgtgtctggcggcagcatcagctccagcacatattactggggctggatcagacagcctcctggcaaaggactggaatggatcggctccatctacttcaccggcagcaccgactacaaccccagcctgaagtccagggtgtccatctccgtggacaccagcaagaaccagttctccctgaagctgagcagcgtgacagccgctgataccgccgtgtactactgcgccaaagaggacgatagcagcggctactacagcttcgactattggggccagggcaacctggtcaccgttagctct

SEQ ID NO: 433 - DNA, 363 bp, Artificial Sequence
  Synthetic Polynucloetide
caagttcagctggtgcagtctggcagcgagctgaagaaacctggggcctctgtgaaggtgtcctgcaaggcttccggctacaccttcaacacctacgccatgaattgggtccgacaggctccaggccaaggactggaatggatgggctggatcaacaccaacaccggcaatcccacatacgcccagggcttcaccggcagattcgtgttctctctggacacctccgtgtccaccgcctacctccagatcagctctctgaaggccgaggataccgccgtgtactactgcgccagacggtacttcgattggctgctgggagccttcgacatctggggccagggaacaatggtcaccgtgtctagt

SEQ ID NO: 434 - DNA, 351 bp, Artificial Sequence
  Synthetic Polynucloetide
caagttcagcttgttcagagcggagccgaagtgaagaaacccggcagctctgtgaaggtgtcctgcaaggcttccggctacgcctttagcagcagctggatgaactgggtccgacaggctcctggacagggccttgaatggatgggcagaatctatcccggcgacggcaatacccactacgcccagaaattccagggccgcgtgacactgacagccgacaagtctacaagcaccgcctacatggaactgagcagcctgagaagcgaggacaccgccgtgtactattgcggcgaaggctatctggaccctatggactattggggccagggcacactggtcaccgttagctct

SEQ ID NO: 435 - DNA, 345 bp, Artificial Sequence
  Synthetic Polynucloetide
gaggtgcagctggttgaatctggcggaggactggttcagcctggcggatctctgagactgtcttgtgccgccagcggctacaccttcaccacctattggatgcactgggtccgacaggcccctggcaaaggacttgagtgggtcggatatatcaggcccagcaccggctacacagagtacaaccagaagttcaaggaccgcttcaccatcagcgccgacaccagcaagaataccgcctacctccagatgaacagcctgagagccgaggacaccgccgtgtactactgtgccagatccagatggctgctggactattggggccagggcacactggttacagtttct

SEQ ID NO: 436 - DNA, 351 bp, Artificial Sequence
  Synthetic Polynucloetide
gaagtgcagctggttgaatcaggtggcggcctggttcaacctggcggatctctgagactgagctgtgccgccagcggcttcaccttcagcgactactttatgagctgggtccgacaggcccctggcaaaggacttgaatgggtcgccaccatcagcaatggcggcacctacacttactaccccgacagcgtgaagggcagattcaccatctccagagacaacagcaagaacaccctgtacctccagatgaactccctgagagccgaggacaccgccgtgtactactgcgccagattcgacggctacatcttcgactattggggccagggcaccctggtcacagtctcttct

SEQ ID NO: 437 - DNA, 369 bp, Artificial Sequence
  Synthetic Polynucloetide
gaagttcagctggttgaatctggcggcggactggttcaacctggcggatctctgagactgagctgtgccgcctctggctacgccttcagcaacagctggatcaactgggtccgacaggcccctggcaaaggactggaatgggtcggacaaatctaccccggcgactacgacaccaactacaacggcaagttcaagggcagattcaccatcagccgggacaagagcaagaacaccgcctacctccagatgaactccctgagagccgaggacaccgccgtgtactattgtgctagaggcggctccatctactacggcaacctgggcttcttcgacgtgtggggacagggcacactggtcacagtctcttct

SEQ ID NO: 438 - DNA, 348 bp, Artificial Sequence
  Synthetic Polynucloetide
caagttcagctggttcagagcggagccgaagtgaagaaacctggggcctctgtgaaggtgtcctgcaaggccagcggctacagcttcatcgagtacaccatcaactgggtccgacaggcccctggacaaggcctggaatggatcggcaacatcgacccctactacggcacaacctactacaaccagatgttcaccggcagagccacactgaccgtggacacctctatcagcaccgcctacatggaactgagccggctgagatccgatgacaccgccgtgtactattgtgccagaggcagcgcctggtttccctattggggacagggaaccctggtcaccgttagctct

SEQ ID NO: 439 - DNA, 345 bp, Artificial Sequence
  Synthetic Polynucloetide
caagttcagctggttcagagcggagccgaagtgaagaaacctggggcctctgtgaaggtgtcctgcaaggccagcggctacaccttcagcgactattgggtgcactgggtccgacaggctccaggacaaggactggaatggatgggagccatcgacggcagcgataccttcaacgattacagccagaaattcaaaggccgcgtgaccatgaccagagacaccagcatcagcaccgcctacatggaactgagccggctgagatccgatgacaccgccgtgtactattgtgccagaggcggcctgctgcagtattggggacagggaacactggtcaccgtgtcctct

SEQ ID NO: 440 - DNA, 357 bp, Artificial Sequence
  Synthetic Polynucloetide
caggttcagctccagcagtctggacctgagctggttaagcctggcgcttccgtgaagatcagctgcaaggcttccggctacgccttcagcagcagctggatgaactgggtcaaacagaggcccggcaaaggactggaatggatcggcagaatctaccccggcgacgaggacaccaattacagcggcaagttcaaggacaaggccacactgaccgccgacaagagcagcaccacagcctacatgcagctgagcagcctgaccagcgaggatagcgccgtgtacttctgtgccagaagcctgctgtacggcgactacctggattattggggccagggcacaaccctgacagtgtctagc

SEQ ID NO: 441 - DNA, 363 bp, Artificial Sequence
  Synthetic Polynucloetide
caagttcagctgcaacagagcggagccgagcttgtcagacctggcagctctgtgaagattagctgcaaagccagcggctacgccttcagcagctactgggtcaactggatgaagcagcggcctggacagggcctcgaatggatcggccaaatctatcctggcgacggcgacaccaactacaacggcaagtttaagggcagagccaccgtgaccgccgacaagagcagcagcacatcctacatgcagttcagcagcctgaccagcgaggacagcgccgtgtatttctgtgccagatccatcaccaccgtcgtgggctgcgctatggattattggggccagggcacaagcgtgaccgtgtcatct

SEQ ID NO: 442 - DNA, 360 bp, Artificial Sequence
  Synthetic Polynucloetide
gaggttcagctgcttgagtctggcggaggactggttcaacctggcggaagcctgagactgtcttgtgccgccagcggcttcacctttagcagctacgccatgagctgggtccgacaggctcctggcaaaggactggaatgggtgtccgtgatctctggctctggcggcagacccaattacgccgattctgtgaagggcagattcaccatcagccgggacaacagcaagaacaccctgtacctccagatgaacagcctgcgcgacgaggataccgccgtgtactattgtgccaaggtggactacagcaactacctgttcttcgactactggggccagggcaccctggtcacagtttctagc

SEQ ID NO: 443 - DNA, 351 bp, Artificial Sequence
  Synthetic Polynucloetide
cagatccagctggtgcagtctggccccgagctgaagaaacctggcgagacagtgaagatcagctgcaaggccagcggctacaccttcaccgactacagcatcaactgggtcaagagagcccctggcaagggcctgaaatggatgggctggatcaacaccgaaaccagagagcccgcctacgcctacgacttcagaggcagattcgccttcagcctggaaaccagcgccagcacagcctacctccagatcaacaacctgaagtacgaggacaccgccacctacttttgcgccctggactacagctacgctatggactattggggccagggcaccagcgtgacagtctcttct

SEQ ID NO: 444 - DNA, 363 bp, Artificial Sequence
  Synthetic Polynucloetide
caagttcagctggttcagagcggagccgaagtgaagaaacctggggcctctgtgaaggtgtcctgcaaggcttccggctacacctttaccaactacggcatctcctgggtccgacaggcaccaggacaaggactggaatggatgggatggctgagcgcctacagcggcaataccatctacgcccagaaactccagggcagagtgaccatgaccaccgacaccagcaccaccaccgcctacatggaactgagaagcctgagatccgacgacaccgccgtgtattattgcgccagagacagaatcgtcgtgcggcccgactacttcgattattggggccagggaaccctggtcaccgtgtcatct

SEQ ID NO: 445 - DNA, 351 bp, Artificial Sequence
  Synthetic Polynucloetide
gaagttcagctggttgaatcaggtggcggcctggttcaacctggcggatctctgagactgtcttgtgccgccagcggcttcactttcagcggcagatccatgaactgggtccgacaggcccctggcaaaggactggaatgggtgtcctacatcagcagcgacagccggaccatctactacgccgatagcgtgaagggcagattcaccatctccagagacaacgccaagaacagcctgtacctccagatgaactccctgagagccgaggacacagccgtgtattattgtgccagaggcggccacggctacttcgatctttggggcagaggcaccctggtcaccgtttcttct

SEQ ID NO: 446 - DNA, 363 bp, Artificial Sequence
  Synthetic Polynucloetide
caagttcagctggttgaatcaggcggaggcgttgtgcagcctggcagaagtctgagactgtcttgtgccgccagcggcttcaccttcagcagctatggaatgcactgggtccgacaggcccctggcaaaggacttgaatgggtggccggcatttggtgggacggcagcaatgagaagtacgccgacagcgtgaagggcagattcaccatctccagagacaacagcaagaacaccctgtacctccagatgaacagcctgagagccgaggacacagccgtgtattattgcgccaaagaggccccttactacgccaaggactacatggacgtgtggggcaagggcaccacagtgactgtctcttct

SEQ ID NO: 447 - DNA, 360 bp, Artificial Sequence
  Synthetic Polynucloetide
gaagtgcagctggttgaatcaggtggcggcctggttcaacctggcggatctctgagactgagctgtgccgccagcggcttcaacatcaaggacacctacatccactgggtccgacaggcccctggcaaaggacttgaatgggtcgccagaatctaccccaccaacggctacaccagatacgccgactctgtgaagggcagattcaccatcagcgccgacaccagcaagaacaccgcctacctccagatgaactccctgagagccgaggacaccgccgtgtactactgtagcagatggggcggctggggcttctacgctatggattattggggccagggaaccctggtcaccgtgtcatct

SEQ ID NO: 448 - DNA, 351 bp, Artificial Sequence
  Synthetic Polynucloetide
caggtgcagctggttgaatctggcggcggacttgtgaagcctggcggatctctgagactgagctgtgccgccagcggcttcaccttcagcgactactacatgacctggatcagacaggcccctggcaaaggactggaatggatcagctacatcagcagcagcggcagcaccatctactacgccgatagcgtgaagggcagattcaccatcagccgggacaacgccaagaacagcctgtacctccagatgaactccctgagagccgaggacaccgccgtgtactactgcgccagagacagaaacagccacttcgactattggggccagggcaccctggtcacagtttctagc

SEQ ID NO: 449 - DNA, 351 bp, Artificial Sequence
  Synthetic Polynucloetide
caggtgcagctggttgaatctggcggcggacttgtgaagcctggcggatctctgagactgagctgtgccgccagcggcttcaccttcagcgatcactacatgagctggatcagacaggcccctggcaaaggactggaatggttcagctacatcagcagcagcggcggcatcatctactacgccgatagcgtgaagggcagattcaccatcagccgggacaacgccaagaacagcctgtacctccagatgaactccctgagagccgaggacaccgccgtgtactactgtgccagagatgtgggcagccacttcgactattggggccagggaacactggtcaccgtttctagc

SEQ ID NO: 450 - DNA, 372 bp, Artificial Sequence
  Synthetic Polynucloetide
caggtgcagctggttgaatctggtggcggagtggtgcagtctggcagaagcctgagactgtcttgtgccgccagcggcttcaccttcagaaactacggaatgcactgggtccgacaggcccctggcaaaggacttgaatgggtcgccgtgatttggtacgacggcagcgacaagtactacgccgattctgtgcggggcagattcaccatcagccgggacaacagcaagaacaccctgtacctccagatgaacagcctgagagccgaggacaccgccgtgtactactgtgccagagatggctacgacatcctgaccggcaatcccagagacttcgactattggggccagggcacactggtcacagtttctagc

SEQ ID NO: 451 - DNA, 366 bp, Artificial Sequence
  Synthetic Polynucloetide
gaggtgcagctggttgaatctggcggaggactggttcagcctggcggatctctgagactgtcttgtgccgccagcggcttcccattcagcagctacgatatgcactgggtccgacaggccacaggcaaaggactggaatgggtgtccgccatcggaacagccggcgctacctattatcccggctctgtgaagggcagattcaccatcagcagagagaacgccaagaacagcctgtacctccagatgaactccctgagagccggcgataccgccgtgtactattgtgccagaggcgactacgtgtggggcacctacagacccctgttcgattattggggccagggcaccctggtcacagtttctagt

SEQ ID NO: 452 - DNA, 354 bp, Artificial Sequence
  Synthetic Polynucloetide
caggttcagctgcaagagtctggccctggcctggtcaagcctagcgaaacactgagcctgacctgtaccgtgtctggggccagcatcagcagcttctactggtcctggatcagacagcctcctggcaaaggactggaatggatcggctacatctactacagcggcaccaccaactacaaccccagcctgaagtccagagtgaccatcagcgtggacaccagcaagaaccagttctccctgaagctgagcagcgtgacagccgccgatacagccgtgtactactgtgccagaattgccgtggccggcttcttcttcgactattggggccagggcaccctggtcacagtttctagc

SEQ ID NO: 453 - DNA, 369 bp, Artificial Sequence
  Synthetic Polynucloetide
caggttcagctggttcagtctggggccgaagtgaagaaacctggggcctctgtgaaggtgtcctgcaaggccagcggctacacctttaccaactactacatgcactgggtccgacaggcccctggactgggacttgagtggatgggcatcatcaaccctagcgacggcagcacaagctacgcccagaaattccagggcagagtgaccatgaccagagacaccagcaccaacaccgtgtacatggacctgagcagcctgagaagcgaggacaccgccgtgtactattgtgccagaggcggcaacagcgccttctacagctactacgacatggacgtgtggggccagggcaccacagtgacagtttctagc

SEQ ID NO: 454 - DNA, 348 bp, Artificial Sequence
  Synthetic Polynucloetide
caggttcagctccagcagtctggacctgagctggttaagcctggcgcttctgtgcggatctcttgcaaggccagcggctacaccttcaccacctactacatccactgggtcaagcagcggcctggacagggactcgaatggatcggctggatctaccccggcaacgtgaacaccaactacaacgagaagttcaagggcaaagccacactgaccgccgacaagagcagcagcacagcctacatgcagctgaccagcctgacctctgaggacagcgccgtgtacttttgtgccagaggcgtgtactacttcgactactggggccagggcaccatcctgacagtttctagc

SEQ ID NO: 455 - DNA, 357 bp, Artificial Sequence
  Synthetic Polynucloetide
caggttcagctgcaagagtctggccctggcctggtcaagcctagccaaacactgagcctgacctgtaccgtgtctggcggcagcatcaacaacaacaattactactggacctggatcagacagcaccccggcaaaggactggaatggatcggctacatctactacagcggcagcaccttctacaaccccagcctgaagtccagagtgaccatcagcgtggacaccagcaagacccagttctccctgaagctgagcagcgtgacagccgccgatacagccgtgtactactgcgccagagaagataccatgaccggcctggatgtgtggggccagggaacaacagtgacagtgtctagc

SEQ ID NO: 456 - DNA, 366 bp, Artificial Sequence
  Synthetic Polynucloetide
gaagttcagctggttcagagcggagccgaagtgaagaaacctggggcctctgtgaaggtgtcctgcaaggcttccggcgataccttcaagcggtactacgtgcactgggtccgacaggctccaggacaaggactggaatggatgggcatcatcaaccccagcggcgtgtccacaacatacgcccagaaattccagggcagagtgaccatgaccagagacaccagcacctccaccgtgtacatggaactgagcagcctgagaagcgaggacaccgccgtgtactactgtgctgaagtgcgcggcagcggcttcaactacttcggcatggatgtgtggggccagggcacactggttaccgtttcttct

SEQ ID NO: 457 - DNA, 366 bp, Artificial Sequence
  Synthetic Polynucloetide
gaggttcagctgcttgagtctggcggaggactggttcaacctggcggaagcctgagactgtcttgtgccgccagcggcttcacctttagcagctacgccatgagctgggtccgacaggctcctggcaaaggactggaagtggtggtgtctgccatttctggcggcggaggcagaacctactacgccgattctgtgaagggcagattcaccatcagccgggacaacagcaagaacaccctgtacctgcagatgaacagcctgagagccgaggacaccgccgtgtactactgtgccagagaagagatggccttccgggcctacagattcgacatctggggccagggaaccctggtcacagtttctagc

SEQ ID NO: 458 - DNA, 372 bp, Artificial Sequence
  Synthetic Polynucloetide
gaagtgcagctggtggaatctggcggcgaccttgtgaaacctggcggctctctgaagctgagctgtgccgtgtccggcttcacctttagcagctacggcatgagctgggtccgacagacccctgacaagagactggaatgggtcgccacagtgtctagcggcggcacctacacatattaccccgacagcgtgaagggcagattcaccatcagccgggacaacgccaagaacaccctgtacctccagatgagcagcctgaagtccgaggacagcgccatgtactactgcgccagacaccggggcaattactacgccacctattattacgctatggactactggggccagggcaccagcgtgacagtttcttct

SEQ ID NO: 459 - DNA, 357 bp, Artificial Sequence
  Synthetic Polynucloetide
gaagttcagctggttgaatcaggcggcggactggttcaacctggcggatctctgagactgagctgtgccgccagcggcttcacattttccgacgcctggatggactgggtccgacaggctcctggaaaaggactggaatgggtcggagagatccggtccaaagtgaacaaccacgaaacctactatgccgagagcgtgaagggcagattcaccatcagccgggacgacagcaagaacagcctgtacctccagatgaactccctgaaaaccgaggacaccgccgtgtactactgcgccagaaacgactacttcgactactggggccagggaaccaccgtgacagtgtctagtgcttcc

SEQ ID NO: 460 - DNA, 369 bp, Artificial Sequence
  Synthetic Polynucloetide
gaggttcagctgcaagagtctggggccgaagtgaagaaacctggcagcagcgtgaaggtgtcctgcaaggccagcggcttcaacatcaaggacacctacatgcactgggtccgacaggcccctggacaaggacttgagtggatgggcagaatcgaccccgccaacggcaacagcaaatacgtgcccaagttccagggcagagtgaccatcacagccgacgagagcacaagcaccgcctacatggaactgagcagcctgagaagcgaggacaccgccgtgtactactgtgcccctttcggctactacgtgtccgactacgccatggcctattggggccagggaaccaccgtgacagtgtctagtgcatct

SEQ ID NO: 461 - DNA, 360 bp, Artificial Sequence
  Synthetic Polynucloetide
caagttcagctggttcagtctggggccgaagtgaagaaacctggcagcagcgtgaaggtgtcctgcaaagcaagcggcggcacctttagcagctacgccatctcttgggtccgacaggcaccaggacaaggactggaatggatgggcctgattatccccagatacggcaaggccagatacgcccagaaattccagggcagagtgaccatcaccgccgacgagtctacaagcaccgcctacatggaactgagcagcctgagaagcgaggacacagccgtgtattattgcgcccggaactggccctactactacatggatttttggggccagggaaccctggtcaccgtgtctagtgcatct

SEQ ID NO: 462 - DNA, 366 bp, Artificial Sequence
  Synthetic Polynucloetide
gaggtgcagctggttgaatctggcggcggacttgtgaagcctggcggatctctgagactgagctgtgccgccagcggcttcacctttagcaatgcctggatgagctgggtccgacaggcccctggaaaaggactggaatgggtcggacggatcaagagcaagaccgaaggcggcaccaccgattatgctgcccctgtgaagggcagattcaccatcagcagggacgacagcaagaacaccctgtacctccagatgaacagcctgaaaaccgaggacaccgccgtgtactactgcaccacaccttacgagtggtcttggtacgactactggggccagggcacactggtcacagtgtcatctgcatct

SEQ ID NO: 463 - DNA, 363 bp, Artificial Sequence
  Synthetic Polynucloetide
caggttcagctggttcagtctggggccgaagtgaagaaacctggggcctctgtgaaggtgtcctgcaaggcttccggctacacctttaccagctactacatgcactgggtccgacaggcccctggacaaggacttgagtggatgggcatcatcaaccctagcggcggcagcacaagctacgcccagaaattccagggcagagtgaccatgacacacgacaccagcacctccaccgtgtacatggaactgagcagcctgagaagcgaggacaccgccgtgtactactgcgccagatccttcttcaccggcttccacctggattactggggccagggaacactggtcacagtgtcatctgcatct

SEQ ID NO: 464 - DNA, 384 bp, Artificial Sequence
  Synthetic Polynucloetide
caggttcagctggttcagagcggagccgaagtgaagaaacctggggcctctgtgaaggtgtcctgcaaggcttccggctacacctttaccaactacctgatcgagtgggtccgacaggctccaggacaaggactggaatggatgggcctgattaaccctggcagcggcggcaccaactacaacgagaagttcaagggcagagtgaccatgaccaccgacaccagcacaagcaccgcctacatggaactgcggagcctgagaagcgacgacaccgccgtgtattattgcgccagaagaagccctctcggctcttggatctactacgcctatgacggcgtggcctattggggccagggaacactggttacagtgtcctctgccagc

SEQ ID NO: 465 - DNA, 342 bp, Artificial Sequence
  Synthetic Polynucloetide
gaagttcagctggttgaatcaggcggcggactggttcaacctggcggatctctgagactgagctgtgccgccagcggcttcaccttcagcagatactggatgagctgggtccgacaggcccctggcaaaggacttgaatgggtcgccgagatcaaccccgacagcagcaccatccagtacaccccatctctgaaggcccggttcaccctgtccgtggacagaagcaagaacaccctgtacctccagatgaactccctgagagccgaggacaccgccgtgtactattgtgccagacctgcctattggggccagggaacactggtcacagtgtctagcgcttcc

SEQ ID NO: 466 - DNA, 363 bp, Artificial Sequence
  Synthetic Polynucloetide
caagttcagctggttcagtctggggccgaagtgaagaaacctggggcctctgtgaaggtgtcctgcaaggcttccggctacacctttaccggctacaacatccactgggtccgacaggctcccggccaaagacttgaatggatgggcgctatctaccccggcaacggcgataccagctacaagcagaaattccggggcagagtgacaattaccagagacaccagcgccagcaccgcctacatggaactgtctagcctgagaagcgaggacaccgccgtgtactattgcgccagaggcgaaacagccagagccacctttgcctattggggccagggaaccctggtcacagtgtctagtgcttcc

SEQ ID NO: 467 - DNA, 363 bp, Artificial Sequence
  Synthetic Polynucloetide
gaagtgcagctggttcagtctggggccgaagtgaagaaacctggggcctctgtgaaggtgtcctgcaaggccagcggctacagattcaccaactactggattcactgggtccgacaggctccaggccaaggactggaatggatcggcggcatcaaccccggcaacaactacgccacctaccggcggaagtttcagggcagagtgaccatgaccgccgacaccagcacaagcaccgtgtacatggaactgagcagcctgagaagcgaggacaccgccgtgtactactgcaccagagaaggctacggcaactacggcgcttggtttgcctattggggccagggcacactggtcacagtttctagc

SEQ ID NO: 468 - DNA, 375 bp, Artificial Sequence
  Synthetic Polynucloetide
gaagtgcagctggttgagtctggcggcggacttgtgaaacctggcggaagcctgaagctgagctgtgccgcttctggcttcgccttcagcatctacgacatgagctgggtccgacaggcccctggcaaaggacttgagtgggtcgcctacatcagctctggcggagggacaacctactatcccgacaccgtgaagggcagattcaccatcagccgggacaacgccaagaacaccctgtacctccagatgagcagcctgagagccgaggacaccgccatgtactactgtgccagacacagcggctacggcagctcttacggcgtgctgtttgcctattggggccagggcacactggtcaccgttagctctacgcgt

SEQ ID NO: 469 - DNA, 360 bp, Artificial Sequence
  Synthetic Polynucloetide
caggtgcagcttcagcagtctggcggaggacttgttcagcctggcggaagcctgaagctgagctgtgccgcctctggcatcgacttcagcagatactggatgagctgggttcgcagagcccctggcaaaggactggaatggatcggcgagatcaaccccgacagcagcaccatcaattacgcccctagcctgaaggacaagttcatcatcagccgggacaacgccaagaacaccctgtacctccagatgagcaaagtgcgcagcgaggacacagccctgtactactgtgccagcctgtactatgactacggcgacgctatggactactggggccagggaacaagcgtgaccgttagctct

SEQ ID NO: 470 - DNA, 366 bp, Artificial Sequence
  Synthetic Polynucloetide
gaagtgcagctggttgaatcaggtggcggcctggttcaacctggcggatctctgagactgagctgtgccgcctctggcttcgccttcagcatctacgatatgagctgggtccgacaggcccctggcaaaggacttgagtgggtcgcctacatctcttccggcggaggcacatattaccccgacaccgtgaagggcagattcaccatcagcagagacaacagcaagaacaccctgtacctccagatgaactccctgagagccgaggacaccgccgtgtactattgtgccagacacagcggctacggcacacactggggagtgctgtttgcctattggggccagggcacactggtcaccgtgtctagc

SEQ ID NO: 471 - DNA, 363 bp, Artificial Sequence
  Synthetic Polynucloetide
gaagttcagctggttgaatctggcggcggactggttcaacctggcggatctctgagactgagctgtgccgcctctggctacgcctttagcagctactgggtcaactgggttcgacaggcccctggcaaaggactggaatgggtcgcccaaatctatcccggcgacggcgacaccaactacaacggcaagttcaagggcagattcaccatcagccgggacaacagcaagaacaccctgtacctccagatgaactccctgagagccgaggacaccgccgtgtactattgtgccagatccatcaccaccgtcgtgggctgcgctatggattattggggccagggaaccctggtcaccgtgtcctct

SEQ ID NO: 472 - DNA, 366 bp, Artificial Sequence
  Synthetic Polynucloetide
caactccagctgcaagagtctggccctggcctggtcaagcctagcgaaacactgagcctgacctgtaccgtgtctggcggctctatcagctccggcagctatttctggggctggatcagacaacctcctggcaaaggactggaatggatcggctccatctactacagcggcatcacctactacaaccccagcctgaagtccagagtgaccatctccgtggacaccagcaagaaccagttctccctgaagctgagcagcgtgacagccgccgataccgccgtgtattattgtgccagacatgacggcgctgtggccggcctgtttgattattggggacagggcaccctggtcaccgtgtcatctgct

SEQ ID NO: 473 - DNA, 354 bp, Artificial Sequence
  Synthetic Polynucloetide
caagttcagctgcaagagtctggccccggactggtcaagcctagccaaacactgagcctgacctgtaccgtgtccggctacagcatcaccagcgactacacctggaactggatcagacagcctcctggcaacggactggaatggatcggctacatcacctacagcggcagcaccagctacaaccccagcctgaaaagccgggtgctgatctccgtggacaccagcaagaatcaggtgtccctgaagctgagcagcgtgacagccgctgataccgccgtgtactactgtgccagactggggagaagatacacaatggactactggggccagggcacaaccgtgacagtctcttct

SEQ ID NO: 474 - DNA, 354 bp, Artificial Sequence
  Synthetic Polynucloetide
caagtgcagctggttgaatctggcggcggactggttaagcctggcggttctctgagactgagctgtgccgcttctggcgacagcatcacaagcggctactggaactggatcagacaggcccctggcaaaggactggaatggttcagctacatcagctactccggcagcacctactacaaccccagcctgaagtcccggttcaccatcagcagagacaacgccaagaacagcctgtacctccagatgaactccctgagagccgaggacaccgccgtgtactattgcgccagacctaactaccccttctacgctatggactactggggccagggcacactggtcacagtctcttct

SEQ ID NO: 475 - DNA, 354 bp, Artificial Sequence
  Synthetic Polynucloetide
gaagtgcagctggttgaatcaggtggcggcgttgtgcagcctggcagaagtctgagactgagctgtgccgcctctggctttagcctgagcacatctggcatgggcgtcggctgggttcgacaagctcctggcaaaggactggaatgggtcgcccacatttggtgggacgacgacaagtactacgccgacagcgtgaagggcagattcaccatcagccgggacaacagcaagaacaccctgtacctccagatgaacagcctgagagccgaggacaccgccgtgtactattgtgcccggtcttttggctacggcctggactattggggccagggcacactggttaccgtgtctagt

SEQ ID NO: 476 - DNA, 372 bp, Artificial Sequence
  Synthetic Polynucloetide
caagttcagctggttgaatctggcggcggactggttaagcctggcggttctctgagactgagctgtgccgcttctggcgatagcgtgtcctctaattctgccgcctggggctggattagacaggcccctggaaaaggactggaatggttcagccggatctactaccgcagcaagtggtacaacagctacgccgtgtccgtgaagtcccggttcaccatcagcagagacaacgccaagaacagcctgtacctccagatgaactccctgagagccgaggacaccgccgtgtactactgcgccagatacgattgggtgcccaagatcggcgtgttcgattcttggggccagggaaccctggtcaccgtttcttct

SEQ ID NO: 477 - DNA, 366 bp, Artificial Sequence
  Synthetic Polynucloetide
caactccagctgcaagagtctggccctggcctggtcaagcctagcgaaacactgagcctgacctgtaccgtgtctggcggctctatcagctccagcagctatttctggggctggatcagacaacctcctggcaaaggactggaatggatcggctccatctactacagcggcatcacctactacaaccccagcctgaagtccagagtgaccatctccgtggacaccagcaagaaccagttctccctgaagctgagcagcgtgacagccgccgataccgccgtgtattattgtgccagacatgacggcgctgtggccggcctgtttgattattggggacagggcaccctggtcaccgtgtcatctgct

SEQ ID NO: 478 - DNA, 366 bp, Artificial Sequence
  Synthetic Polynucloetide
caactccagctgcaagagtctggccctggcctggtcaagcctagcgaaacactgagcctgacctgtaccgtgtctggcggctctatcagctccggcagctatatctggggctggatcagacaacctcctggcaaaggactggaatggatcggctccatctactacagcggcatcacctactacaaccccagcctgaagtccagagtgaccatctccgtggacaccagcaagaaccagttctccctgaagctgagcagcgtgacagccgccgataccgccgtgtattattgtgccagacatgacggcgctgtggccggcctgtttgattattggggacagggcaccctggtcaccgtgtcatctgct

SEQ ID NO: 479 - DNA, 366 bp, Artificial Sequence
  Synthetic Polynucloetide
caactccagctgcaagagtctggccctggcctggtcaagcctagcgaaacactgagcctgacctgtaccgtgtctggcggctctatcagctccggcagctatttctggggctggatcagacaacctcctggcaaaggactggaatggatcggctccatctactacagcggcatcacctactacaaccccagcctgaagtccagagtgaccatctccgtggacaccagcaagaaccagttctccctgaagctgagcagcgtgacagccgccgataccgccgtgtattattgtgccagacatgacggcgctatggccggcctgtttgattattggggacagggcaccctggtcaccgtgtcatctgct

SEQ ID NO: 480 - DNA, 366 bp, Artificial Sequence
  Synthetic Polynucloetide
caactccagctgcaagagtctggccctggcctggtcaagcctagcgaaacactgagcctgacctgtaccgtgtctggcggctctatcagctccggcagctatttctggggctggatcagacaacctcctggcaaaggactggaatggatcggctccatctactacagcggcagcacctactacaaccccagcctgaagtccagagtgaccatctccgtggacaccagcaagaaccagttctccctgaagctgagcagcgtgacagccgccgataccgccgtgtattattgtgccagacatgacggcgctgtggccggcctgtttgattattggggacagggcaccctggtcaccgtgtcatctgct

SEQ ID NO: 481 - DNA, 366 bp, Artificial Sequence
  Synthetic Polynucloetide
caactccagctgcaagagtctggccctggcctggtcaagcctagcgaaacactgagcctgacctgtaccgtgtctggcggctctatcagctccggcagctatttctggggctggatcagacaacctcctggcaaaggactggaatggatcggctccatctactacagcggcatcagctactacaaccccagcctgaagtccagagtgaccatctccgtggacaccagcaagaaccagttctccctgaagctgagcagcgtgacagccgccgataccgccgtgtattattgtgccagacatgacggcgctgtggccggcctgtttgattattggggacagggcaccctggtcaccgtgtcatctgct

SEQ ID NO: 482 - DNA, 366 bp, Artificial Sequence
  Synthetic Polynucloetide
caactccagctgcaagagtctggccctggcctggtcaagcctagcgaaacactgagcctgacctgtaccgtgtctggcggctctatcagctccggcagctatttctggggctggatcagacaacctcctggcaaaggactggaatggatcggctccatctactacagcggcatcacctactacaaccccggcctgaagtccagagtgaccatctccgtggacaccagcaagaaccagttctccctgaagctgagcagcgtgacagccgccgataccgccgtgtattattgtgccagacatgacggcgctgtggccggcctgtttgattattggggacagggcaccctggtcaccgtgtcatctgct

SEQ ID NO: 483 - DNA, 366 bp, Artificial Sequence
  Synthetic Polynucloetide
caactccagctgcaagagtctggccctggcctggtcaagcctagcgaaacactgagcctgacctgtaccgtgtctggcggctctatcagctccggcagctatttctggggctggatcagacaacctcctggcaaaggactggaatggatcggctccatctactacagcggcatcacctactacaaccccaccctgaagtccagagtgaccatctccgtggacaccagcaagaaccagttctccctgaagctgagcagcgtgacagccgccgataccgccgtgtattattgtgccagacatgacggcgctgtggccggcctgtttgattattggggacagggcaccctggtcaccgtgtcatctgct

SEQ ID NO: 484 - DNA, 366 bp, Artificial Sequence; identical to SEQ ID NO: 472
  Synthetic Polynucloetide

SEQ ID NO: 485 - DNA, 366 bp, Artificial Sequence; identical to SEQ ID NO: 472
  Synthetic Polynucloetide

SEQ ID NO: 486 - DNA, 366 bp, Artificial Sequence; identical to SEQ ID NO: 472
  Synthetic Polynucloetide

SEQ ID NO: 487 - DNA, 366 bp, Artificial Sequence; identical to SEQ ID NO: 472
  Synthetic Polynucloetide

SEQ ID NO: 488 - DNA, 366 bp, Artificial Sequence; identical to SEQ ID NO: 477
  Synthetic Polynucloetide

SEQ ID NO: 489 - DNA, 366 bp, Artificial Sequence; identical to SEQ ID NO: 477
  Synthetic Polynucloetide

SEQ ID NO: 490 - DNA, 366 bp, Artificial Sequence; identical to SEQ ID NO: 477
  Synthetic Polynucloetide

SEQ ID NO: 491 - DNA, 360 bp, Artificial Sequence
  Synthetic Polynucloetide
caagttcagctggttcagagcggagccgaagtgaagaaacctggcagcagcgtgaaggtgtcctgcaaagcaagcggcggcacctttagcacctacgccatccactgggttcgacaggcaccaggacaaggactggaatggatgggcagaatcatccccatcgagggcagagcctactacgcccagaaattccagggcagagtgaccatcaccgccgacgagtctacaagcaccgcctacatggaactgagcagcctgagaagcgaggataccgctgtgtactattgcgccagaggccggtacagctacagatattggttcgactactggggccagggcaccctggttacagtctcttct

SEQ ID NO: 492 - DNA, 366 bp, Artificial Sequence
  Synthetic Polynucloetide
gaagttcagctggttcagagcggagccgaagtgaagaagccaggcgagagcctgaagattagctgcaaaggctccggctacagcttcaccagctactggatcggctgggtccgacagatgcctggcaaaggactggaatggatgggcatcatctaccccggcgacagcgacaccagatacagccctagctttcagggccaagtgaccatcagcgccgacaagagcatcagcacagcctacctccagtggtcctctctgaaggccagcgataccgccatgtactattgcgccagagatgtcggcagatgggctcctggcggcttcctggattattggggacagggcacactggtcaccgtgtctagt

SEQ ID NO: 493 - DNA, 354 bp, Artificial Sequence
  Synthetic Polynucloetide
caagttcagctggttcagagcggcgctgaagtgaagaaacctggcagcagcgtgaaggtgtcctgcaaagcaagcggcggcacctttagcagctacggcatctcttgggtccgacaggctcctggacaaggactggaatggatgggctggatcagcgccatcttcggcacagccaattacgcccagaaattccagggccgcgtgacaatcacagccgacgagtctacaagcaccgcctacatggaactgagcagcctgagaagcgaggacaccgccgtgtactattgtgccagaggcgtggcctcctggtatctggattattggggccagggaaccctggtcaccgtgtcatct

SEQ ID NO: 494 - DNA, 360 bp, Artificial Sequence
  Synthetic Polynucloetide
caggttcagctgcaacagcctggcgctgagcttgtgaaacctggcgcttccgtgaagatgagctgcaaggccagcggctacaccttcaccagctataacatgcactgggtcaagcagaccccaggcagaggactggaatggatcggagccatctatcccggcaacggcgacacctcctacaaccagaagttcaagggcaaagccacactgaccgccgacaagagcagcagcacagcctacatgcagctgagcagcctgaccagcgaagatagcgccgtgtactactgcgcccggtctacctattatggcggcgactggtacttcaacgtgtggggagctggcaccaccgtgacagtttct

SEQ ID NO: 495 - DNA, 357 bp, Artificial Sequence
  Synthetic Polynucloetide
caggttcagctccagcagtctggacccgagctgaagaaacctggcgagacagtgaagatcagctgcaaggccagcggctaccccttcaccaactacggcatgaactgggtcaagcaggcccctggacagggcctgaaatggatgggctggatcaataccagcaccggcgagagcaccttcgccgacgatttcaagggcagattcgacttcagcctggaaaccagcgccaacaccgcctacctccagatcaacaacctgaagtccgaggatatggctacctacttctgcgccagatgggaagtgtaccacggctacgtgccatattggggccagggcacaaccgtgacagtctcttct

SEQ ID NO: 496 - DNA, 357 bp, Artificial Sequence
  Synthetic Polynucloetide
gaagtgcagctggttgaatcaggtggcggcgttgtgcagcctggcagaagtctgagactgagctgtagcgccagcggcttcgatttcaccacctactggatgagctgggtccgacaggcccctggcaaaggactggaatggatcggcgagattcaccccgacagcagcaccatcaattacgcccctagcctgaaggacagattcaccatcagccgggacaacgccaagaacaccctgttcctccagatggactccctgaggccagaggataccggcgtgtacttttgcgccagcctgtatttcggcttcccttggtttgcctactggggccagggaacccctgtgacagttagctct

SEQ ID NO: 497 - DNA, 372 bp, Artificial Sequence
  Synthetic Polynucloetide
ggagtgcattctcaggttcagctgcaagagtctggccctggacttgtgcggcctagccaaacactgagcctgacctgtaccgtgtccggcttcacaatcagctccggctacagctggcactgggtccgacaaccacctggcagaggactggaatggatcggctacatccagtacagcggcatcaccaactacaaccccagcctgaagtcccgcgtgaccatgctggtggacacctccaagaaccagttcagcctgagactgagcagcgtgacagccgccgatacagccgtgtactactgcgccagagaggactacgactaccactggtacttcgacgtgtggggccagggaaccaccgtgacagtttcttct

SEQ ID NO: 498 - DNA, 360 bp, Artificial Sequence
  Synthetic Polynucloetide
gaagtgcagctggttgaatcaggtggcggcctggttcaacctggcggatctctgagactgagctgtgccgccagcggcttcaacatcaaggacacctacatccactgggtccgacaggcccctggcaaaggacttgaatgggtcgccagaatctaccccaccaacggctacaccagatacgccgactctgtgaagggcagattcaccatcagcgccgacaccagcaagaacaccgcctacctccagatgaactccctgagagccgaggacaccgccgtgtactactgtagcagatggggcggagccggagcctacgctatggatgtttggggccagggaaccctggtcaccgtgtcatct

SEQ ID NO: 499 - DNA, 363 bp, Artificial Sequence
  Synthetic Polynucloetide
caggtgcagctggttgaatctggtggcggagttgtgcagcctggcagaagcctgagactgtcttgtgccgccagcggcttcacctttagcagctatgccatgcactgggtccgacaggcccctggcaaaggacttgaatgggtcgccgtgatctcctacgacggcagcaacaagtattacgccgacagcgtgaagggcagattcaccatcagccgggacaacagcaagaacaccctgtacctccagatgaacagcctgagagccgaggacaccgccgtgtactactgtgccaaagaggccccttactacgccaaggactacatggacgtgtggggcaagggcaccaccgtgacagtttcttct

SEQ ID NO: 500 - DNA, 366 bp, Artificial Sequence
  Synthetic Polynucloetide
gaagttcagctggttgaaacaggtggcggcctggtgcagcctggcaaatctctggaactgacctgcgccaccagcggcttcacctttaataccgcctggatgcactgggtccgacagagccccgataagcggctggaatggatcgccagaatcaaggacaccagcaacaactacgccaccgactacgtggaatccatgaagggcagattcaccatcagccgggacgacagcaagggctccgtgaacctccagatgaacagcctgaaagaagaggacaccgccacctactactgcaccaccgacttctacgacggcacctactattggaactactggggccagggcgtgatggtcacagtgtcatct

SEQ ID NO: 501 - DNA, 378 bp, Artificial Sequence
  Synthetic Polynucloetide
agaatggctcaggttcagctgcaacagagcggagccgaacttgctagacctggcgcttccgtgaagatgagctgtaaagccagcggctacaccttcaccacctacaccatccactgggtccgaagaaggccaggccacgaccttgagtggatcggctacatcaaccccagcagcggctgctccgactacaaccagaacttcaagggcaagaccacactgaccgccgacaagagcagcaacaccgcctacatgcagctcaacagcctgaccagcgaggacagcgccgtgtactattgtgccagaagggccgactacggcaactacgagtacacttggtttgcctactggggccagggcaccaccgtgacagtttcttct

SEQ ID NO: 502 - DNA, 354 bp, Artificial Sequence
  Synthetic Polynucloetide
gaagtgcagctggttgaatcaggtggcggcctggttcagcctggcagaagtctgagactgagctgtgccgccagcggcttcaccttcgacgattacggaatgcactgggtccgacaggcccctggcaaaggacttgaatgggtgtccggcatcagctggaacagcggcagcatcggctatgccgatagcgccaagggcagattcaccatcagccgggacaacagcaagaacaccctgtacctgcagatgaacagcctgagagccgaggacaccgccgtgtactactgtgccaagaggggcaacagcaacagcttcgactattggggccagggcaccctggtcacagtctcttct

SEQ ID NO: 503 - DNA, 366 bp, Artificial Sequence
  Synthetic Polynucloetide
cagatgcagctggtgcagtctggggccgaagtgaagaaacctggcagcagcgtgaaggtgtcctgcaaagcaagcggcggcacctttagctcctacgccatctcttgggtccgacaggctccaggacaaggactggaatggatgggcggcatcatccccatcttcggcacagccaattacgcccagaaattccagggcagagtgacaatcaccgccgacaagagcaccagcaccgcctacatggaactgagcagcctgagaagcgacgacaccgccgtgtactactgcgccagagatgaactgtgggccaccaactactactacatggacgtgtggggcaagggcaccctggtcacagtttcttct

SEQ ID NO: 504 - DNA, 354 bp, Artificial Sequence
  Synthetic Polynucloetide
gaagttcagctggttgaatctggcggcggactcgttagacctggcggatctctgagactgagctgtgccgccagcggcttcaccttcgatgattacggcatgagctgggtccgacaggcccctggaaaaggactggaatgggtgtccggcatcagctggaatagcggctctatcggctacgccgacagcgtgaagggcagattcaccatcagccgggacaacgccaagaacagcctgtacctccagatgaactccctgagagccgaggacacagccctgtactactgtgccaagcggggcaacagcaacagcttcgattattggggccagggaaccaccgtgaccgtgtcatct

SEQ ID NO: 505 - DNA, 354 bp, Artificial Sequence
  Synthetic Polynucloetide
gaagtgcagctggttgaatcaggtggcggcctggttcagcctggcagaagtctgagactgagctgtgccgcctccggcttcaccttcgatgattacgccatgcactgggtccgacaggcccctggaaaaggactggaatgggtgtccggcatcagctggaatagcggctctatcggctacgccgattccgccaagggcagattcaccatcagccgggacaacagcaagaacaccctgtacctccagatgaactccctgagagccgaggacaccgccgtgtactactgtgccaagaggggcaacagcaacagcttcgactattggggccagggcaccctggtcacagtctcttct

SEQ ID NO: 506 - DNA, 357 bp, Artificial Sequence
  Synthetic Polynucloetide
caggtgcagctgaaagagtctggccctggactggtgcagcctagccaaacactgagcctgacctgtaccgtgtctggcctgtctctgaccagcaatggcgtgtcctggatcagacagcctcctggcaaaggactggaatggctgggcgtgatctggtccaatggcggcacagactacaacagcgccatcaagagccggctgagcttcagcagagacaccagcaagagccaggtgttcctgaagatgaacagcctccagaccgaggataccgccatgtacttttgcgccagacctcggtacaactccggctacttcttcgactattggggccagggcgtgatggtcaccgttagctct

SEQ ID NO: 507 - DNA, 372 bp, Artificial Sequence
  Synthetic Polynucloetide
caagtgcagctgaaagagtctggccccggactggttcagcctagccaaacactgagcctgacctgtaccgtgtccggctttagcctgaccagctaccacgtgcactgggtccgacaacctccaggcaaaggactggaatggatgggcgtgatgtggagcgacggcgacaccctgtataacagcgccctgaagtcccggctgagcatcagcagagataccagcaagagccaggtgctgctccagatggatagcctccagagcgaggataccgccacctactactgtgccagactccaggtgttcggctaccccggcatcagagactacgtgatggatgcctggggacagggcgcttctgtgacagtctcttct

SEQ ID NO: 508 - DNA, 390 bp, Artificial Sequence
  Synthetic Polynucloetide
gaagttcagctggttgagtctggcggcagagtcgttagacctggcggaagcctgagactgtcttgtgccgccagcggcttcacctttgacgactacggcatgagctgggtccgacagcctcctggaaagggcctcgaatttgtgtccggcctgaactggaacggcgacatcaccgcctttaccgacagcgtgaagggcagattcaccatcagccgggacaacgtgaagtccagcctgtacctccagatgaacagcctgagagccgacgacaccgccttctactactgtgccagagtgcggacctggggcgattacacaacaggcgaggaaatcatcaacagctggtacttcgacctgtggggcagaggcacactggtcacagtctcttct

SEQ ID NO: 509 - DNA, 360 bp, Artificial Sequence
  Synthetic Polynucloetide
gaagtgcagctggttgaatcaggtggcggcctggttcaacctggcggatctctgagactgagctgtgccgcctccggcttcacctttagcagctactggatgagctgggtccgacaggcccctggcaaaggacttgagtgggtcgccaacatcaagcaggacggcagcgagaagtattacgtggacagcgtgaagggcagattcaccatcagccgggacaacgccaagaacagcctgtacctgcggatgaactccctgagagccgaggataccgccgtgtactattgtgccagagcctggggctacagctcctactacttcgactattggggccagggaaccctggtcaccgtttctcca

SEQ ID NO: 510 - DNA, 345 bp, Artificial Sequence
  Synthetic Polynucloetide
gaagttcagctgcaacagtctggccccgagctggttaagcctggaacaagcgtgcggatctcctgcaagaccagcggctacaccttcaccgagtacaccatccactgggtcaagcagagccacggcaagagcctggaatggatcggcaacatcaaccccaacaacggcggcaccacctacaaccagaagttcgaggacaaggccacactgaccgtggacaagagcagcagcaccgcctacatggaactgagaagcctgaccagcgaggacagcgccgtgtactattgtgccgccggatggaacttcgactactggggccagggaacaaccctgaccgttagctct

SEQ ID NO: 511 - DNA, 345 bp, Artificial Sequence
  Synthetic Polynucloetide
gaagtgcagctggttgaatcaggtggcggcctggttcaacctggcggatctctgagactgagctgtgccgccagcggctacacctttaccgagtacacaatccactgggtccgacaggcccctggcaaaggacttgagtgggtcgccaacatcaaccccaacaatggcggcaccacctacaaccagaagttcgaggacagattcaccatcagccgggacaacagcaagaacaccctgtacctccagatgaactccctgagagccgaggacaccgccgtgtactattgtgccagaggctggaacttcgactactggggccagggaacactggtcaccgttagctct

SEQ ID NO: 512 - DNA, 345 bp, Artificial Sequence
  Synthetic Polynucloetide
caagttcagctggttcagagcggagccgaagtgaagaaacctggcgagagcgtgaaggtgtcctgcaaagccagcggctacacctttaccgagtacaccatccactgggtccgacaggctccaggacaaggactggaatggatgggcaacatcaaccccaacaacggcggcaccacctacaaccagaaattcgaggatcgcgtgacaatcaccgccgacaagagcaccagcaccgcctacatggaactgagcagcctgagaagcgaggacaccgccgtgtactattgtgccagaggctggaacttcgactactggggccagggaaccaccgtgacagtctcttct

SEQ ID NO: 513 - DNA, 345 bp, Artificial Sequence; identical to SEQ ID NO: 510
  Synthetic Polynucloetide

SEQ ID NO: 514 - DNA, 345 bp, Artificial Sequence; identical to SEQ ID NO: 511
  Synthetic Polynucloetide

SEQ ID NO: 515 - DNA, 366 bp, Artificial Sequence
  Synthetic Polynucloetide
gaagtgcagctggttgagtctggcggcggactggttaagcctgagggaagcctgagactgtcttgtgccgccagcggcttcaccttcagcagatacggcatgagctgggtccgacaggctcctggcaaaggactggaatgggtgtccacaatttccggcggaggcacctacatctactaccccgatagcgtgaagggcagattcaccatctccagagacaacgccaagaacagcctgttcctccagatgaactccctgagagccgaggacacagccgtgtattattgcgctcgggacaactacggcagaaactacgactacggcatggactactggggccagggcacactggttaccgttagctct

SEQ ID NO: 516 - DNA, 366 bp, Artificial Sequence
  Synthetic Polynucloetide
gaagtgaaggtggtggaatctggcggcgacctggttaagcctggcggatctctgaagctgagctgtgtggtgtccggcttcaccttcagcagatacggcatgagctgggtccgacagacccctggcaaaagactggaatgggtcgccacaatttccggcggaggcacctacatctactaccccgatagcgtgaagggcagattcaccatctccagagacaacgccaagaacaccctgtacctccagatgagcagcctgaagtctgaggacaccgccatgtaccactgcaccagggacaactacggcagaaactacgactacggcatggactactggggccagggcacaagcgtgacagtctcttct

SEQ ID NO: 517 - DNA, 363 bp, Artificial Sequence
  Synthetic Polynucloetide
gaagtgcagctggttgagtctggcggcggacttgtgaaacctggcggaagcctgagactgagctgtgccgcttccggctttacctttagcggctacgccatgagctgggtccgacaggctcctggcaaaggactggaatgggtgtccacaatcagcagcggcggcacctacatctactaccccgatagcgtgaaaggccggttcaccatcagccgggacaacgccaagaacagcctgtacctccagatgaactccctgagagccgaggacaccgccgtgtactattgtgccagactcggcggcgacaattactacgagtatttcgacgtgtggggcaagggcaccaccgtgacagtttcttct

SEQ ID NO: 518 - DNA, 351 bp, Artificial Sequence
  Synthetic Polynucloetide
gaagttcagctgcttgaatctggcggcggactggttcaacctggcggatctctgagactgagctgtgccgcctctggcttcgccttcagcacctacgatatgagctgggtccgacaggcccctggcaaaggacttgaatgggtcgccacaatcagcagcggcggcagctacacctactacctggatagcgtgaagggcagattcaccatcagccgggacagcagcaagaacaccctgtacctccagatgaactccctccaggccgaggactccgccatctactattgtgcccctaccaccgtggtgcctttcgcctattggggacagggaaccctggtcaccgttagctct

SEQ ID NO: 519 - DNA, 348 bp, Artificial Sequence
  Synthetic Polynucloetide
gaggtgcagctggttgaatctggcggaggactggttcagcctggcggatctctgagactgtcttgtgccgccagcggctacaccttcaccagctattggctgcactgggtccgacaggcccctggcaaaggacttgagtgggtcggatatatcaggcccagcaccggctacacagagtacaaccagaagttcaaggaccgcttcaccatcagcgccgacaccagcaagaataccgcctacctccagatgaacagcctgagagccgaggacaccgccgtgtactactgtgccagatccagatggctgctggactattggggccagggcacactggttacagttagctct

SEQ ID NO: 520 - DNA, 345 bp, Artificial Sequence
  Synthetic Polynucloetide
gaggtgcagctggttgaatctggcggaggactggttcagcctggcggatctctgagactgtcttgtgccgccagcggcttcaccttcaccacctattggatgcactgggtccgacaggcccctggcaaaggacttgagtgggtcggatatatcaggcccagcaccggctacacagagtacaaccagaagttcaaggaccgcttcaccatcagcgccgacaccagcaagaataccgcctacctccagatgaacagcctgagagccgaggacaccgccgtgtactactgtgccagatccagatggctgctggactattggggccagggcacactggttacagtttct

SEQ ID NO: 521 - DNA, 345 bp, Artificial Sequence; identical to SEQ ID NO: 435
  Synthetic Polynucloetide

SEQ ID NO: 522 - DNA, 351 bp, Artificial Sequence
  Synthetic Polynucloetide
gaagtgcagctggttgaatcaggtggcggcctggttcaacctggcggatctctgagactgagctgtgccgccagcggctacaccttcagcgactactttatgagctgggtccgacaggcccctggcaaaggacttgaatgggtcgccaccatcagcaatggcggcacctacacttactaccccgacagcgtgaagggcagattcaccatctccagagacaacagcaagaacaccctgtacctccagatgaactccctgagagccgaggacaccgccgtgtactactgcgccagattcgacggctacatcttcgactattggggccagggcaccctggtcacagtctcttct

SEQ ID NO: 523 - DNA, 351 bp, Artificial Sequence; identical to SEQ ID NO: 436
  Synthetic Polynucloetide

SEQ ID NO: 524 - DNA, 351 bp, Artificial Sequence; identical to SEQ ID NO: 436
  Synthetic Polynucloetide

SEQ ID NO: 525-529 - skipped (5 entries)

SEQ ID NO: 530 - DNA, 753 bp, Artificial Sequence
  Synthetic Polynucloetide
gacgtgcagatgatccagacccccgatagcctggccgtgtccctgggacagagagccaccatctcttgcagagccagcgagagcgtggacaactacggcatcagcttcatgcactggtatcagcagaagcccggccagagccccaagctgctgatctacagagcctccaacctggaaagcggcatccccgccagattttccggcagcggcagcagaaccgacttcaccctgaccatcaaccccgtggaaaccgacgacgtggcaacctactactgccagcagaacaacaaggacccccccacctttggcggaggcaccaagctggaaatcaagggcggaggcggaagtggaggcggaggatctggcggcggaggctctgggggaggcggctctcaggtgcaactccagcagtctggcgctgagcttgtgaagcctggggccagcgtgaagattagctgcaaggccagcggctacgccttcagcagctactggatgaactgggtcaagcagcggcctggcaagggcctggaatggatcggccaaatctaccccggcgacggcgacaccacctacaacggcaagttcaagggcaaggccaccctgacagccgacaagagcagcagcaccgtgtacatgcaactgaacagcctgaccagcgaggacagcgccgtgtacttctgcgtgcggtactactacggcagctccggctacttcgactattggggccagggcaccacactgaccgtgtcctct

SEQ ID NO: 531 - DNA, 726 bp, Artificial Sequence
  Synthetic Polynucloetide
gacgtgcagatgatccagacccccagcagcctgtctgccagcctgggcgatagagtgaccatcagctgtcgggccagccaggacatcggcaactacctgaactggtatcagcagaaacccgacggcaccgtgaagctgctgatctactacaccagcagactgcacagcggcgtgcccagcagattttctggcagcggctctggcaccgagtacagcctgaccatctccaacctggaacaggaagatattgctacctacttctgtcagcaaggcagcgccctgccccctacatttggcggcggaacaaagctggaaatcaacggcggaggcggaagtggaggcggaggatctggcggcggaggctctgctctccagctccagcagtctggcgcagaactcgtgcggcctggcgcttctgtgaccctgagctgtaaagccagcggctacaccttcaccgactacgagatgcactgggtcaagcagacccctgtgcacggcctggaatggatcggagccatcgaccctgagacaggcggcaccgcctacaaccagaagttcgagggcaaggccatcctgaccgccgacaagagcagcagcacagcctacatggaactgcggagcctgacctccgaggacagccccgtgtactactgtgccagacggcggtactacggcagcagctccttcgactattggggccagggcaccaccctgaccgtgtctagt

SEQ ID NO: 532 - DNA, 732 bp, Artificial Sequence
  Synthetic Polynucloetide
gacatcgtgctgacacagagccctgccaccctgtctctgagccctggcgatagagccaccatcagctgtagagccagcgagagcgtgaccatcctgggcagccacctgatctactggtatcagcagaagcccggccagccccccagactgctgattcagctggcctccaatgtgcagaccggcgtgccagccagattttccggcagcggcagcagaaccgacttcaccctgaccatcagcagcgtggaacccgaggacttcgccgtgtactactgcctccagagccggaccatccccagaacattcggccagggcaccaagctggaaatcaagagaggcggaggcggaagtggaggcggaggatctggcggcggaggctctcaggtgcagctggtgcagtctggccccgaagtgaagaaacccggcgagtccgtgaagatcagctgcaaggccagcggctacaccttccggcactacagcatgaactgggtcaagcaggccccaggccagggcctgaagtggatgggcagaatcaacaccgagagcggcgtgcccatctacgccgacgacttcaagggccggttcagcttcaccgtggacaccagcgccagcaccgcctacctggaaatctccagcctgaccagcgaggataccgccgtgtatttctgctccaacgactacctgtacagcctggatttctggggccagggaaccaccctgacagtgtcctct

SEQ ID NO: 533 - DNA, 732 bp, Artificial Sequence
  Synthetic Polynucloetide
gacatccagatgacccagagccctagctcactgagcgccagcgtgggcgacagggtgaccattacctgctccgccagccaggacatcagcaactacctgaactggtaccagcagaagcccggcaaggcccccaagctgctgatctactacacctccaacctgcactccggcgtgcccagcaggttcagcggaagcggcagcggcaccgatttcaccctgaccatctccagcctgcagcccgaggacttcgccacctactactgccagcagtacaggaagctcccctggactttcggccagggcaccaaactggagatcaagcgtggcggaggcggaagtggaggcggaggatctggcggcggaggctctcaggtgcagctggtccagagcggcgccgaagtgaagaagcccggcagctccgtgaaagtgagctgcaaggccagcggcggcaccttcagcaactactggatgcactgggtgaggcaggcccccggacagggcctggagtggatgggcgccacctacaggggccacagcgacacctactacaaccagaagttcaagggccgggtgaccatcaccgccgacaagagcaccagcaccgcctacatggaactgagcagcctcaggagcgaggacaccgctgtgtattactgcgccaggggcgccatctacgacggctacgacgtgctggacaactggggccagggcacactggtgaccgtgtccagc

SEQ ID NO: 534 - DNA, 747 bp, Artificial Sequence
  Synthetic Polynucloetide
gacatcgtgatgacccagagccccgatagcctggccgtgtctctgggagagagagccaccatcaactgcgagagcagccagagcctgctgaacagcggcaaccagaagaactacctgacctggtatcagcagaagcccggccagccccccaagcccctgatctattgggccagcaccagagaaagcggcgtgcccgatagattcagcggcagcggaagcggcaccgacttcaccctgaccatcagttctcttcaggccgaggacgtggccgtgtactactgccagaacgactacagctacccctacaccttcggccagggcaccaagctggaaatcaagagaggcggaggcggaagtggaggcggaggatctggcggcggaggctctgaagtgcagctggtgcagtctggggccgaagtgaagaagcctggcgagagcctgaagatcagctgcaagggcagcggctacagcttcaccgactactacatgaagtgggccagacagatgcccggcaagggcctggaatggatgggcgacatcatccccagcaacggggccaccttctacaaccagaaattcaagggccaagtgaccatctccgccgacaagagcatcagcaccacctacctccagtggtccagcctgaaggccagcgacaccgccatgtactattgcgccagaagccatctgctgcgggccagttggttcgcctattggggccagggaacaatggtcacagtgtccagc

SEQ ID NO: 535 - DNA, 732 bp, Artificial Sequence
  Synthetic Polynucloetide
gacatccagatgacccagtctaccagttccctgagtgcatccctcggagacagggtgacgatcagttgcagcgcaagccaagggatcaataactatctgaactggtatcagcagaaaccggacggaacagtcgaactcctgatttattacaccagcacccttcagagtggcgtcccttcccggttcagtggctccggaagcgggaccgattactccctgaccatttctaatctggagccagaggacataggaacgtattattgccagcagtatagtaaactgccacgaacttttggaggggggacgaaactggagatcaaaggcggaggcggaagtggaggcggaggatctggcggcggaggctctcaggtgcaactccagcagtccggaagcgagcttatgatgccaggggcatcagtgaagatcagctgcaaggctactggctacaccttctctaattactggatagagtgggttaaacaaaggccagggcacggcctggaatggatcggcgagatcctgcctgggacaggccgaaccatttataacgagaagttcaaaggcaaggctactttcaccgcagatataagctctaatacagtgcaaatgcagctctcttccctgacaagtgaggatagtgccgtgtattattgcgcacgaagagattactatggaaatttttattacgctatggattattggggtcaaggaacaagtgtgaccgttagcagc

SEQ ID NO: 536 - DNA, 717 bp, Artificial Sequence
  Synthetic Polynucloetide
gacatccagatgacccagagccctgccagcctgtccgtgtctgtgggcgagacagtgaccatcacctgtcgggccagcgagaacatctacagcaacctggcctggtatcagcagaagcagggcaagagcccccaactgctggtgtacgccgccaccaatctggccgatggcgtgcccagcagattttccggctctggcagcggcacccagtacagcctgaagatcaacagcctccagagcgaggacttcggcagctactactgccagcacttctggggcacctggacctttggaggaggcaccaccctggaaatcaagggcggaggcggaagtggaggcggaggatctggcggcggaggctctgaagtgcaactccagcagagcggccctgagcttgtgaagcctggcgcttccgtgaagatgagctgcaaggccagcggctacaccttcaccgactactacatgaagtggatgaagcagagccacggcaagtccctggaatggatcggcgacatcaaccccaacaacggcggcaccacctacaaccagaagttcaagggcaaggccaccctgaccgtggacaagagcagcagcaccgcctacatgcaactgaacagcctgaccagcgaggacagcgccgtgtactactgcgccagagactacggctacggctatttcgactactggggccagggcacaaccctgacagtgtcctct

SEQ ID NO: 537 - DNA, 729 bp, Artificial Sequence
  Synthetic Polynucloetide
gacgagatcgtgctgacacagagccccgccaccctgtcactgtctccaggcgaaagagccaccctgagctgtagcgccagcagcagcgtgtcctacatgcactggtatcagcagaagcccggccaggcccccagactgctgatctacgataccagcaagctggcctccggcatccccgccagattttctggcagcggctccggcaccgacttcaccctgacaatcagcagcctggaacccgaggacgtggccgtgtactactgttttcaaggcagcgtgtaccccttcaccttcggccagggcaccaagctggaaatcaagagaggtggcggtggctcgggcggtggtgggtcgggtggcggcggatctcaggtgcagctccaggaatctggccctggcctcgtgaagcctagccagaccctgagcctgacctgtaccgtgtctggcggcagcatcagcacaagcggcatgggcgtgggctggatcagacagcaccctggcaagggcctggaatggatcggccacatttggtgggacgacgacaagcggtacaaccccgccctgaagtccagagtgaccatcagcgtggacaccagcaagaaccagttcagcctgaagctgagcagcgtgacagccgccgataccgccgtgtattattgcgcccggatggaactgtggtcctactacttcgactactggggccagggaaccctcgtgaccgtgtctagt

SEQ ID NO: 538 - DNA, 726 bp, Artificial Sequence
  Synthetic Polynucloetide
gacatccagatgacacagactacatcctccctgtctgcctctctgggagacagagtcaccatcagttgcagggcaagtcaggacattagtaaatatttaaattggtatcagcagaaaccagatggaactgttaaactcctgatctaccatacatcaagattacactcaggagtcccatcaaggttcagtggcagtgggtctggaacagattattctctcaccattagcaacctggagcaagaagatattgccacttacttttgccaacagggtaatacgcttccgtacacgttcggaggggggaccaagctggagatcacaggtggcggtggctcgggcggtggtgggtcgggtggcggcggatctgaggtgaaactgcaggagtcaggacctggcctggtggcgccctcacagagcctgtccgtcacatgcactgtctcaggggtctcattacccgactatggtgtaagctggattcgccagcctccacgaaagggtctggagtggctgggagtaatatggggtagtgaaaccacatactataattcagctctcaaatccagactgaccatcatcaaggacaactccaagagccaagttttcttaaaaatgaacagtctgcaaactgatgacacagccatttactactgtgccaaacattattactacggtggtagctatgctatggactactggggtcaaggaacctcagtcaccgtctcctca

SEQ ID NO: 539 - DNA, 726 bp, Artificial Sequence
  Synthetic Polynucloetide
gagatcgtgatgacccagagccctgccaccctgtctctgagccctggcgaaagagccaccctgagctgtagagccagccaggacatcagcaagtacctgaactggtatcagcagaagcccggccaggcccccagactgctgatctaccacaccagcagactgcacagcggcatccccgccagattttctggctctggcagcggcaccgactacaccctgacaatcagcagcctccagcccgaggacttcgccgtgtacttctgtcagcaaggcaacaccctgccctacaccttcggccagggcaccaagctggaaatcaagggcggaggcggaagtggaggcggaggatctggcggcggaggctctcaggtgcaactccaggaatctggccctggcctcgtgaagcccagcgagacactgagcctgacctgtaccgtgtccggcgtgtccctgcctgactatggcgtgtcctggatcagacagccccctggcaagggcctggaatggatcggagtgatttggggcagcgaaaccacctactacaacagctccctgaagtccagagtgaccatctccaaggacaactccaagaaccaggtgtccctgaagctgagcagcgtgacagccgccgacaccgccgtgtattactgcgccaagcactactactacggcggcagctacgctatggactactggggccagggaaccctcgtgaccgtgtctagt

SEQ ID NO: 540 - DNA, 732 bp, Artificial Sequence
  Synthetic Polynucloetide
gagatcgtgctgacacagagccctgccaccctgtctctgagccctggcgaaagagccaccctgagctgtagagccagccagagcgtgtccagctacctggcctggtatcagcagaagcccggccaggctccccggctgctgatctacgatgccagcaatagagccaccggcatccccgccagattttccggctctggcagcggcaccgacttcaccctgaccatcagctccctggaacccgaggacttcgccgtgtactactgccagcagcggagcaactggcccatcacattcggccagggcacccggctggaaatcaaaggcggaggcggaagtggaggcggaggatctggcggcggaggctctgaagtgcagctggtggaatcaggcggcggactggtgcagcctggcagaagcctgagactgagctgtgccgccagcggcttcaccttcaacgactacgccatgcactgggtgcgccaggcccctggaaaaggactggaatgggtgtccacaatcagctggaacagcggcagcatcggctacgccgatagcgtgaagggccggttcaccatcagccgggacaacgccaagaagtccctgtacctccagatgaacagcctgcgggccgaggacacagccctgtactattgcgccaaggacatccagtacggcaactactactacggcatggacgtgtggggccagggaaccaccgtgaccgtgtcatct

SEQ ID NO: 541 - DNA, 741 bp, Artificial Sequence
  Synthetic Polynucloetide
gacatcgtgatgacccagacccccctgagcctgcctgtgacacctggcgagcctgccagcatctcctgcagaagcagcaagagcctgctgcacagcaacggcatcacctacctgtactggtatctgcagaaacccggccagagcccccaactgctgatctaccagatgagcaacctggtgtccggcgtgcccgacagattttctggcagcggctccggcaccgacttcaccctgaagatcagccgggtggaagccgaggacgtgggcgtgtactactgcgcccagaacctggaactgccctacacctttggcggcggaacaaaggtggaaatcaagcggggcggaggcggaagtggaggcggaggatctggcggcggaggctctcaggtgcaactggtgcagagcggagccgaagtgaaaaagcccggcagcagcgtgaaggtgtcctgcaaggccagcggctacgccttcagctactcctggatcaactgggtgcgccaggcccctggacagggcctggaatggatgggcagaatcttccccggcgacggcgacaccgactacaacggcaagttcaagggcagagtgaccatcaccgccgacaagagcaccagcaccgcctacatggaactgagcagcctgcggagcgaggataccgccgtgtactattgtgccagaaacgtgttcgacggctactggctggtgtactggggccagggaacacttgtgaccgtgtccagc

SEQ ID NO: 542 - DNA, 744 bp, Artificial Sequence
  Synthetic Polynucloetide
gacatccagatgacccagagccccagcagcctgtctgccagcgtgggcgacagagtgaccatcacctgtcggagcagccagagcatcgtgcactccgtgggcaacaccttcctggaatggtatcagcagaagcccggcaaggcccccaagctgctgatctacaaggtgtccaacagattcagcggcgtgcccagcaggtttagcggctctggcagcggcaccgacttcaccctgaccatctctagcctccagcccgaggacttcgccacctactactgttttcaaggcagccagttcccctacaccttcggccagggaacaaaggtggaaatcaagcggggcggaggcggaagtggaggcggaggatctggcggcggaggctctgaagtgcaactggtggaaagcggaggcggcctggtgcagcctggcggatctctgagactgagctgtgccgccagcggctacgagttcagccggtcctggatgaactgggtgcgccaggcccctggcaagggactggaatgggtgggaagaatctaccccggcgacggcgacaccaactacagcggcaagttcaagggccggttcaccatcagcgccgacaccagcaagaacaccgcctacctccagatgaacagcctgcgggccgaggataccgccgtgtactactgtgccagagatggcagctcctgggactggtacttcgacgtgtggggacagggaacccttgtgaccgtgtccagc

SEQ ID NO: 543 - DNA, 726 bp, Artificial Sequence
  Synthetic Polynucloetide
gagatcgtgctgacacagagccctggcaccctgagcctgtctccaggcgaaagagccacactgagctgtcgggcctctcagagcgtgggaggctacctggcttggtatcagcagaagccaggccaggcccccagactgctgatctacgacgccagcaatcgggccacaggcatccccgccagattttctggcagcggctccggcaccgacttcaccctgacaatcagcagcctggaacccgaggacttcgccgtgtactactgccagcagcggaacaactggccccccatgtacacattcggccagggcaccaagctggaaatcaagagaggcggaggcggaagtggaggcggaggatctggcggcggaggctctcaggtgcaactggtgcagagcggagccgaagtgaagaaacccggcagcagcgtgaaggtgtcctgcaaggcttccggcggcaccttcagcagctacgccatttcttgggtgcgccaggctcctggacagggcctggaatggatgggcggcatcatccctatcctgggcaccgccaactacgcccagaaattccagggcagagtgaccatcaccgccgacgagagcaccagcaccgcctacatggaactgagcagcctgcggagcgaggacacagccgtgtattattgcgccagatggggcggaggggccttcgacatttggggccagggaacaatggtcaccgtgtccagc

SEQ ID NO: 544 - DNA, 717 bp, Artificial Sequence
  Synthetic Polynucloetide
gacatccagatgacccagagccccgccaccatcgagaacacaagcctgtctgccagcgtgggcgacagagtgaccatcacctgtagagccagccagggcatcagctcttggctgacctggtatcagcagaagcccgagaaggcccccaagagcctgatctacgccgccagctctctgcagtctggcgtgcccagcagattttccggcagcggctctggcaccgacttcaccctgacaatcagcagcctgcagcccgaggacttcgccacctactactgccagcagtacgacagctaccccatcaccttcggccagggcacccggctggaaatcaagggcggaggcggaagtggaggcggaggatctggcggcggaggctctcaggtgcaactgcagcagtggggagccggactgctgaagcctagcgagacactgagcctgacctgcgccgtgtacggcggcagcttcagcgcctactattggagctggatcagacagccccctggcaagggcctggaatggatcggcgacatcaatcacggcggaggcaccaactacaaccccagcctgaagtcccgcgtgaccatctccgtggacaccagcaagaaccagttctccctgaagctgaacagcgtgacagccgccgacacagccgtgtactactgtgccagcctgaccgcctattggggccagggatctcttgtgaccgtgtccagc

SEQ ID NO: 545 - DNA, 729 bp, Artificial Sequence
  Synthetic Polynucloetide
gagatcgtgctgacccagagccctgatagcctggccgtgtctctgggcgagagagccaccatcaactgcaaggccagccagagcgtggacttcgacggcgacagctacctgaactggtatcagcagaagcccggccagccccccaaggtgctgatctatgccgccagcacactgcagagcggcgtgcccagcagattttctggcagcggctccggcaccgacttcaccctgaccatcaacagcctggaagccgaggacgccgccacctactactgccagcagagcaacgaggacccctggacctttggcggcggaacaaaggtggaaatcaagggcggaggcggaagtggaggcggaggatctggcggcggaggctctcaggtgcaactggtgcagtccggcgctgaagtgaagaaacctggggccagcgtgaaggtgtcctgcaaggtgtccggctacacctttaccgactactacattacctgggtgcgccaggcccctggacaggccctggaatggatgggctggatctaccccggcagcggcaacaccaagtacagccagaagttccagggcagattcgtgttcagcgtggacaccagcgccagcaccgcctacctgcaactgtctagcctgaaggccgaagataccgccgtgtactactgcgccaactacggcaactattggttcgcctattggggccagggaacccttgtgaccgtgtcctct

SEQ ID NO: 546 - DNA, 723 bp, Artificial Sequence
  Synthetic Polynucloetide
gacatccagatgacccagagccccagcagcctgtctgccagcgtgggcgacagagtgaccatcacctgtagagccagccagggcatcagctcttggctggcctggtatcagcagaagcccgagaaggcccccaagagcctgatctacgccgcctctagtctccagagcggcgtgcccagcagattttctggcagcggctccggcaccgacttcaccctgacaatcagctccctccagcccgaggacttcgccacctactactgccagcagtacaacagctaccctcccacctttggcggaggcaccaaggtggaaatcaagggcggaggcggaagtggaggcggaggatctggcggcggaggctctgaagtgcaactggtgcagtctggcggagggctggtgcatcctgggggaagcctgagactgagctgtgccggctctggcttcgccttcagcagcagcaccatgcactggatcagacaggcccctggcaagggcctggaatggatcagcctgatcggaagcggagggggcatctactacggcgacagcgtgaagggccggttcaccatcagccgggacaacgccaagaacagcctgtacctccagatgaactccctgcgggccgaggacatggccgtgtactattgtgtgcggggctacttcgactgggtggactacttcgattactggggccagggcaccctcgtgaccgtgtcatct

SEQ ID NO: 547 - DNA, 741 bp, Artificial Sequence
  Synthetic Polynucloetide
gacgtcgtgatgacccagagccctctgagcctgcctgtgacactgggacagcctgccagcatctcctgtcggagcagccagagcatcgtgcacagcgacggcaacacctacctggaatggtatcagcagcggccaggccagagccccagacggctgatctacaaggtgtccaacagattcagcggcgtgcccgacagattctccggcagcggctctggcaccgacttcaccctgaagatcagcagagtggaagccgaggacgtgggcgtgtactactgttttcaaggcagccacgccccctggacctttggcggaggaacaaaggtggaaatcaagggcggaggcggaagtggaggcggaggatctggcggcggaggctctgaagtgcaactggtggaatcaggcggcggactggtgcagcctggcggatctctgagactgagctgtgccgccagcggcttcaccttcagcagctacggaatgcactgggtgcgccaggcccctggcaaaggactggaatgggtggcctacatcaccaccagaagcagcaccatctactacgccgacagcgtgaagggccggttcaccatctccagagacaacgccaagaacagcctgtacctccagatgaactccctgcgggccgaggacaccgccgtgtactattgcaccagagagcccctgaccggctactacgctatggactattggggccagggcaccagcgtgaccgtgtctagt

SEQ ID NO: 548 - DNA, 711 bp, Artificial Sequence
  Synthetic Polynucloetide
cagatcgtgctgacacagagccctgccctgatgagcgccagccctggcgagaaagtgaccatgacctgtagcgccagcagcagcgtgcgctacatgtactggtatcagcagaagcccagaagcagccccaagccctggattcacctgaccagcaatctggcctctggcgtgcccgctagattttccggctctggcagcggcaccagctacagcctgaccatcagcagcatggaagccgaggacgccgccacctactactgccagcagtggtccagccaccccttcacatttggctccggcaccaagctggaaatcaagggcggaggcggaagtggaggcggaggatctggcggcggaggctctgatgtgcaactccaggaaagcggccctggccttgtgaagcctagccagagcctgtccctgacctgtaccgtgaccggcttcagcatcaccagcgactactcttggaactggatcagacagttccctggcaacaaactggaatggatgggctacatcagctactccggccacacctcctacaaccccagcctggaaagccggatctccatcaccagagacaccagcaagaaccagttcttcttgcaactgaacagcgtgaccaccgaggataccgccacatattactgtaccagaggcaactgggacgtggtgtactggggccagggcacacttgtgaccgtgtctgct

SEQ ID NO: 549 - DNA, 738 bp, Artificial Sequence
  Synthetic Polynucloetide
gagatcgtgctgacacagagccctggaagcctggccgtgtctcctggcgagcgcgtgacaatgagctgcaagagcagccagagcgtgttcttcagcagctcccagaagaactacctggcctggtatcagcagatccccggccagagccccagactgctgatctactgggccagcaccagagaaagcggcgtgcccgatagattcaccggcagcggctctggcaccgacttcaccctgacaatcagcagcgtgcagcccgaggacctggctatctactactgccaccagtacctgagcagccggaccttcggccagggcaccaagctggaaatcaagagaggcggaggcggaagtggaggcggaggatctggcggcggaggctctcaggtgcaactgcagcagcctggcgctgaggtcgtgaagccaggcgcttccgtgaagatgtcctgcaaggccagcggctacaccttcaccagctactacatccactggatcaagcagacccctggacagggcctggaatgggtgggagtgatctaccccggcaacgacgacatcagctacaaccagaagttccagggcaaggccaccctgaccgccgacaagtctagcaccaccgcctacatgcaactgtccagcctgaccagcgaggacagcgccgtgtactactgcgccagagaagtgcggctgcggtacttcgatgtgtggggccagggaaccaccgtgaccgtgtcatct

SEQ ID NO: 550 - DNA, 750 bp, Artificial Sequence
  Synthetic Polynucloetide
gacatcgtgatgacacagtcaccagatagcctcaccgtctccctgggggagcggaccaccattaattgtaaatccagccaaagcgtgctggactcaagcaagaacaagaatagcctcgcctggtatcagcagaagcccggtcagcctccaaagctgctgctttcttgggcctccaccagagagtccgggattcctgataggtttagtggttcaggctccggcacagattttactctgaccattgattctctccagccagaggattctgcaacttattactgccagcaaagcgcccactttcctataacttttggccagggaacccgacttgaaatcaagggcggaggcggaagtggaggcggaggatctggcggcggaggctctcaggtgcagctggtgcagagcggtgccgaagtgaagaaaccaggtgcatccgttaaagtttcatgtaaggctagtggatataccttcaccaattacggaatgaactgggtgaaacaggcccctggccagggactgaagtggatggggtggattaacacctacaccggggagccgacttatgcagacgactttaaggggcgggtcacgatgacctccgacacctccaccagtaccgcctacctggagctgcacaaccttaggtcagacgataccgccgtgtattactgtgcccgatggtcttggtccgacggatactatgtctacttcgactattggggccaggggaccacagttaccgtgtcctct

SEQ ID NO: 551 - DNA, 750 bp, Artificial Sequence
  Synthetic Polynucloetide
gatgtgctgctgacccagagccctctgagcctgcctgtgacactgggacagcctgccagcatctcctgtcggagcagccagaccatcgtgcacagcaacggcaacacctacctggaatggttccagcagcggccaggccagagccccagactgctgatctaccaggtgtccaacagattcagcggcgtgcccgacagattctccggcagcggctctggcaccgacttcaccctgaagatcagccgggtggaagccgaggacgtgggcgtgtactactgttttcaaggcagccacgtgccccggacctttggcggaggaacaaaggtggaaatcaagagaggcggaggcggaagtggaggcggaggatctggcggcggaggctctcagatccaactggtgcagagcggcagcgagctgaagaaacctggggccagcgtgaaggtgtcctgcaaggccagcggctacacctttaccaactacggcatgaactgggtgcgccaggcccctggacagggcctgaaatggatgggctggatcaacaccaacaccggcgagcctaagtacgccgaagagttcaagggcagattcgccctgagcctggacaccagcgtgtccacagcctacctccagatcaacagcctgaaggccgaggataccgccgtgtacttctgcgccagaggctacggcaactacgccagaggggcttggctggcctattggggccagggaacactcgtgaccgtgtcctct

SEQ ID NO: 552 - DNA, 735 bp, Artificial Sequence
  Synthetic Polynucloetide
gaccacatcgtgctgacccagagccctagcagcctgtctgccagcctgggcgacagagtgaccatcagctgtagagccagccaggacatcagcacctacctgaactggtatcagcagaaacccgacggcaccgtgaagctgctgatcttctacaccagcagactgcacgccggggtgcccagcagattttctggcagcggctctggcacccaccacagcctgaccatctccaacctggaacaggaagatattgctacctacttctgtcagcaaggcaacagcctgcccttcaccttcggcagcggcaccaagctggaaatcaagagaggcggaggcggaagtggaggcggaggatctggcggcggaggctctcaggtgcagctgaaagagagcggccctgagctggaaaagcctggggccagcgtgaagattagctgcaaggccagcggctacagcttcaccgcctacagcatgaactgggtcaagcagaacaacggcatgagcctggaatggatcggcagcatcgacccctactacggcgacaccaaatacgcccagaagttcaagggcaaggccaccctgaccgtggataaggccagcagcaccgcctacctccagctgaagtctctgaccagcgaggacagcgccgtgtactactgcgccagacggatgattaccaccggcgactggtacttcgacgtgtggggagccggaaccaccgtgacagtgtctagc

SEQ ID NO: 553 - DNA, 735 bp, Artificial Sequence; identical to SEQ ID NO: 552
  Synthetic Polynucloetide

SEQ ID NO: 554 - DNA, 735 bp, Artificial Sequence
  Synthetic Polynucloetide
gacatcgtgatgacccagagccccgatagcctggccgtgtctctgggagagagagccaccatcaactgccgggccagcaagagcgtgtccaccagcggctacagcttcatgcactggtatcagcagaagcccggccagccccccaagctgctgatctacctggcctccaacctggaaagcggcgtgcccgatagattcagcggcagcggctctggcaccgacttcaccctgaccatcagttctcttcaggccgaggacgtggccgtgtactactgccagcacagcagagaggtgccctggacattcggccagggcacaaaggtggaaatcaagcggggcggaggcggaagtggaggcggaggatctggcggcggaggctctcaggtgcagctggtgcagtctggggccgaagtgaagaaacctggggccagcgtgaaggtgtcctgcaaggccagcggatacacctttaccaactacggcatgaactgggtgcgccaggcccctggacagggcctggaatggatgggctggatcaacacctacaccggcgagcccacatacgccgacgccttcaagggcagattcgccttcagcctggacaccagcacctccaccgcctacctccagatcaacagcctgcggagcgacgacaccgccgtgtattattgcgccagagattacggcgactacgggatggactattggggccagggaaccaccgtgaccgtgtcctct

SEQ ID NO: 555 - DNA, 723 bp, Artificial Sequence
  Synthetic Polynucloetide
gacatcgtgatgacccagacccccctgaccctgagcgtgacaatcggacagcctgccagcatctcctgcaagagcagccagagcctgctggacagcgacggcaagacctacctgaactggctgctgcagaggccaggccagagccccgagagactgatctacctggtgtccaagctggactccggcgtgcccgatagattcacaggcagcggctccggcaccgacttcaccctgaagatcagccgggtggaagccgaggacctgggcgtgtactgttgttggcagggcacccacttcccttacaccttcggcggagggaccaaggtggaaatcaagggcggcggaggcggaagtggaggcggaggatctggcggcggaggctctcaggtgcaactgcagcagcctggcgctgaacttgtgcggccaggcgcctctgtgaagctgagctgtaaagccagcggctacaccttcaccagctactggatgaactgggtcaagcagcgcccaggccagggcctggaatggatcggaatgatcgaccccagcgacagcgagacacactacaaccacatcttcaaggacaaggccaccctgaccgtggacaagtccagcagcacagcctacctgcaactgtccagcctgaccagcgaggacagcgccgtgtactactgcgcccggaacctgtatctgtggggccagggaacaagcgtgaccgtgtctagc

SEQ ID NO: 556 - DNA, 732 bp, Artificial Sequence
  Synthetic Polynucloetide
gacatccagttgacccagtcccccagctcactcagcgccagtgtgggggaccgggtgaccattacctgtaaagccagtcagagtgtggactatgagggggatagcttcctgaattggtatcagcagaagcctggcaaagccccaaagctgctgatctacgctgcatctaatctggagtcaggcgtgccttctaggttctccggtagtgggtctgggaccgatttcacattgaccatttcatccctccaacccgaggatttcgctacatattactgtcagcagtccaatgaggaccctctcacctttggccagggcaccaaagttgaaattaagagaggcggaggcggaagtggaggcggaggatctggcggcggaggctctgaagtccaacttgtggagtctggagggggcctggtgcagcccggcggctctctcagactgtcttgtgcggcaagcggctacaccttcagctcttactggatagaatgggtgaggcaggcacctggaaagggactggagtggattggagagattctgccaggagggggagatacaaattacaatgaaatcttcaaggggcgggccaccttttcagcggataccagcaagaatacagcttacctgcagatgaatagcctccgggcagaagataccgctgtttattattgcacgagacgggtgccaataagactggactattgggggcaagggactcttgtcaccgtcagttca

SEQ ID NO: 557 - DNA, 756 bp, Artificial Sequence
  Synthetic Polynucloetide
gacatcgtgatgagccagagccctagcagcctggccgtgtccgtgggcgagaaagtgaccatgagctgcaagagcagccagtccctgctgcacagcagcaaccagaagaactacctggcctggtatcagcagaagcccggccagtcccccaaggtgctgatctactgggccagcaccagagaaagcggcgtgcccgatagattcaccggcagcggctctggcaccgacttcaccctgaccatcaccagcgtgaagtccgaggacctggctgtgtactactgccagcagtattacagctacccctggaccttcggcggaggcacccggctggaaatcaaaagaggcggaggcggaagtggaggcggaggatctggcggcggaggctctgaagtgcaactccagcagagcgtggccgagcttgtgaagcctggcgcttccgtgaagatgtcctgcaaggtgtccggctacaccctgacagaccacaccatccactggatgaagcagcggcctgagcagggcctggaatggatcggctacatctaccccagggacggcatcaccggctacaacgagaagttcaagggcaaggccacactgaccgccgacaccagcagcagcacagcctacatgcaactgaacagcctgaccagcgaggacagcgccgtgtacttctgtgccagatggggctacagctacagaaactacgcctactactacgactactggggccagggcacaaccctgaccgtgtctagt

SEQ ID NO: 558 - DNA, 747 bp, Artificial Sequence
  Synthetic Polynucloetide
gagatcgtgctgacacagagccctggcaccctgagcctgtctccaggcgaaagagccacactgagctgtcgggccagccagagcgtgtccagctcttacctggcctggtatcagcagaagcccggccaggctccccggctgctgatctacggaacaagcagcagagccaccggcatccccgacagattttctggcagcggctccggcaccgacttcaccctgacaatcagcagactggaacccgaggacttcgccgtgtactactgccagcagtacggcagcagccccttcacctttggcggaggcaccaaggtggaaatcaagagaggcggaggcggaagtggaggcggaggatctggcggcggaggctctcaggtgcaactccaggaatctggccccggactggctaagcccagcgagacactgagcctgacctgtaccgtgtccggcgacagcatcaccagctactactggtcctggatcagacagccccctggcaagggcctggaatggatcggctacatctactacagcggcagcaccaactacaaccccagcctgaagtccagagtgaccatcagcgtggacaccagcaagaaccagttctccctgaagctgagcagcgtgacagccgccgacaccgccgtgtattattgcgccagagatcagcggagaatcgccgctgccggcacccacttttacggcatggatgtgtggggccagggcaccaccgtgaccgtgtcatct

SEQ ID NO: 559 - DNA, 717 bp, Artificial Sequence
  Synthetic Polynucloetide
gacatccagatgacccagagccccagcagcctgtctgccagcgtgggcgacagagtgaccatcacctgtagagccagccagagcatcagcctgtggctgaactggtatcagcagaagcccggcaaggcccccaagctgctgatctacgccgccagcacactccagagcggcgtgccaagcagattttccggcagcggctccggcaccgacttcaccctgacaatcagctccctccagcccgaggacttcgccacctactactgccagcagtactacaccagcccctacaccttcggccagggcaccaaggtggaaatcaagagaggcggaggcggaagtggaggcggaggatctggcggcggaggctctcaggtgcaactgctggaatctggcggcggactggtgcagcctggcggatctctgagactgagctgtgccgccagcggcttcaccttcagcagctacgccatgagctgggtgcgccaggcccctggaaaaggactggaatgggtgtccgtgatccggtccagcggcagcagcacctattacgccgatagcgtgaagggccggttcaccatcagccgggacaacagcaagaacaccctgtacctccagatgaacagcctgcgggccgaggacaccgccgtgtactattgtgctaggggaggcggctacttcgactactggggccagggaacactcgtgaccgtgtcctct

SEQ ID NO: 560 - DNA, 726 bp, Artificial Sequence
  Synthetic Polynucloetide
gacatccagatgacccagagccccagcagcctgtctgccagcgtgggcgacagagtgaccatcacctgtagagccagccagagcatcagcagctacctgaactggtatcagcagaagcccggcaaggcccccaaactgctgatctacgccgtgtccacactccagagcggcgtgcccagcagattttctggcagcggctccggcaccgacttcaccctgacaatcagctccctccagcccgaggacttcgccacctactactgtcagcagagcggcaccttccctcccaccacatttggacagggcaccaaggtggaaatcaagagaggcggaggcggaagtggaggcggaggatctggcggcggaggctctcaggtgcaactgctggaatctggcggcggactggtgcagcctggcggatctctgagactgagctgtgccgccagcggcttcaccttcagcagccacggaatgcactgggtgcgccaggcccctggaaagggactggaatgggtgtccgtgatctccggcagcggcagcaataccggctacgccgatagcgtgaagggccggttcaccatcagccgggacaacagcaagaacaccctgtacctccagatgaacagcctgcgggccgaggacaccgccgtgtactattgtgccagacagtggggcagctacgccttcgattcttggggccagggcaccctcgtgaccgtgtcatct

SEQ ID NO: 561 - DNA, 702 bp, Artificial Sequence
  Synthetic Polynucloetide
atgacccagagccccaagttcctgctggtgtctgccggcgacagagtgaccctgacatgcaaggccagccagagcgtgaacaacgacgtgtactggtatcagcaggaacccggccagtcccccaagctgctgatctactgggccagcaccagagaaagcggcgtgcccgatagattcaccggcagcggctctggcaccgacttcaccctgacaatcagcagcgtgcaggccgaggacctggccgtgtactactgcaagcagagctacaacctgtacaccttcggcggaggcaccaagctggaaatcaagagaggcggcggaggatctggcggaggcggatctgggggcggaggctctgaatctggaagaggactggtgcagcctggcggcagcagaaagctgtcttgtgccgccagcggcttcaccttcagcaccagcggaatgcactgggtgcgccaggcccctgagaagggactggaatgggtggcctacatcagctccggcagcaccaccatctaccacgccgataccgtgaagggccggttcaccatcagccgggacaaccccaagaataccctgttcctccagatgaccagcctgcggagcgaggacaccgccatgtactattgctgcgccagaagcggccagttcggcaactacttcgactactggggccagggcaccaccctgaccgtgtcatct

SEQ ID NO: 562 - DNA, 717 bp, Artificial Sequence
  Synthetic Polynucloetide
cagagcccatctagcctggctgtgtctgccggcgagaaagtgaccatgagctgcaagagcagccagagcctgctgaacagccggacccggaagaactacctggcctggtatcagcagaagcccggccagagccccaagctgctgatctactgggccagcaccagagaaagcggcgtgcccgatagattcaccggctctggcagcggcaccgacttcaccctgacaatcagcagcgtgcaggccgaggacctggccgtgtactactgcaagcagagcaacctgtacaccttcggcggaggcaccaagctggaaatcaagggcggaggcggaagtggaggcggaggatctggcggcggaggctctcaggtgcagctggaagagtctggacccgagcttgtgaagcctggggccagcgtgaagctgtcctgtaaagccagcggctacaccttcaccgagtacatcatccactgggtcaagcagcggagcggccagggcctggaatggatcggctggttttaccctggctccggcagcatcaagtacaacgagaagttcaaggacaaggccaccctgaccgccgacaagtccagcagcaccgtgtacatggaactgagcggcctgaccagcgaggacagcgccgtgtatttctgcgccagacacgacggctacagctacttcgactattggggccagggcaccacactgaccgtgtcctct

SEQ ID NO: 563 - DNA, 726 bp, Artificial Sequence
  Synthetic Polynucloetide
gacatccagatgacccagagccccagcagcctgtctgcctctctgggcgagagagtgtccctgacctgtcgggccacacaggaactgagcggctacctgtcttggctgcagcagaagcccgacggcaccatcaagcggctgatctacgccgccagcaccctggatagcggcgtgcccaagagattcagcggcaacagaagcggcagcgactacagcctgaccatcagctccctggaaagcgaggacttcgccgactactactgcctgcagtacgccatctacccctacaccttcggcggaggcaccaagctggaaatcaagggcggaggcggaagtggaggcggaggatctggcggcggaggctctgaggtgcaactgcagcagtctggccccgagcttgtgaagcctggcgcctccgtgaagatgagctgcaaggccagcggctacacctttaccagctacttcatccactgggtcaagcagaaacccggccagggcctggaatggatcggcttcatcaacccttacaacgacggcagcaagtacaacgagaagttcaagggcaaggccaccctgaccagcgacaagagcagcagcaccgcctacatggaactgtccagcctgacatccgaggacagcgccgtgtactactgcaccagggacgacggctactacggctacgccatggactactggggccagggaacaagcgtcaccgtgtcctct

SEQ ID NO: 564 - DNA, 741 bp, Artificial Sequence
  Synthetic Polynucloetide
gacaccatcgtgctgacacagagccctgcttccctggccgtgtccctgggacagagagccaccatctcttgcagagccagcgagagcgtggacagctacggcaacagcttcatgcactggtatcagcagaagcccggccagccccccaagctgctgatctacctggcctccaacctggaaagcggcgtgcccgccagattttctggcagcggcagcagaaccgacttcaccctgaccatcgaccccgtggaagccgatgatgccgccacctactactgccagcagaacaactacgacccctggaccttcggcggaggcaccaagctggaaatcaagggcggaggcggaagtggaggcggaggatctggcggcggaggctctgaagtgcaactccagcagagcggccctgagcttgtgaagcctggcgcttccgtgaagatgagctgcaaggccagcggctacaccttcaccagctacgtgatgcactgggtcaagcagaaacctggacagggcctggaatggatcggctacatcaacccctacaacgacggcaccaagtacaacgagaagttcaagggcaaggccaccctgacaagcgacaccagcagcagcaccgcctacatggaactgaacagcctgaccagcgaggacagcgccgtgtacttctgcgccagacccatctacttcgacaacgactacttcgattactggggccagggcaccaccctgaaggtgtcctct

SEQ ID NO: 565 - DNA, 723 bp, Artificial Sequence
  Synthetic Polynucloetide
gacatccagatgacccagagccccagcagcctgtctgccagcgtgggcgacagagtgaccatcacatgcaaggccagccaggacgtgggaatcgccgtggcctggtatcagcagaaacccggcaaggtgcccaagctgctgatctactgggccagcaccagacacaccggcgtgcccgatagattttccggcagcggctccggcaccgacttcaccctgacaatcagctccctccagcccgaggacgtggcaacctactactgccagcagtacagcagctacccctacaccttcggccagggcaccaaggtggaaatcaagggcggaggcggaagtggaggcggaggatctggcggcggaggctctgaagtgcaactggtggaatcaggcggcggactggtgcagcctggcggatctctgagactgagctgtgccgccagcggcttcgacttcagccggtactggatgagctgggtgcgccaggcccctggcaaaggactggaatggatcggcgagatcaaccccgacagcagcaccatcaactacgcccccagcctgaaggacaagttcatcatcagccgggacaacgccaagaacagcctgtacctccagatgaactccctgcgggccgaggacaccgccgtgtactattgcgccagacccgacggcaactactggtacttcgacgtgtggggccagggaaccctcgtgaccgtgtcatct

SEQ ID NO: 566 - DNA, 726 bp, Artificial Sequence
  Synthetic Polynucloetide
gacatcgtgatgacccagagccagaagagcatgagcaccagcgtgggcgacagagtgagcatcacctgcaaggccagccaggacgtgatcaccggcgtggcctggtaccagcagaagcccggccagagccccaagctgctgatctacagcgccagctacagatacaccggcgtgcccgacagattcaccggcagcggcagcggcaccgacttcaccttcaccatcagcaacgtgcaggccgaggacctggccgtgtactactgccagcagcactacagcacccccctgaccttcggcgccggcaccaagctggagctgaagggcggaggcggaagtggaggcggaggatctggcggcggaggctctcaggtgcagctgcagcagcccggcgccgagctggtgagacccggcgccagcgtgaagctgagctgcaaggccagcggctacagcttcaccacctactggatgaactgggtgaagcagagacccggccagggcctggagtggatcggcatgatccaccccagcgacagcgagaccagactgaaccagaagttcaaggacaaggccaccctgaccgtggacaagagcagcagcaccgcctacatgcagctgagcagccccaccagcgaggacagcgccgtgtactactgcgccagaagcaccatgatcgccaccagagccatggactactggggccagggcaccagcgtgaccgtgagcagc

SEQ ID NO: 567 - DNA, 744 bp, Artificial Sequence
  Synthetic Polynucloetide
cagagcgtgctgacacagcctccatccgtgtctggcgctccaggccagagagtgaccatctcctgtaccggcagcggcagcaacatcggagccccctacgacgtgtcctggtatcagcaactgcctggcaccgcccccaagctgctgatctaccacaacaacaagcggcccagcggcgtgcccgatagattcagcggctctaagagcggcaccagcgccagcctggctatcactggactccaggccgaggacgaggccgactactactgtgccacagtggaagccggcctgagcggctctgtgtttggcggcggaacaaagctgaccgtgctgggagctggcggaggcggaagtggaggcggaggatctggcggcggaggctctcaggtgcaactggtgcagagcggagccgaagtgaagaaacctggggccagcgtgaaggtgtcctgcaaggtgtccggctacaccctgaccgagctgagcattcactgggtgcgccaggcccctggcaagggactggaatggatgggcggcttcgaccccgaagagaacgagatcgtgtacgcccagcggttccagggcagagtgacaatgaccgaggacaccagcaccgacaccgcctacatggaactgagcagcctgcggagcgaggataccgccgtgtactactgcgccatcgtgggcagcttcagccctctgacactgggcctgtggggccagggaactatggtcaccgtgtccagc

SEQ ID NO: 568 - DNA, 744 bp, Artificial Sequence
  Synthetic Polynucloetide
cagagcgtgctgacacagcctccatccgtgtctggcgctccaggccagagagtgaccatctcctgtaccggcagcggcagcaacatcggagccccctacgacgtgtcctggtatcagcaactgcctggcaccgcccccaagctgctgatctaccacaacaacaagcggcccagcggcgtgcccgatagattcagcggctctaagagcggcaccagcgccagcctggctatcactggactccaggccgaggacgaggccgactactactgccagagctacgacagcagcagcatcagcaccatcttcggcggaggcaccaagctgacagtgctgggagctggcggaggcggaagtggaggcggaggatctggcggcggaggctctcaggtgcaactggtgcagagcggagccgaagtgaagaaacctggggccagcgtgaaggtgtcctgcaaggtgtccggctacaccctgaccgagctgagcattcactgggtgcgccaggcccctggcaagggactggaatggatgggcggcttcgaccccgaagagaacgagatcgtgtacgcccagcggttccagggcagagtgacaatgaccgaggacaccagcaccgacaccgcctacatggaactgagcagcctgcggagcgaggataccgccgtgtactactgtgccatcgtgggcagcttcagcggaatcgcctacagaccttggggccagggcacaatggtcaccgtgtctagc

SEQ ID NO: 569 - DNA, 738 bp, Artificial Sequence
  Synthetic Polynucloetide
gacatccagatgacccagagccccagcagcctgtctgccagcgtgggcgacagagtgaccatcacctgtagcgccagcagcagcgtgtcctacatgtactggtatcagcagaagcccggcaaggcccccaagctgctgatctacctgaccagcaatctggcctccggcgtgcccagcagattttctggcagcggctccggcaccgacttcaccctgacaatcagctccctccagcccgaggacttcgccacctactactgtcagcagtggcggagcaaccccttcaccttcggccagggcaccaagctggaaatcaagagaggcggaggcggaagtggaggcggaggatctggcggcggaggctctcagatcaccctgaaagagtccggccccaccctcgtgaagcctacccagaccctgacactgacctgcaccttcagcggcttcagcctgagcacaagcggcatgggcgtgggctggatcagacagcctcctggaaaggccctggaatggctggcccacatttggtgggacgacgtgaagcggtacagccccagcctgaagtcccggctgaccattaccaaggacaccagcaagaaccaggtggtgctgaccatgacaaacatggaccccgtggacaccgccacatattactgcgcccggatcgtgtccttcgacaacgacgtggtgtccgctatggactactggggccagggaaccctcgtgaccgtgtctagt

SEQ ID NO: 570 - DNA, 723 bp, Artificial Sequence
  Synthetic Polynucloetide
gagatcgtgatgacccagagccctgccaccctgtccgtgtctccaggcgaaagagccaccctgagctgcaaggcttcccagagcgtgtccaacgacgtcgtgtggtatcagcagaagcccggccaggcccccagactgctgatctactacgccagcaacagatacaccggcatccccgccagattcagcggctctggcagcggcaccgagttcaccctgacaatcagcagcctccagagcgaggacttcgccgtgtactactgtcagcaggactacaccagcccctggaccttcggccagggcaccaagctggaaatcaagagaggcggaggcggaagtggaggcggaggatctggcggcggaggctctcaggtgcaactggtgcagagcggagccgaagtgaagaaacctggggccagcgtgaaggtgtcctgcaaggccagcggctacacctttaccaactacggcatgaactgggtgcgccaggctcctggacagggcctggaatggatgggctggatcaacacctacaccggcgagcccacctacgccgacgacttcaagggcagagtgaccatgaccaccgacaccagcacctccaccgcctacatggaactgcggagcctgagaagcgacgacaccgccgtgtattattgcgcccggatcggcgacagcagccccagcgattattggggccagggaaccctcgtgaccgtgtcctct

SEQ ID NO: 571 - DNA, 723 bp, Artificial Sequence
  Synthetic Polynucloetide
gacatcctgctgacccagagccccgtgatcctgtccgtgtctcctggcgagagagtgtccttcagctgtcgggccagccagagcatcggcaccaacatccactggtatcagcagcggaccaacggcagccccagactgctgattaagtacgccagcgagtccatcagcggcatccccagcagattttccggcagcggctccggcaccgacttcaccctgagcatcaacagcgtggaaagcgaggacattgccgactactactgccagcagaacaacaactggcccaccaccttcggagccggcaccaagctggaactgaagggcggaggcggaagtggaggcggaggatctggcggcggaggctctcaggtgcagctgaagcagagcggacctggcctggtgcagcctagccagagcctgtccatcacctgtaccgtgtccggcttcagcctgaccaactacggcgtgcactgggtgcgccagagccctggaaaaggactggaatggctgggagtgatttggagcggcggcaacaccgactacaacacccccttcaccagcagactgtctatcaacaaggacaacagcaagagccaggtgttcttcaagatgaacagcctccagagcaacgacaccgccatctactactgtgctagagccctgacctactatgactacgagttcgcctactggggccagggcacactcgtgacagtgtctgct

SEQ ID NO: 572 - DNA, 723 bp, Artificial Sequence
  Synthetic Polynucloetide
gagatccagctggtgcagagcggagccgaagtgaagaagcctggcgagagcctgcggatcagctgcaagggcagcggcttcaacatcgaggactactacatccactgggtgcgccagatgcccggcaagggcctggaatggatgggcagaatcgaccccgagaacgacgagactaagtacggccccatcttccagggccacgtgaccatcagcgccgacaccagcatcaacaccgtgtacctccagtggtccagcctgaaggccagcgacaccgccatgtactactgcgcctttagaggcggcgtgtactggggccagggcaccacagtgacagtgtctagcggcggaggcggaagtggaggcggaggatctggcggcggaggctctgatgtcgtgatgacccagagccccgacagcctggctgtgtctctgggagagagagccaccatcaactgcaagtccagccagtccctgctggacagcgacggcaagacctacctgaactggctccagcagaagcccggccagccccccaagagactgatctccctggtgtccaagctggactccggcgtgcccgatagattttccggctctggcagcggcaccgacttcaccctgacaatcagctcccttcaggccgaggacgtggccgtgtactattgctggcagggcacacacttccccggcacctttggcggaggcaccaaggtggaaatcaag

SEQ ID NO: 573 - DNA, 747 bp, Artificial Sequence
  Synthetic Polynucloetide
gagctgcagatgacccagagccctagcagcctgtctgccagcgtgggcgacagagtgaccatcacctgtagagccagccagagcatcagcagctacctgaactggtatcagcagaagcccggccagccccccaaactgctgatctactgggccagcaccagagaaagcggcgtgcccgatagattcagcggcagcgagagcggcaccaactacaccctgaccatcagctccctgcagcccgaggacttcgccacctacttttgccagcagagcgacagcctgcccatcacctttggacagggcacccggctggacattcagggcggaggcggaagtggaggcggaggatctggcggcggaggctctgaggtgcaactgctggaatctgggggcggagtggtgcagcctggcagaagcctgagactgagctgtgccgccagcggcttcaccttcagctcctacggaatgcactgggtgcgccaggcccctggcaaaggactggaatgggtggccgtgatctcctacgacggcagcaacaagtactacgccgacagcgtgaagggccggttcaccatcagccgggacaacagcaagaacaccctgtacctgcagatgaacagcctgcgggccgaggacaccgccgtgtactactgcgccaaggatatgggctggggcagcggctggcggccttactactactacggcatggacgtgtggggccagggcaccaccgtgacagtgtcatct

SEQ ID NO: 574 - DNA, 744 bp, Artificial Sequence
  Synthetic Polynucloetide
gagcttgtgatgacccagagccccagcagcctgacagtgacagccggcgagaaagtgaccatgagctgcaagagcagccagagcctgctgaacagcggcaaccagaagaactacctgacctggtatcagcagaagcccggccagccccccaagctgctgatctactgggccagcaccagagaaagcggcgtgcccgatagattcaccggctctggcagcggcaccgacttcaccctgacaatcagcagcgtgcaggccgaggacctggccgtgtactactgccagaacgactacagctaccccctgaccttcggagccggcaccaagctggaaatcaagggcggaggcggaagtggaggcggaggatctggcggcggaggctctgaagtgcagctgctggaacagtctggcgccgaacttgtgcggcctggcaccagcgtgaagatcagctgtaaagccagcggctacgccttcaccaactactggctgggctgggtcaagcagaggcctggacacggcctggaatggatcggcgacatctttcccggctccggcaacatccactacaacgagaagttcaagggcaaggccaccctgaccgccgacaagtctagcagcaccgcctacatgcagctgtccagcctgacctttgaggacagcgccgtgtatttctgtgcccggctgcggaactgggacgagcccatggattattggggccagggcaccaccgtgaccgtgtctagt

SEQ ID NO: 575 - DNA, 738 bp, Artificial Sequence
  Synthetic Polynucloetide
gacatccaaatgacacagagtccttctagtttgagtgcgagcgtgggggacagggtgaccattacctgcagggccagccagagcataagctcataccttaattggtaccagcaaaaaccaggtaaggcccctaagctcctgatctacgcggcctcttcacttcaatctggggtcccttcccgcttcagtggctccggcagcggcaccgacttcacgctcactatatcaagtctgcagcctgaggatctcgccacctattactgtcaacaaagttattccacccctttcacctttggaccgggcacgaaagtggatattaagggcggaggcggaagtggaggcggaggatctggcggcggaggctctgtgcacgaggtccagcttgtgcagtccggggcagaggtcaagaagcctggttctagcgtaaaagtgagttgcaaagcctcaggtgggacattttcatcctacgcgatcagttgggttagacaggctcctggtcaagggctggaatggatgggcggaattattccaatcttcggaacagcgaattacgcgcagaagttccagggtagagtaaccatcactgctgacaagtccacctccaccgcatacatggaattgtctagtctccggagcgaggatacggcggtgtattattgtgctacgttcgccctgtttggcttccgcgaacaggctttcgacatctgggggcagggcacgacagtcacggttagtagt

SEQ ID NO: 576 - DNA, 720 bp, Artificial Sequence
  Synthetic Polynucloetide
tacatccacgtgacacagagccctagcagcctgtccgtgtccatcggcgatagagtgaccatcaactgccagacctctcaaggcgtgggcagcgacctgcactggtatcagcacaaacctggcagagcccctaagctgctgatccaccatgccagctctgtggaagatggcgtgcccagcagattttccggcaccggatttcacaccagcttcaacctgacaatcaacgacctccaggccgacgacatcggcacctactactgtcaagtgctccagagcttcggcagaggcagcagactggatacaaaaggcggaggcggaagtggaggcggaggatctggcggcggaggctctagggcacacctggtgcagtctggcaccgccatgaagaaacctggcgcttccgtcagagtgtcctgtcagacaagcggctacaccttcacagcccacatcctgttctggttcagacaggccccaggcagaggactggaatgggtcggatggatcaagccccagtacggggccgtgaatttcggcggaggcttcagagacagagtgaccctgaccagggacgtgtaccgggaaatcgcctacatggacatccggggcctgaagcctgatgacaccgccgtgtactactgcgccagggatagaagctacggcgacagctcttgggctctcgatgcttggggacagggcacaacagtggtggtgtctgct

SEQ ID NO: 577 - DNA, 735 bp, Artificial Sequence
  Synthetic Polynucloetide
gacatcgtgctgacccagagccctctgagcctggccgtgtctctgggacagcctgccatcatcagctgcaaggccagccagagcgtgtcctttgccggcacctctctgatgcactggtatcaccagaagcccggccagcagcccagactgctgatctacagagccagcaacctggaagccggcgtgcccgatagattttccggcagcggcagcaagaccgacttcaccctgaccatcagccccgtggaagccgaagatgccgccacctactactgccagcagagcagagagtacccctacaccttcggcggaggcaccaagctggaaatcaagaggggcggaggcggaagtggaggcggaggatctggcggcggaggctctcaggtccaactggtgcagagcggagccgaggtcgtgaagcctggcgcttccgtgaagattagctgcaaagccagcggctacacctttaccggctactttatgaactgggtcaagcagagccctggccagagcctggaatggatcggcagaatccacccctacgacggcgacaccttctacaaccagaagttccagggcaaggccaccctgacagtggacaagagcagcaacaccgcccacatggaactgctgagcctgaccagcgaggacttcgccgtgtactactgcaccagatacgacggcagccgggctatggactattggggccagggcaccaccgtgaccgtgtctagt

SEQ ID NO: 578 - DNA, 723 bp, Artificial Sequence
  Synthetic Polynucloetide
gacgttgtgatgacccagacccccctgagcctgcctgtgacacctggcgaacctgccagcatcagctgtcggagcagccagagcctggtgcacagaaacggcaacacctacctgcactggtatctccagaagcccggccagagccccaagctgctgatccacaaggtgtccaacagattcagcggcgtgcccgacagattctccggcagcggctctggcaccgacttcaccctgaagatcagccgggtggaagccgaggacctgggcgtgtacttctgtagccagagcacccatgtgccccccctgacatttggagccggcaccaagctggaactgaagggcggaggcggaagtggaggcggaggatctggcggcggaggctctgaagtgcagctggtgcagtctggcgctgaggtggaaaagcctggggccagcgtgaagattagctgcaaggccagcggcagcagcttcaccggctacaacatgaactgggtgcgccagaacatcggcaagagcctggaatggatcggagccatcgacccctactacggcggcaccagctacaaccagaagttcaagggcagagccaccctgaccgtggacaagagcaccagcaccgcctacatgcacctgaagtccctgcggagcgaggacaccgccgtgtactactgtgtgtccggcatggaatattggggccagggcaccagcgtgaccgtgtctagt

SEQ ID NO: 579 - DNA, 717 bp, Artificial Sequence
  Synthetic Polynucloetide
gagatcgtgatgacccagacccctgccaccctgtctgtgtctgccggcgagagagtgaccattacctgcaaggccagccagagcgtgtccaacgacgtgacctggtatcagcagaagcccggccaggcccccagactgctgatctacagcgccagcaacagatacagcggcgtgcccgccagattttccggcagcggctacggcaccgagttcaccttcaccatcagcagcgtgcagagcgaggacttcgccgtgtacttctgtcagcaagactacagcagcttcggccagggcaccaagctggaaatcaagaggggcggaggcggaagtggaggcggaggatctggcggcggaggctctcaggtgcagctggtggaatctggacctggcgtggtgcagcctggcagaagcctgagaatcagctgtgccgtgtccggcttcagcgtgaccaactacggcgtgcactgggtgcgccagccacctggaaaaggactggaatggctgggcgtgatctgggctggcggcatcaccaactacaacagcgccttcatgtcccggctgaccatctccaaggacaacagcaagaacaccgtgtacctccagatgaacagcctgcgggccgaggacaccgccatgtactactgtgcttccagaggcggccactacggctacgccctggattattggggccagggaaccctcgtgaccgtgtcctct

SEQ ID NO: 580 - DNA, 726 bp, Artificial Sequence
  Synthetic Polynucloetide
gacatccagatgacccagaccgccagcagcctgcctgcctctctgggcgacagagtgaccatctcctgtagcgccagccaggacatcagcaactacctgaactggtatcagcagaaacccgacggcaccgtgaagctgctgatcttctacagcagcaacctgcacagcggcgtgcccagcagattttctggcggcggaagcggcaccgactacagcctgaccatcagcaatctggaacccgaggacattgccacctacttttgccaccagtacagcaagctgccctggacctttggcggaggcaccaagctggaaatcaagagaggcggaggcggaagtggaggcggaggatctggcggcggaggctctgaagtgaccctggtggaaagcggcggagacttcgtgaagcctggcggctctctgaaggtgtcctgtgccgccagcggcttcgcctttagccactacgccatgagctgggtgcgccagacccctgccaagagactggaatgggtggcctacatcagcagcggcggctccggcacctactactccgatagcgtgaagggccggttcaccatcagccgggacaacgccaagaacaccctgtacctccagatgcggagcctgcggagcgaggacagcgccatgtatttctgcaccagagtgaagctgggcacctattacttcgactcttggggccagggcaccaccctgaccgtgtcatct

SEQ ID NO: 581 - DNA, 732 bp, Artificial Sequence
  Synthetic Polynucloetide
cagttcgtgctgacccagagcccttctgcctctgctgccctgggagcctctgccaagctgacctgtacactgagcagcgcccacaagacctacaccatcgactggtatcagcagcagaagggaaaggcccccagatacctgatccaagtgaagtccgacggcacctacacaaaggccaccggcgtgcccgatagattcagcggcagtagcagcggagccgatagatacctgattatccccagcgtgcaggccgacgacgaggccgattactactgcggcaccgattacaccggcggctacgtgttcggcggaggcacacaactgaccgtgacaggcggaggcggaagtggaggcggaggatctggcggcggaggctctgagcaactgaaagagtctggcggcggactgttcaagcccaccgataccctgaccctgacctgcaccgtgtccggcttcagcctgagctactacggcgtgaactgggtgcgccaggcccctggcaatggcctggaatggatcggcacaatcggcggcagcggcgacacctactatgcctcttgggccaagtccagaagcaccatcatcagaaacaccaacgagaacaccgtgaccctgaagatgaccagcctgacagccgccgacaccgccacctacttttgcgtcagatacgccaacatcggctacgagtatttcaacgtgtggggacccggcaccctcgtgaccgtgtcatct

SEQ ID NO: 582 - DNA, 729 bp, Artificial Sequence
  Synthetic Polynucloetide
gacatccagatgacccagagccccagcagcctgtctgccagcgtgggcgacagagtgaccatcacctgtagagccagccagggcatcagctcttggctggcctggtatcagcagaagcccgagaaggcccccaagagcctgatctacgccgcctctagtctccagagcggcgtgcccagcagattttctggcagcggctccggcaccgacttcaccctgacaatcagctccctccagcccgaggacttcgccacctactactgccagcagtacaacagctacccccccacctttggcggaggcaccaaggtggaaatcaagggcggaggcggaagtggaggcggaggatctggcggcggaggctctgaagtgcaactggtggaatcaggcggcggactggtgcagcctggcgagtctctgagactgagctgtgtggcctccggcttcaccttcagccggtacaagatgaactgggtgcgccaggcccctggcaagggactggaatgggtgtcctacatcagccgcagcggcagagacatctactacgccgacagcgtgaagggccggttcaccatcagcagagacaacgccaagaacagcctgtacctccagatgaactccctgcgggacgaggacaccgccgtgtactactgtgccggaaccgtgaccacctattactacttcggcatggacgtgtggggccacggcaccaccgtgacagtgtcatct

SEQ ID NO: 583 - DNA, 726 bp, Artificial Sequence
  Synthetic Polynucloetide
cagtctgtggtcacacagccacctagcatgtctgccgctccaggccagcaagtgaccatctcttgtagcggcggcaacagcaacatcgagcggaactacgtgtcctggtatctgcaactgcctggcacagcccctaagctggtcatcttcgacaacgacagacggcccagcggcatccccgatagattttctggcagcaagagcggcaccagcgccacactgggaattaccggacttcagacaggcgacgaggccgactactactgtggcacatgggactctagcctgagaggctgggttttcggcggaggcacaaagctgacagtgcttggtggcggaggcggaagtggaggcggaggatctggcggcggaggctctgaagtgcagctcgttgagtctggcggcggactgattcaacctggcggaagcctgagactgagctgtgccgcttccggcttcaccttcagcaactacgccatgaactgggttcgacaggcccctggcaaaggactggaatgggtgtccaccatcaacggcagaggcagcagcaccatctacgccgattctgtgaagggcagattcaccatcagccgggacaacagcaagaacaccctgtacctccagatgaactccctgagagccgaggacaccgccacctattactgtgcccggtacatcagcagaggactgggcgattcttggggccagggcacactggttacagtg

SEQ ID NO: 584 - DNA, 729 bp, Artificial Sequence
  Synthetic Polynucloetide
cagtctgtgctgacacagcctccatctgcctctggcacacctggacagagagtgaccatcagctgtagcggcagcagaagcaacgtcggcggcaactacgtgttctggtatcagcaggtcccaggcgctacccctaagctgctgatctacagaagcaatcagcggcctagcggcgtgcccgatagatttgccggaagcaagagcggcagctctgccagccttgccatctctggactgagaagcgaggacgaggccgactactactgtgccacctgggatgatagcctgagcggcttcgtgtttggcaccggcaccaaagtgacagtgcttggtggcggaggcggaagtggaggcggaggatctggcggcggaggctctgaagttcagctggttgaatctggcggcggactggttaagcctggcggatctctgagactgtcttgtgccgccagcggcttcaccttcagcgattactacatgagctggatcagacaggcccctggcaaaggactggaatgggtgtcctacatcagcagcagcggctccaccatctactacgccgatagcgtgaagggcagattcaccatcagccgggacaacgccaagaacagcctgtacctccagatgaactccctgagagccgaggacaccgccgtgtactattgcgccagaggctacggcaaagcctacgatcaatggggccagggcacactggtcaccgtttcttct

SEQ ID NO: 585 - DNA, 726 bp, Artificial Sequence
  Synthetic Polynucloetide
gacatccagatgacccagagccccagcagcctgtctgccagcgtgggcgacagagtgaccatcacctgtagagccagccaggacgtgaacaccgccgtggcctggtatcagcagaagcctggcaaggcccccaagctgctgatctacagcgccagcttcctggaaagcggcgtgcccagcagattcagcggaagcagaagcggcaccgacttcaccctgaccatcagctccctccagcccgaggacttcgccacctactactgccagcagcactacaccacccctcccaccttcggccagaccaaggtggaaatcaagagaggcggaggcggaagtggaggcggaggatctggcggcggaggctctgaagtgcaactggtggaatctggcggcggactggtgcagcctggcggatctctgagactgagctgtgccgccagcggcttcaacatcaaggacacctacatccactgggtgcgccaggcccctggaaagggactggaatgggtggcccggatctaccccaccaacggctacaccagatacgccgacagcgtgaagggccggttcaccatcagcgccgacaccagcaagaataccgcctacctccagatgaacagcctgcgggccgaggataccgccgtgtactactgctcaagatggggaggcgacggcttctacgctatggacgtgtggggccagggcacccttgtgaccgtgtcatct

SEQ ID NO: 586 - DNA, 765 bp, Artificial Sequence
  Synthetic Polynucloetide
cagtctgccctgacacagcctcctagcgcctctggctctcccggccagagcatcaccatcagctgtaccggcaccagcaacaacttcgtgtcctggtatcagcagcacgccggcaaggcccccaagctcgtgatctacgacgtgaacaagcggcccagcggcgtgcccgatagattcagcggcagcaagagcggcaacaccgccagcctgacagtgtctggcctccagaccgatgacgaggccgtgtactactgcggcagcctcgtgggcaactgggacgtgatctttggcggaggcaccaagctgaccgtgctgggcggaggcggaagtggaggcggaggatctggcggcggaggctctcagccccagctccaggaatctggccccacactggtggaagccagcgagacactgagcctgacctgtgccgtgtccggcgattctaccgccgcctgcaatagcttctggggctgggtgcgccagcctcctggaaagggactggaatgggtgggaagcctgagccactgcgccagctattggaaccggggctggacctaccacaaccccagcctgaagtccagactgaccctggccctggacacccccaagaacctggtgttcctgaagctgaacagcgtgacagccgccgacaccgccacctactactgtgccagatttggcggcgaggtgctgcggtacaccgactggcctaaacctgcctgggtggacctgtggggcagaggaacactcgtgaccgtgtccagc

SEQ ID NO: 587 - DNA, 750 bp, Artificial Sequence
  Synthetic Polynucloetide
gagctggtgctgacacagagccctggcaccctgtctctgtctgccggcgaaagagccaccctgagctgtagagccagccagagcgtgtcctctggcagcctggcttggtatcagcagaagccaggccaggcccccagactgctgatctacggcgcttctaccagagccaccggcatccccgatagattcagcggctctggctccggcaccgacttcaccctgacaatcggcagactggaacccgaggacctggccgtgtactactgccagcagtacggcaccagcccctacacattcggccagggcaccaagctggaaatcggcggaggcggaagtggaggcggaggatctggcggcggaggctctctggaacagagcggagccgaagtgaagaaacccggcagcagcgtgcaggtgtcctgcaaagcaagcggcggcaccttctctatgtacggcttcaactgggtgcgccaggctcctggacacggcctggaatggatgggcggcatcatccccatcttcggcacctccaactacgcccagaaattccggggcagagtgaccttcaccgccgaccaggccacaagcaccgcctacatggaactgaccaacctgcggagcgacgacaccgccgtgtattattgcgccagagacttcggccccgactgggaggatggcgacagctacgatggcagcggcagaggcttcttcgacttctggggccagggaacccttgtgaccgtgtcctca

SEQ ID NO: 588 - DNA, 690 bp, Artificial Sequence
  Synthetic Polynucloetide
gacatccagatgacccagagccccagcagcctgtctgccagcgtgggcgacagagtgaccatcacctgtcaggccagccaggacatcaacaactacctgaactggtatcagcagaagcccggcaaggcccccaagctgctgatctacgacgccagcaatctgcagaccggcgtgcccagcagattttccggctctggcagcggcaccgacttcaccttcaccatcgaggacattgccacctactactgccagcagtacaccttcggccctggcaccaaggtggacatcaaaggcggaggcggaagtggaggcggaggatctggcggcggaggctctgaagtgcaactgctggaatctggcggcggactggtgcagcctggcggatctctgagactgagctgtgccgccagcggcttcacctttagctggtacagcatgacctgggtgcgccaggcccctggcaaaggactggaatgggtgtccagcatcgtgccctggggcgatttcacccagtacgccgatagcgtgaagggccggttcaccatcagccgggacaacagcaagaacaccctgtacctgcagatgaacagcctgcgggccgaggacaccgccgtgtactattgtgccaagggacctggctggggcagcttcgatctgtggggcagaggaacccttgtgaccgtgtccagc

SEQ ID NO: 589 - DNA, 720 bp, Artificial Sequence
  Synthetic Polynucloetide
gacatccagatgacccagagccccagcagcctgtctgccagcgtgggcgacagagtgaccatcacctgtaccgccagcctgagcgtgtccagcacctacctgcactggtatcagcagaagcccggcagcagccccaagctgtggatctacagcaccagcaacctggcctccggcgtgcccagcagattttctggcagcggctctggcaccagctacaccctgaccatcagctccctccagcccgaggacttcgccacctactactgccaccagtaccacagaagccccctgacctttggcggaggcaccaaggtggaaatcaagagaggcggaggcggaagtggaggcggaggatctggcggcggaggctctgaagtgcaactggtggaatctggcggcggactggtgcagcctggcggatctctgagactgagctgtgccgccagcggcttcagcctgaccaaatacggcgtgcactgggtgcgccaggcccctggaaaaggactggaatgggtgggagtgaagtgggctggcggctccaccgactacaacagcgccctgatgagccggttcaccatcagcaaggacaacgccaagaacagcctgtacctccagatgaactccctgcgggccgaggacaccgccgtgtactactgtgccagagatcaccgggacgctatggactactggggccagggaacactcgtgaccgtgtcctct

SEQ ID NO: 590 - DNA, 732 bp, Artificial Sequence
  Synthetic Polynucloetide
gacatccagatgacccagagccccagcagcctgtctgccagcgtgggcgacagagtgaccatcacatgcaaggccagccaggacgtgggaacagccgtggcctggtatcagcagaagcctggcaaggcccccaagctgctgatctacagcgccagctacagatccaccggcgtgcccagcagattttccggctctggcagcggcaccgacttcaccctgaccatctctagcctccagcccgaggacttcgccacctactactgccagcaccactactccgccccctggacatttggcggaggcaccaaggtggaaatcaagggcggaggcggaagtggaggcggaggatctggcggcggaggctctgaagtgcaactggtggaatcaggcggcggactggtgcagcctggcggatctctgagactgagctgtgccgccagcggcttcaccttcagcagaaacggcatgagctgggtgcgccaggcccctggaaaaggactggaatgggtggcaaccgtgtccagcggcggcagctacatctactacgccgacagcgtgaagggccggttcaccatctccagagacaacgccaagaacagcctgtacctccagatgaactccctgcgggccgaggacaccgccgtgtactattgtgccagacagggcaccaccgccctggctaccagattcttcgatgtgtggggccagggcaccctcgtgaccgtgtcatct

SEQ ID NO: 591 - DNA, 720 bp, Artificial Sequence
  Synthetic Polynucloetide
gacatccagatgacccagagcttcagcagcctgagcgccagcgtgggcgacagagtgaccatcacctgtagagccagccaggacatcagcaactacctgaactggtatcagcagaagcccggcaaggcccccaagctgctgatctactacaccagcagactgcacagcggcgtgcccagcagattttctggcagcggctccggcaccgactacaccctgacaatcagctccctgcagcccgaggacttcgctacctacttctgtcagcaaggcaacaccctgccctggacctttggcggaggcaccaagctggaaatcaagagaggcggaggcggaagtggaggcggaggatctggcggcggaggctctgaagtgcaactggtgcagtccggcggagggctggtgcagagcggaggatctctgagactgagctgcagagccagcggctacaccttcacccggtactggatgctgtgggtgcgccagaggccaggcaagggactggaatgggtggccgagatcaacccccggaacgaccggaccaactacaacgagaagttcaagacccggttcaccatcagcgtggacagaagcaagaacaccctgtacctgcagatggacagcctgcgggccgaggataccgccgtgtacttttgtgctctgggaggcggctacgctatggactactggggccagggaacccttgtgaccgtgtcctct

SEQ ID NO: 592 - DNA, 720 bp, Artificial Sequence
  Synthetic Polynucloetide
gacatccagatgacccagagcccccctagcctgtctgcctctgtgggcggcaaagtgaccatcacatgcaaggccagccaggacatcgaccgctacatggcctggtatcaggacaagcccggcaagggacccaagctgctgatccacgataccagcaccctccagcccggcatccccagcagattttctggcagcggctccggcagagactacagcttcagcatcagcaacctggaacccgaggacattgccacctactactgcctccagtacgacaacctgtggaccttcggcggaggcaccaagctggaaatcaagagaggcggaggcggaagtggaggcggaggatctggcggcggaggctctcaggtgcaactggtgcagagcggagccgagcttgtgaagcctggcgcttccgtgaagatgagctgcaaagccagcggctacatcttcaccaactacaacatccactgggtcaagaagtccccaggccagggcctggaatggatcggagccatctaccccggaaacggcgacgccccttacagccagaagttccaggacagagccaccctgaccgccgacaccagcagcagcaccacctacatggaactgagcagcctgaccagcgaggacagcgccgtgtactattgcgtgcgggccaactgggatgtggccttcgcctattggggccagggcacactggtgtccgtgtcctct

SEQ ID NO: 593 - DNA, 723 bp, Artificial Sequence
  Synthetic Polynucloetide
gacatccagatgacccagagccctgccagcctgtctgcctctgtgggcgagacagtgaccatcacctgtcgggtgtccggcaacatccacaactacctggcctggtatcagcagaagcagggcaagagcccccaactgctggtgtacaacgccaagaccctggccgatggcgtgcccagcagattttctggctctggcagcggcacccagtacagcctgaagatcaacagcctccagcccgaggacttcggcagctactactgccagcacttctggtccaacccctacaccttcggcggaggcaccaagctggaaatcaagggcggaggcggaagtggaggcggaggatctggcggcggaggctctcaggtgcaactccagcagtctggcgcttccgtgaaggtgtcctgcaaggccagcgaactcgtgcggcctggcacaggctacgccttcaccaattacctgatcgagtgggtcaagcagaggcccggacagggcctggaatggatcggagtgattaacccaggcagcggcggcaccaactacaacgagaagttcaagggcaaggccaccctgaccgccgacaagagcagcagcacagcctacatgcaactgagcagcctgaccagcgacgacagcgccgtgtacttctgcgcccggtacagaagctacgactggtacttcgacgtgtggggagccggcaccaccgtgacagtgtcatct

SEQ ID NO: 594 - DNA, 723 bp, Artificial Sequence
  Synthetic Polynucloetide
gacatccagatgacacagtctccggcgtcactgtccgcctccgtgggggagactgtgactattatttgtagggcatcagttaacatctactcttatttggcctggtaccagcagaagcaaggcaagagtcctcagctgctggtgtataatgcgaagatcctggcagagggcgtgccgagccggttctccggcagcggctcaggtacccaattttccctcaagatcaattcactgcagccagaggactttggcagttactattgtcaacaccactacggcacattcactttcgggtccggtacaaaattggagattaagcgaggcggaggcggaagtggaggcggaggatctggcggcggaggctctcaggtacagttgaaagaaagcgggcctggactggtagcgccttcccaatctctctccatcacgtgcaccatctctggcttctccctgacttcctatggagttcactgggtgaggcagccccccggcaagggactggaatggctggtcgtcatctggtccgacgggtccacaacctacaactccgctctgaaaagtcggctctctatttctaaagataatagcaagagccaggtgtttctgaaaatgaactctctgcagaccgatgatacggccatttactactgcgcttcacactatggctcaaccttggcattcgcttcctggggccacggaacactggtgaccgtttccgcagcc

SEQ ID NO: 595 - DNA, 747 bp, Artificial Sequence
  Synthetic Polynucloetide
gacattgtgatgacccagtctcacaaattcatgtccacatcagtaggagacagggtcagcgtcacctgcaaggccagtcagaatgtgggtaataatgtagcctggtatcaacagaaaccagggcaatctcctaaagtactgatttactcggcatcctaccggtacagtggagtccctgatcgcttcacaggcagtggatctgggacagatttcactctcaccatcagtaatgtgcagtctgaagacttggcagagtatttctgtcagcaatataacacctatccattcacgttcggctcggggacaaagttggaaataaaaggcggaggcggaagtggaggcggaggatctggcggcggaggctctgaggtacagctggaggaaagcggtggaggactggtgcaacctggagggtctatgaagctctcttgcgtagcttctgggttcacgttctccaattactggatgaactgggtgcggcagtcccccgagaaaggcctggaatgggtagcagaaattcggttcaagtcccataactatgctacacactttgccgagtctgtcaaaggccggttcactattagtcgagacgacagcaagtcttcagtctacctgcagatgaataacttgcgggcagaggacacaggtatctactactgcaccaggagaatcggcaactccgactatgactggtggtactttgacgtctggggagcaggcaccagcgtgacggtgagttcagcctca

SEQ ID NO: 596 - DNA, 723 bp, Artificial Sequence
  Synthetic Polynucloetide
gacatccagatgacccagagcagcagcagcttcagcgtgtccctgggcgacagagtgaccatcacatgcaaggccagcgaggacatctacatccggctggcctggtatcagcagaagcccggcaacgcccccagactgctgattagcgccgccacctctctggaaaccggcatccccagcagattctccggctctggcagcggcgaggactacaccctgacaatcaccagcctccagaccgaggacgtggcaacctactactgccagcagtattggaccaccccctggacctttggcggaggcaccaagctggaaatcaagagaggcggaggcggaagtggaggcggaggatctggcggcggaggctctgatgtgcagctccaggaatctggccccggactcgtgaagcctagccagagcctgagcctgacatgcaccgtgaccggctacagcatcaccatcgactacacctggaactggatcagacagttccccggcaacaaactggaatggatgggctacatcacctacagcggcagcaccgactacaaccccagcctgaagtccagaagctccatcaccagagacacctctatgaaccagttcttcttgcagctgaacagcgtgaccaccgaggacaccgccacctactattgcgccagactgggcagaagatacgccctggactattggggccagggcaccagcgtgacagtgtcctct

SEQ ID NO: 597 - DNA, 720 bp, Artificial Sequence
  Synthetic Polynucloetide
gatgtgcagctccaggaaagcggccctggcctcgtgaagcctagccagagcctgagcctgacatgcaccgtgaccggctacagcatcaccagcgactacacctggaactggatcagacagttccccggcaacaagctggaatggatgggctacatcacctacagcggcagcaccagctacaaccccagcctgaagtcccggaactccatcaccagagacaccagcaagaaccagttcttcttgcagctgaacagcgtgaccaccgaggacaccgccacctactactgcgccagactgggcagacggtacaccatggactattggggccagggcacctccgtgaccgtgtctagcggaggcggaggaagtggcggcggaggatctgggggaggcggaagcgatatccagatgacccagtccagcagcagcttcagcgtgtccctgggcgacagagtgaccatcacctgtatggcctccgaggacatctacatccggctggcctggtatcagcagaagcccggcaacgcccccagactgctgattagcgccgccacctctctggaaaccggcgtgccaagcagattcagcggctctggcagcggcaaggactacaccctgagcatcacctccttgcagaccgaggacgtgggcacctactattgccagcagtattggagcagcccctggacctttggcggaggcacaaagctggaaatcaac

SEQ ID NO: 598 - DNA, 720 bp, Artificial Sequence
  Synthetic Polynucloetide
gacatccagatgacccagagcagcagcagcttcagcgtgagcctgggcgacagagtgaccatcacctgcatggccagcgaggacatctacatcagactggcctggtaccagcagaagcccggcaacgcccccagactgctgatcagcgccgccaccagcctggagaccggcgtgcccagcagattcagcggcagcggcagcggcaaggactacaccctgagcatcaccagcctgcagaccgaggacgtgggcacctactactgccagcagtactggagcagcccctggaccttcggcggcggcaccaagctggagatcaacggcggaggcggaagtggaggcggaggatctggcggcggaggctctgacgtgcagctgcaggagagcggccccggcctggtgaagcccagccagagcctgagcctgacctgcaccgtgaccggctacagcatcaccagcgactacacctggaactggatcagacagttccccggcaacaagctggagtggatgggctacatcacctacagcggcagcaccagctacaaccccagcctgaagagcagaaacagcatcaccagagacaccagcaagaaccagttcttcctgcagctgaacagcgtgaccaccgaggacaccgccacctactactgcgccagactgggcagaagatacacaatggactactggggccagggcaccagcgtgaccgtgagcagc

SEQ ID NO: 599 - DNA, 726 bp, Artificial Sequence
  Synthetic Polynucloetide
gaccagatcgtgctgacccagtcccccgctattatgtccgcatcaccgggcgaaaaagtgacgatctcctgtagcgcttcatctagcgtctcctacatgtattggtatcaacagaaacctgggtctagcccaaagccgtggatctacagaaccagtaaccttgccagtggggtgccagcccgcttcagcggtagtggcagtggaacttcctatagcctcacaataagcaacatggaggctgaagatgccgctgcctattactgccagcagtaccacagttacccaaccacgttcggcgggggaactaagctcgaagtaaaaggcggaggcggaagtggaggcggaggatctggcggcggaggctctgaggtgcagctggtggaatctgggggcggcctggtccaacctaagggatcactcaagctctcttgtgcggccagcggattctctttcaatacctatgctatgaattgggtgagacaggcgcccggaaagggcctcgaatggatagcccatatccggtcaaaatcaaacaatttcgcaacctactatgcggactccgtgaaggaccgattttccatctcccgagatgcctccgagaatattctgttcctgcagatgaataacctcaagacagaggacaccgccatgtactactgtgtgcgccagggcggtgactttcccatggattactgggggcaggggaccagcgtgaccgtgagctct

SEQ ID NO: 600 - DNA, 729 bp, Artificial Sequence
  Synthetic Polynucloetide
gacatccagatgacccagagccccagcagcctgtctgccagcgtgggcgacagagtgaccatcacctgtagagccagccagagcatcagcagctacctgaactggtatcagcagaagcccggcaaggcccccaaactgctgatctacgacgccagcaacctggaaaccggcgtgcccagcagattttccggcagcggctctggcaccgacttcaccttcaccatcagctccctccagcccgaggacattgccacctactactgccagcagtacgacaacctgcccctgacctttggcggaggcaccaaggtggacatcaagagaggcggaggcggaagtggaggcggaggatctggcggcggaggctctcaggtgcaactggtggaatctggcggcggagtggtgcagcctggcagaagcctgagactgagctgtgccgccagcggcttcacctttagcagctacgccatgcactgggtgcgccaggcccctggaaaaggcctggaatgggtggccgtgatctcctacgacggctccaacaagtattacgccgacagcgtgaagggccggttcaccatctccagagacaacagcaagaacaccctgtacctccagatgaacagcctgcgggccgaggacaccgccgtgtactattgtgccagggctcacaacagcagctcttggagcttcgactactggggccagggcaccctcgtgaccgtgtcatct

SEQ ID NO: 601 - DNA, 756 bp, Artificial Sequence
  Synthetic Polynucloetide
gacgtcgtgatgacccagagccctctgagcctgcctgtgtccctgggcgatcaggccagcatctcctgcagatccagccagagactggtgcacagcaacggcaacacctacctgcactggtatctgcagaagcccggccagagccccaagctgctgatctaccgggtgtccaacagattccccggcgtgcccgatagattcagcggctctggcagcggcaccgacttcaccctgaagatcagccgggtggaagccgaggacctgggcatctatttctgcagccagagcacccacgtgccctacacctttggcggaggcaccaagctggaaatcaagcggggcggaggcggaagtggaggcggaggatctggcggcggaggctctgaagtgcggctgcagcagtctggccccgacctgattaagcctggggccagcgtgaagatgagctgcaaggccagcggctacaccttcaccggctacgtgatgcactgggtcaagcagaggccaggccagggcctggaatggatcggcttcatcaacccctacaacgacgacatccagagcaacgagcggttccggggcaaggccaccctgaccagcgataagagcagcaccaccgcctacatggaactgagcagcctgacctccgaggacagcgccgtgtactactgtgctaggggagccggctacaacttcgacggggcctacagattcttcgacttttggggccagggcaccacactgaccgtgtcctct

SEQ ID NO: 602 - DNA, 729 bp, Artificial Sequence
  Synthetic Polynucloetide
agctacgagctgacccagcctcctagcgtgtccgtgtctcctggacagaccgccaccatctcttgcagcggcgatcaactgggcgggaagtacggccactggtatcagaagaagcccggccagagccccgtgctggtgctgtaccaggacagaaaacggcctgccggcatccccgagagattcagcggaagcagcagcggcaacaccatcaccctgaccatcagcggcacccaggccgtggatgaggccgactactactgccaggcttgggacaccaatctgggcggcgtgttcggcggaggcaccaaagtgacagtgctgggacagggcggaggcggaagtggaggcggaggatctggcggcggaggctctcaggtgcaactggtggaaagcggagccgaagtgaagaaacctggggccagcgtgaaggtgtcctgcaaggccagcggctacacctttaccggctactacatgcactgggtgcgccaggctccaggccagggactggaatggatgggccggatcaaccccaatagcggcggcaccaactacgcccagaaattccagggcagagtgaccatgaccagagacaccagcatcagcaccgcctacatggaactgagccggctgagaagcgacgacaccgccgtgtactactgcgccagccctagaggcagaggcagcgccttcgatatttggggccagggcacactcgtgaccgtgtcctct

SEQ ID NO: 603 - DNA, 738 bp, Artificial Sequence
  Synthetic Polynucloetide
aacttcatgctgacccagccccacagcgtgtccgagagccctggcaagaccgtgaccatctcctgcaccagaagcagcggctctatcgccagcaaatacgtgcagtggtatcagcagaggcccggcagcagccctaccaccgtgatctacgaggacaaccagaggcctagcggcgtgcccgatagattcagcggcagcatcgacaccagcagcaacagcgccagcctgaccatcagcggcctgagaacagaggacgaggccgactactactgccacagctacgacagcaacaaccactccgtgttcggcggaggcaccaaagtgacagtgctgggacagggcggaggcggaagtggaggcggaggatctggcggcggaggctctgaagtgcaactggtggaaagcgggggaggcgtggtgcagccaggcggatctctgagactgagctgtgccgccagcggcttcaccttcagcagctacgccatgagctgggtgcgccaggcccctggaaaaggcctggaatgggtgtccgccatctctggctctggcggcagcacctactacgccgatagcgtgaagggccggttcagcatcagccgggacaacagcaagaacaccctgtacctccagatgaacagcctgcgggccgaggacaccgccgtgtactactgtgccagaaccagaagctccggggccttcgacatctggggccagggaacactcgtgaccgtgtcctct

SEQ ID NO: 604 - DNA, 726 bp, Artificial Sequence
  Synthetic Polynucloetide
gacatccagatgaaccagagccccagcagcctgagcgccagcctgggcgataccatcaccatcacctgtcacgccagccagaacatcaacgtgtggctgagctggtatcagcagaagcccggcaacatccccaagctgctgatctacaaggccagcaacctgcacaccggcgtgcccagcagattttctggcagcggctctggcaccggcttcaccattaccatcagctccctccagcccgaggacattgccacctactactgccagcagggccagagctacccctggacatttggcggaggcaccaagctggaaatcaagagaggcggaggcggaagtggaggcggaggatctggcggcggaggctctgaagtgcaactccagcagagcggcccagagcttgtgaagcctggcgcttccgtgaagattagctgcaaagccagcggctacagcttcaccggctacttcatgaactgggtcaagcagagccacggcaagagcctggagtacatcggcagattcaacccctacaacggcgagacactgtacaaccagaagttcaagggcaaggccaccctgaccgtggacaagagcagcagcaccgtgcacatggaactgctgagcgtgaccagcgaggacagcgccgtgtactactgtggcagaagcggcaacgacgacgctatggactattggggccagggcaccagcgtgaccgtgtctagtgct

SEQ ID NO: 605 - DNA, 717 bp, Artificial Sequence
  Synthetic Polynucloetide
gacatcctgctgacacagagccccgccatcctgtccgtgtctccaggcgagagagtgtcctttagctgccgggccagccagaacatcggcaccagcatccactggtatcagcagcggaccaacggcagccccagactgctgattaagtacgccagcgagtccgtgtccggcatccccagcagattttctggcagcggctccggcaccgacttcaccctgagcatcaacagcgtggaaagcgaggacattgccgactactactgccagcacaccaatagctggcccaccacctttggcggaggcaccaagctggaaatcaagagaggcggaggcggaagtggaggcggaggatctggcggcggaggctctcaggtgcaactccagcagtccgacgccgagcttgtgaagcctggcgcttccgtgaagattagctgcaaggccagcggctacaccttcaccgaccacgccattcactgggtcaagcagaagcccgagcagggcctggaatggatcggctacttcagccccggcaacggcgacatcaagtacaacgagaagttcaagggcaaggccaccctgaccgccgacaagagcagcagcacagcctacatgcaactgaacagcctgaccagcgaggactccgccgtgtacttctgcaagcggagctacggcaactacgactactggggccagggcaccacactgaccgtgtctagt

SEQ ID NO: 606 - DNA, 732 bp, Artificial Sequence
  Synthetic Polynucloetide
gacatcgtgatgacccagagccccgatagcctggccgtgtctctgggagagagagccaccatcaactgcaagagcagccagagcctgctgaacagcggcgaccagaagaactacctgacctggtatcagcagaagcccggccagccccccaagctgctgatctactgggccagcaccagagaaagcggcgtgcccgatagattcagcggcagcggaagtggcaccgacttcaccctgaccatcagttctcttcaggccgaggacgtggccgtgtactactgccagaacgactacagctaccccctgaccttcggccagggcaccaaggtggaaatcaagggcggaggcggaagtggaggcggaggatctggcggcggaggctctcaggtgcagctggtgcagtctggggccgaagtgaagaaaaccggcagcagcgtgaaggtgtcctgcaaggccagcggctacacctttaccgaccacgccattcacgtgtggcggcaggctccaggacaggccctggaatggatgggccacttcagccccggcaacaccgacatcaagtacaacgacaagttcaagggcagagtgaccctgaccgtggaccgcagcatgagcaccgcctacatggaactgagcagcctgcggagcgaggacaccgccatgtactattgcaagaccagcaccttctttttcgactactggggccagggaacaatggtcaccgtgtccagc

SEQ ID NO: 607 - DNA, 729 bp, Artificial Sequence
  Synthetic Polynucloetide
gacatccagatgacccagagccccagcagcctgtctgccagcgtgggcgacagagtgaccatcacatgcaaggccagccaggacgtgtccattgccgtggcctggtatcagcagaagcccggcaaggcccccaaggtgctgatctacagcgccagctacagatacaccggcgtgcccgacagattcagcggctctggcagcggcaccgacttcaccttcaccatcagctccctccagcccgaggatattgccgtgtactactgccagcagcactacatcacccccctgacctttggcggaggcaccaaggtggaaatcaagggcggaggcggaagtggaggcggaggatctggcggcggaggctctcagatccaactggtgcagagcggccacgaagtgaagaaacctggggccagcgtgaaggtgtcctgcaaagccagcggctacacctttaccaactacggcatgaactgggtgcgccaggcccctggacagggcctggaatggatgggctggatcaacaccaagaccggcgagcccacctacgccgaagagttcaagggcagattcgtgttcagcctggaaaccagcgcctccaccgcctacctccagatcagctctctgaaggccgaggacaccgccatgtacttttgcggcagaggcggctacggcagcagctactggtacttcgatgtgtggggccagggcaccaccgtgaccgtgtcatct

SEQ ID NO: 608 - DNA, 738 bp, Artificial Sequence
  Synthetic Polynucloetide
caggctgtcgtgacacagcctcctagcgcctctggcacaccaggccagagagtgaccatctcctgtagcggcagcagcagcaacatcggcagcaacaccgtgaactggtatcagcaggtgcccggcaccgctcccaagctgctgatctacagcaacaaccagcggcccagcggcgtgcccgatagattttctggcagcaagagcggcaccagcgccagcctggctatctctggactccagtccgaggacgaggccgactactattgcgccgcctgggacgatagcctgaacggctgggtgttcggcggaggcaccaagctgacagtgctgggcggaggcggaagtggaggcggaggatctggcggcggaggctctcagatgcaactggtgcagagcggagccgaagtgaaagagcctggcgagagcctgcggatctcctgcaagggcagcggctacagcttcaccaatttctggatctcttgggtgcgccagatgcccggcaagggcctggaatggatgggcagagtggaccccggctactcctacagcacctacagccctagcttccagggccacgtgaccatcagcgccgacaagagcaccagcaccgcctacctccagtggaacagcctgaaggccagcgacaccgccatgtactactgcgccagagtgcagtacagcggctattacgattggttcgacccctggggccagggcacactcgtgacagtgtcaagc

SEQ ID NO: 609 - DNA, 720 bp, Artificial Sequence
  Synthetic Polynucloetide
gacatccagatgacccagagccccagcacactgagcgccagcgtgggcgacagagtgaccatcacctgtcgggccagccagaacatcaacaagtggctggcctggtatcagcagaggcccggaaaagccccccagctgctgatctacaaggccagcagcctggaaagcggcgtgcccagcagattttctggcagcggctctggcaccgagtacaccctgaccatcagctccctccagcccgacgacttcgccacctactactgccagcagtacaacagctacgccaccttcggccagggcaccaaggtggaaatcaagagaggcggaggcggaagtggaggcggaggatctggcggcggaggctctcaggtgcagctggtgcagtctggggccgaagtgaagaagcctggcgagagcctgaagatcagctgcaagggctccggctacaacttctctaacaagtggatcggctgggtgcgccagctgcctggcagaggactggaatggatcgccatcatctaccccggctacagcgacatcacctacagccccagcttccagggccgcgtgacaatcagcgccgacaccagcatcaacaccgcctacctgcactggcacagcctgaaggccagcgacaccgccatgtactactgcgtgcggcatacagccctggctggcttcgattattggggcctgggcaccctcgtgaccgtgtctagt

SEQ ID NO: 610 - DNA, 735 bp, Artificial Sequence
  Synthetic Polynucloetide
cagagcgtcgtgacacagcctcctagcgtgtcagtggcccctggcaagaccgccagaatcacctgtggccggaacaacatcggcagcaagagcgtgcactggtatcagcagaagcccggccaggctcctgtgctggtggtgtacgacgacagcgacagacccagcggcatccccgagagattcagcggcagcaactccggcaataccgccaccctgaccatcagcagagtggaagccggcgacgaggccgactactactgccaagtgtgggacagcagcagcgatcacgtggtgtttggcggaggcaccaagctgacagtgctgggtggcggaggcggaagtggaggcggaggatctggcggcggaggctctgaagtgcaactggtgcagtctggcggaggggtcgtgcggcctggcggatctctgagactgtcttgtgccgccagcggcttcaccttcgacgactacggcatgagctgggtgcgccaggcccctggaaaaggcctggaatgggtgtccggcatcaactggaatggcggcagcaccggctacgccgattctgtgcggggcagattcaccatcagccgggacaacgccaagaacagcctgtacctgcagatgaactccctgcgggccgaggacaccgccctgtactattgcgccagagagcggggctacggctaccacgaccctcacgattattggggccagggcacccttgtcaccgtgtcctct

SEQ ID NO: 611 - DNA, 732 bp, Artificial Sequence
  Synthetic Polynucloetide
gacatcgtgctgacacagagccctgcttctctggccgtgtctctgggacagagagccaccatcagctgtagagccagcgagagcgtggacaactacggcaacaccttcatgcactggtatcagcagaagcccggccagcctcctaagctgctgatctacagagccagcaacctggaaagcggcatccccgccagattttctggcagcggcagcagaaccgacttcaccctgaccatcaatcccgtggaagccgacgacgtggcaacctactactgccagcagagcaacgaggaccctcctacatttggagccggcaccaagctggaactgaaaggcggaggcggaagtggaggcggaggatctggcggcggaggctctcagattcagctggtgcagtctggccccgagctgaagaaacctggcgagacagtgaagatcagctgcaaggccagcggctacatcttcaccaattacggcatgaactgggtcaagcaggcccctggcaagagcttcaagtggatgggctggatcaacacctacaccggcgagagcacatacagcgccgacttcaagggcagattcgccttcagcctggaaaccagcgccagcacagcctacctgcacatcaacgacctgaagaacgaggacaccgccacctacttttgcgccagaagcggcggctacgaccctatggattattggggccagggcaccagcgtgaccgtttcttct

SEQ ID NO: 612 - DNA, 726 bp, Artificial Sequence
  Synthetic Polynucloetide
gagatcgtgctgacacagagccctggcaccctgagcctgtctccaggcgaaagagccacactgagctgtcgggccagccagagcgtgtccaatacctacctggcctggtatcaccagaggcccggacaggctccccggctgctgatctatggcgcttctagcagagccaccggcatccccgatagattcagcggctctggcagcggcaccgacttcgccctgacaatcagctccctggaacccgaggacttcgccgtgtactactgccagcagtacagcaactcctggaccttcggccagggcaccaaggtggaaatcaagagaggcggaggcggaagtggaggcggaggatctggcggcggaggctctcaggtgcaactggtggaatctggcgggggagtggtgcagcctggcagaagcctgagactgtcttgtgccgccagcggcttcaccttcagcagctacgacatgcactgggtgcgccaggcccctggcaaaggactggaatgggtggccgtgatctcctacgacggcaccaacgagtattacgccgacagcgtgaagggccggttcaccatctccagagacaccagcaagaacaccctgtacctccagatgaacagcctgcgggccgaggacacagccgtgtattattgcgccagagagcggtacttcgactggtccttcgactactggggccagggaaccctggtgtccgtgtctagt

SEQ ID NO: 613 - DNA, 723 bp, Artificial Sequence
  Synthetic Polynucloetide
gagctgacacaggaccctgctgtgtctgttgccctgggccagacagtgcggattacctgtcaaggcgacagcctgagaagcaactacgccaactggtatcagcagaagcccggacaggctcccgtgctggttatctacggccagaacaacagacccagcggcatccccgatagattcagcggctctagctctggcaataccgccagcctgacaatcactggcgctcaggctgccgatgaggccgactactactgcgatagcagagtgtccaccggcaatcacgtggtgtttggcggcggaacaaagctgacagtgctcggacaaggcggaggcggaagtggaggcggaggatctggcggcggaggctctgaagttcagctggtgcagagcggagccgaagtgaagaaacctggggcctctgtgaaggtgtcctgcaaggcttccggctacacctttaccagctacgccatgcactgggtccgacaggcacctggacaacggcttgaatggatgggctggatcaacgccggcaacggcaacaccaagtacagccagaaattccagggccgcgtgaccatcaccagagatacaagcgccagcaccgcctacatggaactgtctagcctgagatccgaggacaccgccgtgtactactgtgccagagacatcagctacggcagcttcgactattggggccagggcacactggtcaccgttagctct

SEQ ID NO: 614 - DNA, 711 bp, Artificial Sequence
  Synthetic Polynucloetide
gacatccagatgacacagagccctagcagcctgtctgccagcgtgggagacagagtgaccatcacctgtagcgccaccagcagcatcagctacatgcactggtatcagcagaagcccggcaaggcccctaaaggctggatctacgataccagcaaactggcccacggcgtgcccagcagattttctggttctggcagcggcaccgacttcaccctgacaatatctagcctccagcctgaggacttcgccacctactactgccaccagagaagaagctaccccttcaccttcggccagggcaccaaggtggaaatcaaaggcggaggcggaagtggaggcggaggatctggcggcggaggctctgaagtgcaactggttcagagcggagccgaagtgaagaaacctggggcctctgtgaaggtgtcctgcaaggcttccggctacacctttaccaatttctggattcactgggtccgacaggctccaggccaaggactggaatggatcggagagatcgaccccagcgacagctacaccaactacaaccagaaattcaaaggccgggtcaccatcaccagagacaccagcacaagcaccgcctacctggaactgagcagcctgagaagcgaggacaccgccgtgtactactgcgccagggaaatcaccaccgtggattattggggccagggaaccctggtcaccgtgtcatct

SEQ ID NO: 615 - DNA, 732 bp, Artificial Sequence
  Synthetic Polynucloetide
gacatccagatgacacagagccctagcagcctgtctgccagcgtgggagacagagtgaccatcacatgcaaggccagccagggcttcaacaaatacgtggcctggtatcagcagaagcccggcaaggctcctaagctgctgatctactacaccagcacactccagcctggcgtgcccagcagattttctggctctggcagcggcagagactacaccctgacaatatccagcctccagccagaggacttcgccacctactactgtctccagtacggcaacctgctgtacgcctttggacagggcaccaaggtggaaatcaagagaggcggaggcggaagtggaggcggaggatctggcggcggaggctctgaagttcagcttgtgcagagcggagccgaagtgaagaaacctggggcctctgtgaaggtgtcctgcaaagccagcggctacacctttaccagctactggatcggctgggtccgacaggctcctggacaaggactggaatggatcggcgacatctatcccggcggaggctacaccaactacaacgagaagttcaagggccgcgtgacaatcaccagagacacctctacaagcaccgcctacctggaactgagcagcctgagaagcgaggacaccgccgtgtactactgcgccagactggatggcagcagctacagaggcgctatggattcttggggccagggcacactggtcaccgtttcttct

SEQ ID NO: 616 - DNA, 720 bp, Artificial Sequence
  Synthetic Polynucloetide
gacatccagatgacacagagccctagcagcctgtctgccagcgtgggagacagagtgaccatcacctgtagagccagccaggacatccggtactacctgaactggtatcagcagaagcccggcaaggcccctaagctgctgatctatgtggcctccagcctccagagcggagtgccttctagattttctggcagcggctccggcaccgagtttaccctgacagtgtctagcttgcagcccgaggacttcgccacctactactgcctgcaagtgtacagcacccctcggacctttggacagggcaccaaggtggaaatcaaaggcggaggcggaagtggaggcggaggatctggcggcggaggctctgaagtgcagcttgttgaatctggcggcggactggctaagcctggcggatctctgagactgtcttgtgccgccagcggcttccggttcaccttcaacaactactacatggactgggtccgacaggcccctggacaaggacttgaatgggtgtccagaatcagcagcagcggcgaccctacttggtacgccgattctgtgaagggcagattcaccatcagcagagagaacgccaagaacaccctgttcctccagatgaactccctgagagccgaggacaccgccgtgtactattgtgcctctctgaccaccggcagcgattcttggggacagggcgtgctggttaccgtgtcatct

SEQ ID NO: 617 - DNA, 723 bp, Artificial Sequence
  Synthetic Polynucloetide
gagatcgtgatgacacagagccccgccacactgagtgtgtctccaggcgaaagagccacactgtcctgtagagccagccagagcgtgtccagaaacctggcctggtatcagcagaagcctggacaggctccccggctgttgatctacggcgcttctacaagagccaccggcattcccgccagattttctggctctggcagcggcaccgagttcaccctgacaatcggaagcctccagagcgaggacttcgccgtgtactactgccagcagtacaagacctggcctcggacctttggacagggcaccaacgtggaaatcaaaggcggaggcggaagtggaggcggaggatctggcggcggaggctctcaagttcagctgcaacaatggggagccggcctgctgaagcctagcgaaacactgtctctgacctgcgccgtgttcggcggctctttcagcggctactactggtcctggatcagacagcctcctggcaaaggactggaatggatcggcgagatcaaccaccggggcaacaccaacgacaaccccagcctgaaaagcagagtgaccatcagcgtggacaccagcaagaaccagttcgccctgaagctgagcagcgtgacagccgctgataccgccgtgtattattgcgccagagagcggggctacacctacggcaatttcgatcactggggccagggcaccctggtcacagtttcttct

SEQ ID NO: 618 - DNA, 741 bp, Artificial Sequence
  Synthetic Polynucloetide
gacatccagatgacccagagccccagcagcctgtctgccagcgtgggcgacagagtgaccatcacatgcaaggccagcaagaacatcagaagctacctggcctggtatcagcagaagcccggcaaggcccccaagctgctgatctacagcggcagcacactgcacagcggcgtgcccagcagattttccggctctggcagcggcaccgacttcaccctgaccatctctagcctccagcccgaggacttcgccacctactactgccagcagcaccacgagtaccccctgacattcggccagggcaccaaggtggaaatcaagagaggcggaggcggaagtggaggcggaggatctggcggcggaggctctcaggtgcaactccaggaatctggccccggactcgtgaagcccagcgagacactgagcctgacctgtaccgtgtccggctacaccatcaccagcggctacgactggtcctggatcagacagcctcctggcaagggcctggaatggatcggctacatcaactacggcggctccaccaactacaagcccagcctgggaagccgcgtgacaatcagcgtggacacctccaagaaccagttcagcctgaagctgagcagcgtgacagccgccgataccgccgtgtactactgcgcccggtacaacgagtacaagagctacatctacgattggtacttcgacttctggggccagggaaccctcgtgaccgtgtctagt

SEQ ID NO: 619 - DNA, 747 bp, Artificial Sequence
  Synthetic Polynucloetide
cagtctgtggtcacacagcctccatccgtgtctgctgcccctggacagaaagtgaccatctcctgtagcggcagcagcagcaacatcggcaacaactacgtgtcctggtatcagcagctccccggcacagctcccaaactgctgatctacgacaacaacaagcggcccagcggcatccccgatagattttctggcagcaagagcggcaccagcgccacactgggaattaccggacttcagacaggcgacgaggccgactactactgtggcacatgggatggcagcctgtacaccatgcttttcggcggaggcaccaagctgacagtgcttggcggaggcggaagtggaggcggaggatctggcggcggaggctctgaagtgcaactggtggaatctggcggcggactggttaagcctggcggatctctgagactgtcttgtgccgccagcggcttcaccttcagcaatgcctggatgagctgggttcgacaggcccctggaaaaggactggaatgggtcggattcatccggtccaaagcctacggcggcaccacagaatatgccgcctctgtgaagggcagattcaccatcagccgggacgacagcaagtctatcgcctacctccagatgaacaacctgaaaaccgaggacaccgccgtgtactactgcgccagagatggcctgtacagcagctcttggtacgacagcgattactggggccagggcacactggtcacagtgtcatct

SEQ ID NO: 620 - DNA, 762 bp, Artificial Sequence
  Synthetic Polynucloetide
cagtctgtgctgacacagcctcctagtgtgtctggcgctcctggacagagagtgaccatctcttgtaccggcagcagcagcaatatcggagccggctatgacgtgcactggtatcagcagctccctggcacagcccctaaactgctgatcttcggcaacagcaacagacccagcggcgtgcccgatagattcagcggctttaagagcggcacaagcgccagcctggctatcactggactgcaagccgaggacgaggccgactacttctgccagagctacgatagcagcctgagcggcagcggagtgtttggcacaggcaccaaagtgacagtgcttggcggcggaggcggaagtggaggcggaggatctggcggcggaggctctcaaatgcaactggttcaaagcggcggtggcctggtgcaacctggaagaagtctgagactgagctgtgccgccagcggcttcaccttcgatgattacgccatgcactgggtccgacaggcccctggaaaaggactggaatgggtgtccggcatctcctggaatagcggctctatcggctacgccgacagcgtgaagggcagattcaccatcagccgggacaacgccaagaacagcctgtacctccagatgaactccctgagagccgaggatacagccctgtactactgcgccaaggacatccacagcggcagctactacggcctgctgtactacgctatggacgtgtggggccagggcacaaccgtgacagtttcttct

SEQ ID NO: 621 - DNA, 762 bp, Artificial Sequence
  Synthetic Polynucloetide
ctgcctgttctgacacagcctccatctgcctctggcacacctggacagagagtgaccatcagctgtagcggcagaagcagcaacatcggcagcaacagcgtgaactggtacagacagcttcctggcgctgcccctaagctgctgatctacagcaacaaccagcggcctcctggcgtgccagtcagattttctggcagcaagagcggcacaagcgccagcctggctatttctggactccagtctgaggacgaggccacctactactgtgccacctgggacgacaacctgaacgtgcactacgtgttcggcaccggcaccaaagtgacagtgcttggaagtagaggcggaggcggaagtggaggcggaggatctggcggcggaggctctcttgaaatggctcaggtgcagctggtgcagagcggagccgaagtgaagaaacctggcagcagcgtgaaggtgtcctgcaaagcttctggcggcaccttcagcagctacgccatctcttgggttcgacaggcccctggacaaggactggaatggatgggcagaatcatccccatcctgggaatcgccaactacgcccagaaattccagggcagagtgacaatcaccgccgacaagagcaccagcaccgcctacatggaactgagcagcctgagaagcgaggacaccgccgtgtactattgtgcaagaggcggctactacagccacgacatgtggagcgaagattggggccagggcacactggtcacagtgtcatct

SEQ ID NO: 622 - DNA, 729 bp, Artificial Sequence
  Synthetic Polynucloetide
gacatcgtgctgacacagagccctgcttctctggccgtgtctctgggagagagagccaccatcaactgtagagccagcgagagcgtgtccgtgattggagcccacctgatccactggtatcagcagaagcctggacagcctcctaagctgctgatctacctggcctccaacctggaaacaggcgtgccagccagattttctggcagcggctctggcaccgatttcaccctgacaatcagcagcctccaggccgaagatgccgccatctactactgcctccagagccggatcttccccagaacctttggacagggcaccaagctggaaatcaaaggcggaggcggaagtggaggcggaggatctggcggcggaggctctcaagttcagctggtgcagtctggctccgagctgaagaaacctggcgagtccgtgaagatcagctgcaaggccagcggctacaccttcaccgactacagcatcaactgggtcaagcaggcccctggacagggactgaaatggatgggctggatcaacaccgagacaagagagcccgcctacgcctacgacttcagaggcagattcgtgttctccctggacaccagcgccagcacagcctatctccagatcagctctctgaaggccgaggataccgccgtgtacttctgcgccctggactacagctacgctatggactattggggccagggcaccctggtcacagtctcttct

SEQ ID NO: 623 - DNA, 732 bp, Artificial Sequence
  Synthetic Polynucloetide
gacatcgtgctgacacagtctcccgccacactgtcactgagccctggcgatagagccacactgagctgtagagccagcgagagcgtgacaatcctgggcagccacctgatctactggtatcagcagaagcccggacaggcccctagactgctgattcagctcgccagcaatgtgcagacaggcatccctgccagattttccggcagcggcagcagaaccgatttcaccctgaccataagcagcctggaacctgaggacttcgccgtgtactactgcctccagagccggacaatccccagaacctttggacagggcaccaagctggaaatcaagagaggcggaggcggaagtggaggcggaggatctggcggcggaggctctcaagttcaactggtgcagagcggctccgagctgaagaaacctggcgagtccgtgaagattagctgcaaggccagcggctacaccttcacacactacagcatgaactgggtccgacaggctccaggccaaggactggaatggatgggcagaatcaacaccgagacaggcgagcccctgtacgccgacgatttcaagggcagattcgtgttcagcctggacaccagcgccagcacagcctatctccagatcagctctctgaaggccgaggacaccgccgtgtattattgcagcaacgactacctgtactccctggactattggggccagggcacactggtcacagtgtctagt

SEQ ID NO: 624 - DNA, 744 bp, Artificial Sequence
  Synthetic Polynucloetide
gacttcgtgatgacacagagccctgatagcctggccgtgtctctcggcgagcgagtgaccatgagctgcaagtctagccagagcctgctgaacagcggcaaccagaagaactacctgacctggtatcagcagaagcccggccagcctcctaagctgctgatctactgggccagcaccagagaaagcggcgtgcccgatagattttctggctctggcagcggcaccgacttcaccctgacaatttctagcctgcaagccgaggacgtggccgtgtactactgccagaacgactacagctacccctacaccttcggccagggcaccaagctggaaatcaaaggcggaggcggaagtggaggcggaggatctggcggcggaggctctgaagtgcaactggttcagagcggagccgagctgaagaaacctggggccagcgtgaaggtgtcctgtaaagccagcggctacacctttaccgactactacatgaaatgggtccgacaggccccaggccagggactcgaatggatcggcgatattatccccagcaacggggccaccttctacaaccagaaattcaagggccgcgtgaccatcaccgtggacaagagcacaagcaccgcctacatggaactgagcagcctgagaagcgaggacaccgccgtgtattattgcgccagaagccatctgctgcgggccagttggttcgcctattggggacagggaaccctggtcaccgttagctct

SEQ ID NO: 625 - DNA, 744 bp, Artificial Sequence
  Synthetic Polynucloetide
gacttcgtgatgacacagagccctgatagcctggccgtgtctctcggcgagcgagtgaccatgagctgcaagtctagccagagcctgctgaacagcggcaaccagaagaactacctgacctggtatcagcagaagcccggccagcctcctaagctgctgatctactgggccagcaccagagaaagcggcgtgcccgatagattttctggctctggcagcggcaccgacttcaccctgacaatttctagcctgcaagccgaggacgtggccgtgtactactgccagaacgactacagctacccctacaccttcggccagggcaccaagctggaaatcaaaggcggaggcggaagtggaggcggaggatctggcggcggaggctctcaagtgcaactggttcagagcggagccgagctgaagaaacctggggccagcgtgaaggtgtcctgtaaagccagcggctacacctttaccgactactacatgaaatgggtccgacaggccccaggccagggactcgaatggatcggcgatattatccccagcaacggggccaccttctacaaccagaaattcaagggccgcgtgaccatcaccgtggacaagagcacaagcaccgcctacatggaactgagcagcctgagaagcgaggacaccgccgtgtattattgcgccagaagccatctgctgcgggccagttggttcgcctattggggacagggaaccctggtcaccgttagctct

SEQ ID NO: 626 - DNA, 714 bp, Artificial Sequence
  Synthetic Polynucloetide
gacgtgcagatcacacagagccctagctacctggctgcctctcctggcgagacaatcaccatcaactgtcgggccagcaagagcatcagcaaggacctggcctggtatcaagagaagcccggcaagaccaacaagctgctgatctacagcggcagcacactccagtctggcatccccagcagattttccggctctggcagcggcaccgatttcaccctgaccataagcagcctggaacctgaggacttcgccatgtactactgccagcagcacaacaagtacccctacacctttggcggaggcaccaagctggaaatcaagagaggcggaggcggaagtggaggcggaggatctggcggcggaggctctcaagttcaactgcaacagcctggggccgagcttgttagacctggcgcttctgtgaagctgagctgcaaggccagcggctacaccttcaccagctactggatgaactgggtcaagcagcggcctgaccagggcctcgaatggatcggcagaatcgacccctacgacagcgagacacactacaaccagaagttcaaggacaaggccatcctgaccgtggacaagagcagctccaccgcctacatgcaactgagcagcctgacctctgaggatagcgccgtgtactattgcgccagaggcaactgggacgactattggggccagggcacaaccctgacagtgtctagt

SEQ ID NO: 627 - DNA, 720 bp, Artificial Sequence
  Synthetic Polynucloetide
gagatcgtgctgacacagagccctaccagcatgacagcctctccaggcgagcaagtgaccatcacctgtagagccagcagcagcatcaactacatgcactggtatcagcagaagcctggcgcaagccccagaccttggatctacgagacaagcaagctggcctccggcgtgcccgatagattttctggatctgccagcggcaccagctacagcctgaccatcaacaacatggaagccgaggacgccgccacctactactgccagcagtggaattacccctcctggacctttggcggaggcaccaagctggaacttaaaggcggaggcggaagtggaggcggaggatctggcggcggaggctctgaagtgcagctcgttgagtctggtggcggactggttcagcctggaagaagcctgaagctgagctgtgccgccagcggcttcaccttcagcgactacaatatggcctgggtccgacaggcccctaagaaaggactggaatgggtcgccaccatcctgtacgatggcggcagaacctactaccggggcagcgtgaagggcagattcaccatcagcagagacaacgccaagagcaccctgtacctgcggatggactctctgagaagcgaggataccgccacatattactgtgccacacacagccggggcaccgactactttgattattggggccagggcgtgatggttaccgtgtctagt

SEQ ID NO: 628 - DNA, 747 bp, Artificial Sequence
  Synthetic Polynucloetide
gacatcgtgatgacacagagcccttctagcctggccgtgtctgagggcgagacagtgaccatcaactgcaagagcagccagagcttcctgtctagcggcgacggcaagaattacgtggcctggtatcagtacaagcccggacagagccccaagctgctgatctactgggccagcacaagacagagcggcgtgcccgatagattcatcggctctggcagcggcaccgacttcaccctgacaatctctacagtgcaggccgaggacctggctatctactactgccagcagtattacgacacccctctgacctttggctccggcaccaagctggaaatcaaaggcggaggcggaagtggaggcggaggatctggcggcggaggctctgaagtgaagctgcaagagtctggccccagcctggtgcagagtagccaaacactgagcctgacctgtaccgtgtccggctttagcctgaccagctaccacatccactgggtccgacagacccctggcaaaggactggaatggatgggcgtgatgtggagcgacggcgacaccagctataacagcgccctgaagtcccggctgagcatcagcagagatacaagccagagccaggtgttcctgaagatgaacagcctccagaccgaggacaccgccacctactattgtgccagaggctactacagcagctacctgtacctttggttcgcctattggggccagggcaccctggttacagtcagctct

SEQ ID NO: 629 - DNA, 759 bp, Artificial Sequence
  Synthetic Polynucloetide
gacgtgctgatgacccagacacctgtgtctctgccagtgtctctcggaggccaggtgtccatctcctgtagaagcagccagagcctggtgcactccgacggcgatacctacctgcactggtatctccagaagcctggacagagccctcagctcctgatctaccgggtgtccaacagattcagcggcgtgcccgatagattttccggcagcggctctggcaccgacttcaccctgaagatcagcagagtggaacccgaggacctgggcctgtactactgtctccagaccacacacttcccaccttggacctttggcggaggcaccaagctggaaatgaaaggcggaggcggaagtggaggcggaggatctggcggcggaggctctcaggttcagctccagcagtctggacccgagcttagaaggccaggatctagcgtcagactgagctgcaaggccagcggctaccggatcaaggacttcctgatccactggattaagaacagacccgagcacggcctggaatggatcggatggattgaccctgaggacggcgagactaagtacgcccagaagttccagaccaaggccacactgaccgccgacacctctagcaacaccgcctacatgcaactgagcagcctgaccagcgaggacaccgccacctacttttgtgctagatggggcgacgtgtactacggcctgatgagaggccatgtgatggatgcctggggccagggaacaagcgtgacagtctcttct

SEQ ID NO: 630 - DNA, 747 bp, Artificial Sequence
  Synthetic Polynucloetide
gacatcgtgatgacccaggccgctcccagcatccctgtgacacctggcgagagcgtgtccatctcctgccggtctagcaagagcctgctgaacagcaacggcaatacctacctgtactggttcctccagcggccaggccagtctccccaactgctgatctaccggatgagcaacctggcctccggcgtgcccgatagattttctggcagcggctccggcaccgccttcaccctgagaatcagcagagtggaagccgaggacgtgggcgtgtactactgtatgcagcacctggaataccccttcaccttcggagccggcaccaagctggaactgaagagaggcggaggcggaagtggaggcggaggatctggcggcggaggctctgaagtgcaactccagcagagcggccctgagctgattaagcctggggccagcgtgaagatgagctgcaaggccagcggctacaccttcaccagctacgtgatgcactgggtcaagcagaagcccggccagggcctggaatggatcggctacatcaacccctacaacgatggcaccaagtacaacgagaagttcaagggcaaggccaccctgaccagcgacaagagcagcagcaccgcctacatggaactgagcagcctgacaagcgaggacagcgccgtgtactattgcgccagaggcacctactactacggcagccgggtgttcgactattggggccagggcaccacactgaccgtgtcctct

SEQ ID NO: 631 - DNA, 747 bp, Artificial Sequence; identical to SEQ ID NO: 630
  Synthetic Polynucloetide

SEQ ID NO: 632 - DNA, 801 bp, Artificial Sequence
  Synthetic Polynucloetide
atcaacatctacaacgccgagcctgccaatcctagcgagaagaacagccccgaattcgacatcgtgatgacacagagccccgccacactgtcactgtctccaggcgaaagagccacactgagctgtcggagcagcaagagcctccagaacgtgaacggcaacacctacctgtactggttccagcagaagcccggccagtctcctcagctcctgatctacagaatgagcaacctgaacagcggcgtgcccgacagattttctggcagcggaagcggcaccgagttcaccctgaccataagcagcctggaacctgaggacttcgccgtgtactactgtatgcagcacctggaataccccatcaccttcggagccggcaccaagctggaaatcaaaggcggaggcggaagtggaggcggaggatctggcggcggaggctctgaagtgcaactggttgaatctggcggcggactggttaagcctggcggatctctgaagctgagctgtgccgccagcggctacacctttaccagctacgtgatgcactgggtccgacaggcccctggcaaaggacttgagtggatcggctacatcaacccctacaacgatggcaccaagtacaacgagaagttccagggcagagtgaccatcagctccgacaagagcatcagcaccgcctacatggaactgagcagcctgagaagcgaggataccgccatgtactattgcgccagaggcacctactactacggcaccagagtgttcgactactggggccagggaaccctggtcacagtctcttct

SEQ ID NO: 633 - DNA, 732 bp, Artificial Sequence
  Synthetic Polynucloetide
gacatccagatgacacagagccctagcagcctgtctgccagcgtgggagacagagtgaccatcacatgcaaggccagcgaccacatcaacaactggctggcctggtatcagcagaagcctggacaggcccctaagctgctgatctacggcgctaccacactggaaacaggcgtgcccagcagattttctggcagcggctctggcaccgactacaccctgacaatatccagcctccagcctgaggacttcgccacctactactgtcagcagagctggaacaccccttggacattcggccagggcaccaagctggaaatcaagagaggcggaggcggaagtggaggcggaggatctggcggcggaggctctcaagttcagcttcaacagcctggcgctgagctggtcaaacctggcgcttctgtgaagatgagctgcaaagccagcggctacgccttcagcagctactggatcaactggatgaagcagaaacccggccagggactcgaatggatcggccaaatctatcccggcgacggcgacaccaactacaacggcaagttcaagggcagagccacactgaccgccgatacctctagcagcacagcctacatgcagctgagcagcctgaccagcgaagatagcgccgtgtacttctgtgcccggtccatcacaacagtcgtgggctgcgctatggactattggggccagggaacaagcgtgaccgtgtctagt

SEQ ID NO: 634 - DNA, 738 bp, Artificial Sequence
  Synthetic Polynucloetide
cagatcgtgctgtctcagtctcctgccatcctgagcgcttccccaggcgagaaagtgaccatgacctgtagagccagcagcagcgtgtcctacatgcactggtatcagcagaagcccggcagcagccctaagccttggatctacgccaccagcaatctggcctctggcgtgccagccagattttctggctctggcagcggcaccagctacagcttcacaatcagcagagtggaagccgaggacgccgccacctactattgtcagcagtggaccttcaatcctcctaccttcggcggaggcacccggctggaaatcaaaagaacagtggctgctggcggaggcggaagtggaggcggaggatctggcggcggaggctctcaggcttatctgcaacagagcggagccgaactcgtcagacctggcgcttctgtgaagatgagctgcaaggccagcggctacaccttcaccagctataatatgcactgggtcaagcagacccctcggcagggactcgaatggatcggcggaatctatcccggcaacggcgacacctcctacaaccagaagttcaagggcaaagccacactgaccgtgggcaagagcagcagcaccgcctatatgcagctcagcagcctgaccagcgaggacagcgccgtgtacttctgcgccagatacgactacaactacgctatggactactggggccagggcaccagcgtgacagttagctctgccagc

SEQ ID NO: 635 - DNA, 735 bp, Artificial Sequence
  Synthetic Polynucloetide
gacgagatcgtgctgacacagagccctgccaccctgtctctgagccctggcgaaagagccaccctgagctgtagagccagccagagcgtgtccagctacctggcctggtatcagcagaagcccggccaggctccccggctgctgatctacgatgccagcaatagagccaccggcatccccgccagattttccggctctggcagcggcaccgacttcaccctgaccatcagctccctggaacccgaggacttcgccgtgtactactgccagcagcggagcaactggcccatcacattcggccagggcacccggctggaaatcaaaggcggaggcggaagtggaggcggaggatctggcggcggaggctctgaggtgcagcttgttgagtctggcggaggactggtgcagcccgatagaagcctgagactgtcttgtgccgccagcggcttcaccttccacgattatgccatgcactgggtccgacaggcccctggcaaaggacttgaatgggtgtccaccatctcttggaacagcggcacaatcggctacgccgactctgtgaagggcagattcaccatcagccgggacaacgccaagaacagcctgtacctccagatgaactccctgagagccgaggacacagccctgtactactgcgccaaggacatccagtacggcaactactactacggcatggacgtgtggggccagggcacaacagtgacagtctcttct

SEQ ID NO: 636 - DNA, 717 bp, Artificial Sequence
  Synthetic Polynucloetide
gacatccagatgacacagagccctagcagcctgtctgccagcgtgggagatagagtgaccatcaactgcaaggccagccaggacatcaacagctacctgagctggttccagcagaagcctggcaaggcccctaagacactgatctaccgggccaacagactggtggatggcgtgccaagcagattttctggcagcggcagcggccaggattacaccctgacaatatccagcctccagcctgaggacttcgccacctactactgcctccagtacgacgagttccctctgacctttggcggaggcaccaaggtggaaatcaaaggcggaggcggaagtggaggcggaggatctggcggcggaggctctcaggtgcaactggtgcagtctggggccgaagtgaagaaacctggggcctctgtgaaggtgtcctgcaaagccagcggctacacctttaccaactacgacatcaactgggtccgacaggctccaggccaaggactggaatggatcggctggatctatcctggcgacggcagcaccaagtacaacgagaagttcaaggccaaggccacactgaccgccgataccagcacaagcaccgcctacatggaactgcggagcctgagaagcgacgacaccgccgtgtactattgtgcctccggctacgaggacgctatggactattggggccagggcaccaccgtgacagtgtctagt

SEQ ID NO: 637 - DNA, 723 bp, Artificial Sequence
  Synthetic Polynucloetide
gacatcgtgatgacccagacacctctgagcctgagcgtgacacctggacagcctgccagcattagctgcaagagcagccagtctctgctggacggcgacggcaagacctacctgaattggctgctccagaagcctggacagagccctcagcggctgatctacctggtgtccaagctggatagcggcgtgcccgatagattttctggcagcggctctggcaccgacttcaccctgaagatcagcagagtggaagccgaggacgtgggcgtgtactactgttggcagggcacacacttccccagaacattcggccagggcacaaagctggaaatcaaaggcggaggcggaagtggaggcggaggatctggcggcggaggctctcaagtgcaactggttcagagcggagccgaagtgaagaaacctggggcctctgtgaaggtgtcctgcaaggccagcggctacaccttcaaggacacctacatccactgggtccgacaggcccctggacaaggacttgagtggatgggcagaatcgaccccgccaacggcaacaccaaatacgaccccaagttccagggcagagtgaccatgaccagagacaccagcatcagcaccgcctacatggaactgagccggctgagatccgatgacaccgccgtgtactattgcgctagaagaggcggagtggattggggccagggaacactggttaccgtgtctagt

SEQ ID NO: 638 - DNA, 726 bp, Artificial Sequence
  Synthetic Polynucloetide
gacatccagatgacacagagccctagcagcctgtctgccagcgtgggagacagagtgaccatcacatgcaaggccagccaggatgtgtctacagccgtggcctggttccagcagaagcctggaaaagcccctaagctgctgatctacagccccagctacagatacaccggcgtgcccagcagattttctggcagcggctctggcaccgacttcaccctgacaatatccagcctccagcctgaggacttcacctactactgccagcagctctacagcaccccttacacattcggccagggcaccaaggtggaaatcaaaggcggaggcggaagtggaggcggaggatctggcggcggaggctctgaagtgcaactggttcagagcggagccgaagtgaagaaacctggggcctctgtgaaggtgtcctgcaaagccagcggctacacctttaccgactactacctggacgtggtcgtgcggcaagctcctggacaaggactggaatggatcggcagagtgaacccctacaacggcggcaccatctacaaccagaaattcaagggaagagtgaccctgaccagagacaccagcacctccacagcctacctggaactgagcagcctgagaagcgaagataccgccgtgtactactgcgccagggaccactacagatatgaccctctgctggactactggggccagggaaccctggttacagtgtctagt

SEQ ID NO: 639 - DNA, 744 bp, Artificial Sequence
  Synthetic Polynucloetide
gacatccagatgacacagagccctagcagcctgtctgccagcgtgggagacagagtgaccatcacctgtagagccagccagagcgtgtccaccagcagctacaactacatgcactggtatcagcagaagcccggcaagcctcctaagctgctgattaagtacgccagcaacctggaaagcggcgtgcccagcagattttctggcagcggctctggcaccgacttcaccctgacaatatccagcctccagcctgaggacttcgccacctactactgtcagcactcctgggagatccctctgacattcggccagggcaccaaggtggaaatcaaaggcggaggcggaagtggaggcggaggatctggcggcggaggctctgaagtgcaactggttcagagcggagccgaagtgaagaaacctggggcctctgtgaaggtgtcctgcaaggccagcggctacagcttcaccgactattatatgcactgggtccgacaggctccaggccagggacttgagtggatcggcagaatcaacccctacaacggcgctgccttctacagccagaacttcaaggatagagtgaccctgaccgtggacaccagcaccagcacagcctacctggaactgagcagcctgagaagcgaggacaccgccgtgtactactgcgccattgagagaggcgctgacctggaaggctacgctatggattattggggccagggaaccctggtcaccgtgtcatct

SEQ ID NO: 640 - DNA, 738 bp, Artificial Sequence
  Synthetic Polynucloetide
gagatcgtgctgacacagtctccagccacactgagcgcttctccaggcgagagagtgaccctgacctgtagagccagcagcaacgtgatctccagctacgtgcactggtatcagcagaagcctggcagcagccccagactgtttctgtacagcaccagcaatctggcctccggcgtgccaagcagattttctggctctggcagcggcaccgacttcacctttaccatctctagcctggaagccgaggacgccgccacctactactgtcagcagtacagcggctaccctctgaccttcggccagggcacaagactggaaatcaaaggcggaggcggaagtggaggcggaggatctggcggcggaggctctcaagttcagctgcaagagtctggccctggcctggtcaagcctagcgaaacactgagcctgacctgcgccgtgtctggctactctatcaccagcgcctactattggaactggatcagacagcctcctggcaaaggactggaatggatcggctacatcagctacgacggcagaaacaactacaaccccagcctgaagaaccggatcaccatcaatcccgacaccagcaagaaccagttcagcctccagctgaacagcgtgacccctgaggataccgccgtgtactactgtgccagagaaggcgactacgacgtgggcaactactacgctatggactactggggccagggaaccctggtcacagtctcttct

SEQ ID NO: 641 - DNA, 738 bp, Artificial Sequence
  Synthetic Polynucloetide
gagatcgtgctgacacagtctcccgccacactgtcactgtctccaggcgaaagagccacactgagctgtagagccagcagcaacgtgatctccagctacgtgcactggtatcagcagaagcctggacaggcccctcggctgctgatctacagcacaagcaatctggcctctggcatccccgccagattttctggctctggaagcggcaccgacttcaccctgaccataagcagcctggaacctgaggacttcgccgtgtactactgccagcagtatagcggctaccctctgaccttcggccagggcacaagactggaaatcaaaggcggaggcggaagtggaggcggaggatctggcggcggaggctctgaagtgcaactggtggaaagtggcggcggactggtgcaacctggaagaagcctgagactgtcctgtgccgccagcggctactctatcacaagcgcctactactggaactgggtccgacaggctcctggcaaaggactggaatgggtgtcctacatcagctacgacggcagaaacaactacaaccccagcctgaagaaccgcttcaccatcagccgggacaacgccaagaagtccctgtacctccagatgaacagcctgagagccgaggacacagccctgtactattgcgccaaagagggcgactacgacgtcggcaactactacgctatggactactggggccagggaaccaccgtgactgtctcttct

SEQ ID NO: 642 - DNA, 765 bp, Artificial Sequence
  Synthetic Polynucloetide
gacgtggtcatgacacagaccccactgagcctgcctgtgtctctgggagatcaggccagcatctcctgtagaagcagccagagcctggtgcacagcaacggcaacacctacctgcggtggtatctccagaagcctggacagagccccaaggtgctgatctacaaggtgtccaacagagtgtccggcgtgcccgatagattttctggcagcggctctggcaccgacttcaccctgaagatcaatagagtggaagccgaggacctgggcgtgtacttctgtagccagagcacccatgtgccttggacctttggcggaggcaccaagctggaaatcaagagcagcgccgacgacgccaagaaggacgccgccaaaaaggatgatgccaagaaagacgatgctaaaaaagacggcggcgtgaagctggacgagacaggcggaggacttgttcaacctggcggagccatgaagctgagctgtgtgaccagcggctttaccttcggccactactggatgaactgggtccgacagtcccctgagaaaggactggaatgggtcgcccagttcagaaacaagccctacaactacgaaacctactacagcgacagcgtgaagggcagattcaccatcagccgggacgacagcaagtccagcgtgtacctccagatgaacaacctgcgcgtggaagataccggcatctactactgtaccggggccagctacggcatggaatatctcggccagggcaccagcgtgaccgtgtctaca

SEQ ID NO: 643 - DNA, 753 bp, Artificial Sequence
  Synthetic Polynucloetide
caggtgcaactggtggaatctggcggcaatctggttcagcctggcggctctctgagactgtcttgtgccgccagcggcttcaccttcggcagcttttctatgagctgggtccgacaagctcctggcggaggacttgaatgggtggcaggactgtctgccagaagcagcctgacacactacgccgactctgtgaagggcagattcaccatcagccgggacaacgccaagaacagcgtgtacctccagatgaacagcctgagagtggaagataccgccgtgtactactgcgccagaagaagctacgacagcagcggctactggggccacttctacagctacatggatgtgtggggccagggcaccctggttacagtttctggcggaggcggaagtggaggcggaggatctggcggcggaggctcttctgtgctgacccagcctagctccgtgtctgctgctcctggacagaaagtgaccatctcctgtagcggcagcaccagcaacatcggcaacaactacgtgtcctggtatcagcagcaccccggcaaggcccctaagctgatgatctacgacgtgtccaagaggcccagcggcgtgccagatagattttccggcagcaagagcggcaacagcgccagcctggatattagcggactccagtctgaggacgaggccgactactattgcgccgcctgggatgatagcctgagcgagtttctgtttggcaccggcaccaagctgacagtgcttgga

SEQ ID NO: 644 - DNA, 726 bp, Artificial Sequence
  Synthetic Polynucloetide
cagtctgtggtcacacagcctccatctgtgtctggcgctccaggccagagagtgaccatctcttgtaccggcagcagcagcaatatcggagccggctatgacgtgcactggtatcagcagctccctggcacagcccctaaactgctgatctacggcaacagcaacagacccagcggcgtgcccgatagattttccggctctaagagcggcacaagcgccagcctggctattactggactccaggccgaggacgaggccgactactactgtcagagctacgacagcagcctgagcggcagctatgtgtttggcaccggcaccaagctgacagtgcttggaggcggaggcggaagtggaggcggaggatctggcggcggaggctctgaagttcaactggtggaaaccggcggcaacctggttcaacctggcgcttctctgagactgagctgtgccgccagcggctttagctttagcggaacagccatgcactgggtccgacaggcacctggcaaaggactggaatgggtgtccaccatcagcagcacaggcagaagcacctactaccgggacagcgtgaagggcagattcaccatctccagagacaacagcaagaacaccctgtacctccagatgaacagcctgagaggcgaggacaccgccgtgtactattgtgccagagtgtccttcgactactggggccagggaaccctggtcacagtctcttct

SEQ ID NO: 645 - DNA, 732 bp, Artificial Sequence
  Synthetic Polynucloetide
cagtctgtggttacacagcctgcctccgtgtctggctctcctggccagagcatcaccatcagctgtaccggcaccagctctgatgtcggcggctacaattacgtgtcctggtatcagcagcaccccggcaaggcccctaagctgatgatctacgacgtgtccaagaggcccagcggcgtgtccaatagattcagcggcagcaagagcggcaacaccgccagcctgacaatttctggactgcaagccgaggacgaggccgactactactgtagcagctacaccagcagcagcacactggtgtttggcggaggcaccaagctgacagttcttggaggcggaggcggaagtggaggcggaggatctggcggcggaggctctgaagttcagctggttgaaagcggcggagcctttgttcagcctggcggatctctgagactgagctgtgccgccagcggcttcacattttccagctacgccatgacctgggtccgacaggctcctggcaaaggactggaatgggtgtccaccatctccggcagaggcagaagcaccttctacgccgatagcgtgaagggcagattcacaatcagccgggacaacagcaagaacaccctgtacctccagatgaacagcctgagagccgaggataccgccgtgtactactgtgcccggtactatcacgctggcgcctttgatctttggggccagggaacactggtcaccgtgtcatct

SEQ ID NO: 646 - DNA, 738 bp, Artificial Sequence
  Synthetic Polynucloetide
gacgtggtcatgacacagagcccttctagcctgtctgccagcgtgggcgacagagtgacaatcacctgtcagagcagcctggacatcagccactacctgaactggtatcagcagaagcccggcaaggcccctaagctgctgatctacgacgccagcaatctggaaaccggcgtgcccagcagattttctggcagcggaagcggcacccacttcaccttcacaatatccagcctccagcctgaggacttcgccacctactactgccagcagtacgacaacctgcctctgacctttggcggaggcaccaagctggaaatcaagagaggcggaggcggaagtggaggcggaggatctggcggcggaggctctcaagttcaactggttcaatcaggcggaggcgtggtgcaacctggtggctctctgagagtgtcttgtgctgcctctggcgtgaccctgagcgactatggaatgcactgggtccgacaggcccctggcaaaggacttgagtgggtcgccttcatcagaaacgacggcagcgacaagtattacgccgacagcgtgaagggcagattcaccatcagccgggacaacagcgagaaaaccgtgtctctccagatgtctagcctgagagccgaggacaccgccgtgtactactgtgccaagaatggcgagagcggccctctggactactggtatctggatctgtggggcagaggcaccctggtcacagtctcttct

SEQ ID NO: 647 - DNA, 759 bp, Artificial Sequence
  Synthetic Polynucloetide
gacgtgatgctgacccagacaccactgagcctgcctgtgtctctgggcgatcaggccagcatctcctgtagaagcagccagagcatcctgcacagcaccggcgatacctacctggaatggtatctccagaagcctggacagagccccaagctgctgattaacaaggtgtccaaccggctgagcggcgtgcccgatagattttctggcagcggctctggcaccgacttcaccctgaagatcagcagagtggaagccgaggacctgggcgtgtactactgcttccaaggcagccatgttccttggacctttggcggaggcaccaagctggaaatcaagagagctgacgccgctcctaccgtgtccatctttcctggaggcggtggaagtggcggcggtggttcaggcggcggaggatctcaagtgaagctccagcagagcggccctagccttgtgaaacctggcgcttccgtgaagatgagctgcaaggccagcggctacaccttcaccgatttctacatgaaatgggtcaagcagagccacggcaagtctctggaatggatcggcgacatcaaccccaacatcggagacaccttctacaaccagaagttcaagggcaaagccacactgaccgtggacaagagcagcagcaccgcctacatgcagctcaacagcctgaccagcgaggacagcgccgtgtacttttgttccgtgggctacttcgacgtgtggggagccggaacaaccgtgacagtctcttct

SEQ ID NO: 648 - DNA, 759 bp, Artificial Sequence
  Synthetic Polynucloetide
ctgcctgttctgacacagcctccatccgtgtctgtggcccctggaaagaccgccagaatcacatgcggcggcaacaacatcggcagcaagagcgtgcactggtatcagcagaagcctggacaggctcctgtgctggtggtgtacgacgacagcgatagacctagcggcatccccgagagattcagcggcagcaattccggcaataccgccacactgaccatcagcagagtggaagctggcgacgaggccgactactactgccaagtgtgggacagcagcagcgactacgtggtgtttggcggcggaacaaagctgacagtgcttggcggaggcggaagtggaggcggaggatctggcggcggaggctctgaagttcaactggtgcagagcggagccgaagtgaagaagccaggcgagagcctgaagattagctgcaaaggcagcggctacagcttcaccagctactggatcggctgggtccgacagatgcctggcaaaggactggaatggatgggcatcatctaccccggcgacagcgacaccagatacagccctagctttcagggccaagtgaccatctccgccgacaagagcatcagcacagcctacctccagtggtcctctctgaaggccagcgataccgccatgtactactgcgccagacaagtctggggatggcaaggcggcatgtaccccaggtctaactggtggtacaacctggactcttggggccagggcacactggtcacagtctcttct

SEQ ID NO: 649 - DNA, 738 bp, Artificial Sequence
  Synthetic Polynucloetide
gagctggtcatgacacagagccctgcttctctggccgtgtcactgggacagagagccaccatctcttgcagagccagcgagagcgtggacagctacggcaagagcttcatgcactggtatcagctcaagcccggccagcctcctaagctgctgatctacagagcctccaacctggaaagcggcgtgccagccagattttctggcagcggcagcagaaccgacttcaccctgaccattgatcccgtggaagccgatgatgccgccacctactactgccagcagaacaacgaggacccctggacatttggcggaggcaccaagctggaaatcaaaggcggaggcggaagtggaggcggaggatctggcggcggaggctctgaagtgcagctcgaacagtctggccccgagcttgtgaaacctggcgcttccgtgaagatgagctgcaaggccagcggctacaccttcaccaactactacatgaaatgggtcaagcagagccacggcaagtccctggaatggatcggcgatctgaaccccaacaacggcgacaccttctacaaccagaagttcaagggcaaagccacactgaccgtggacaagagcagcaacaccgcctacatgcagctcaactccctgaccagcgaggacagcgccgtgtactactgtgccagaaccggcagatacgaagagaacgctatggactactggggccagggcacaagcgtgacagtctcttct

SEQ ID NO: 650 - DNA, 732 bp, Artificial Sequence; identical to SEQ ID NO: 623
  Synthetic Polynucloetide

SEQ ID NO: 651 - DNA, 732 bp, Artificial Sequence; identical to SEQ ID NO: 532
  Synthetic Polynucloetide

SEQ ID NO: 652 - DNA, 720 bp, Artificial Sequence
  Synthetic Polynucloetide
gacgtggtcatgacacagagcccttctagcctgtctgccagcgtgggcgacagagtgaccatcacctgtatggcctccgaggacatctacatccggctggcctggtatcagcagaagcctggaaacgcccctaagctgctgatctacgccgccacctctctggaaacaggcgtgccaagcagattttccggcagcggctctggcaccgatttcaccctgacaatatccagcctccagcctgaggacttcgccacctactactgccagcagtattggagcagcccctggacatttggcggaggcaccaaggtggaaatcaaaggcggaggcggaagtggaggcggaggatctggcggcggaggctctcaggttcagctgcaagagtctggccccggactggtcaagcctagccaaacactgagcctgacctgtaccgtgtccggctacagcatcaccagcgactacacctggaactggatcagacagcctcctggcaacggactggaatggatcggctacatcacctacagcggcagcaccagctacaaccccagcctgaaaagccgggtgctgatctccgtggacaccagcaagaatcaggtgtccctgaagctgagcagcgtgacagccgctgataccgccgtgtactactgtgccagactggggagaagatacacaatggactactggggccagggcaccaccgtgacagtttcttct

SEQ ID NO: 653 - DNA, 735 bp, Artificial Sequence
  Synthetic Polynucloetide
gaggtgcaactggttgagtctggcggaggactggtgcagcctggaagaagcctgagactgtcttgtgccgccagcggcttcaccttcgacgattatgccatgcactgggtccgacaggcccctggcaaaggacttgaatgggtgtccggcatctcctggaacagcggctctatcggctacgccgattccgtgaagggcagattcaccatcagccgggacaacgccaagaacagcctgtacctccagatgaactccctgagagccgaggacacagccctgtactactgcgccaaagacaaaggcggaggctactacgacttttggagcggcagcgattattggggccagggcacactggtcacagtgtctagcggcggaggcggaagtggaggcggaggatctggcggcggaggctcttcttctgagctgacacaggaccctgccgtgtctgttgctctgggccagacagtgcggattacctgtcagggcgatagcctgagaagctactacgcctcctggtatcagcagaagccaggccaggctcctgtgctggtcatctacggcaagaacaacagacccagcggcatccccgatagattcagcggaagcagctctggcaataccgccagcctgacaattactggcgctcaggccgaggacgaggccgactactactgcaacagcagagatagcagcggctgggttttcggcggaggcacaaaactgacagtgctg

SEQ ID NO: 654 - DNA, 762 bp, Artificial Sequence
  Synthetic Polynucloetide
gaagtgcagctccagcagtctggacctggcctggttaagcctagccagacactgagcctgacctgtgccatcagcggcgatagcgtgctgagcaacagcgacacctggaactggatcagacagagccctagcagaggactggaatggctgggcagaacctaccacagaagcacttggtacgacgactacgccagctctgtgcggggcagagtgtccatcaatgtggacaccagcaagaaccagtacagcctgcaactgaacgccgtgacacctgaggataccggcgtgtactactgcgccagagacagactccaggacggcaactcttggagcgacgcctttgatgtgtggggccagggcacaatggtcaccgtttctagcggcggaggcggaagtggaggcggaggatctggcggcggaggctctcaatctgctctgacacagcctgccagcgtgtcaggatctcctggacagagcatcaccatctcttgcaccggcaccagctctgatgtcggcggctacaattacgtgtcctggtatcagcagcaccccggcaaggcccctaagctgatgatctacgacgtgtccaacagacccagcggcgtgtccaatagattctccggcagcaagagcggcaacaccgccagcctgacaatttctggactgcaagccgaggacgaggccgactactactgtagcagctacaccagcagcagcacactggtgtacgtgttcggcacaggcaccaaagtgaccgtgctt

SEQ ID NO: 655 - DNA, 756 bp, Artificial Sequence
  Synthetic Polynucloetide
caggtgcaactggttcagtctggggccgaagtgaagaaacctggggcctctgtgaaggtgtcctgcaaggcttccggctacacctttaccagctacgacatcaactgggtccgacaggccacaggccaaggactggaatggatgggctggatgaaccccaacagcggcaataccggctacgcccagaaattccagggcagagtgaccatgaccagaaacaccagcatcagcaccgcctacatggaactgagcagcctgagaagcgaggacaccgccgtgtactattgcgccagaggcgacagcaactactggtcctactacggcatggacgtgtggggccagggaacactggttacagtttctagcggcggaggcggaagtggaggcggaggatctggcggcggaggctctggcggtggtggatctcaatctgtgctgacccagcctagatccgtgtctggctctcctggacagagcgtgaccatctcttgtaccggcaccagctctgatgtcggcggctacaattacgtgtcctggtatcagcagcaccccggcgaagcccctaagctgattatctacgacgccgacaagcggcccagcggcatcagcaatagattcagctctggcaagagcggcaacaccgccagcctgacaatcagcggactccaggtggaagatgaggccgactactactgctgctcctatgccggcggaagcacctgggttttcggaggcggtacaaaagtgaccgtgctg

SEQ ID NO: 656 - DNA, 762 bp, Artificial Sequence
  Synthetic Polynucloetide
gaagtgcagctccagcagtctggacctggcctggttaagcctagccagacactgagcctgacctgtgccatcagcggcgatagcgtgtcctctaatagcgccgcctggaactggatcagacagagccctagcagaggactggaatggctgggcagaacctactaccgcagcaagtggtacagcgactacgccgtgtccgtgaagtcccggatcaccatcaatcccgacaccagcaagaaccagttcagcctgcaactgaacagcgtgacccctgaggataccgccgtgtactactgcgccagagatccctacgacttttggagcggctaccccgacgcctttgacatctggggacagggcacaatggtcaccgtttctagcggcggaggcggaagtggaggcggaggatctggcggcggaggctctcaatctgctctgacacagcctgccagcgtgtcaggatctcctggacagagcatcaccatctcttgcaccggcaccagctctgatgtcggcggctacaattacgtgtcctggtatcagcagcaccccggcaaggcccctaaagtgattatcagcgaagtgaacaacagacccagcggcgtgtcccacagattcagcggctctaagtctggcaacaccgccagcctgacaatctctggactgcaagccgaggacgaggccgactacttctgtagcagctacaccagcggcagaaccctgtacgtgttcggcacaggcagcaaagtgacagtgctggga

SEQ ID NO: 657 - DNA, 759 bp, Artificial Sequence
  Synthetic Polynucloetide
gaagtgcagctccagcagtctggacctggcctggttaagcctagccagacactgagcctgacctgtgccatcagcggcgattccatgctgagcaacagcgacacctggaactggatcagacagagccccagcagaggcctggaatggctgggcagaacataccacagaagcacttggtacgacgactacgccagctctgtgcggggcagagtgtccatcaatgtggacaccagcaagaaccagtacagcctgcaactgaacgccgtgacacctgaggataccggcgtgtactactgtgccagagtgcggctccaggacggcaattcttggagcgacgcctttgatgtgtggggccagggcacaatggtcaccgtttctagcggcggaggcggaagtggaggcggaggatctggcggcggaggctctcaatctgctctgacacagcctgccagcgcctctggatctcctggacagagcgtgaccatctcctgtaccggcacctcttctgatgtcggcggctacaactacgtgtcctggtatcagcagcaccccggcaaggcccctaagctgatgatctacgacgtgtccaacagacccagcggcgtgtccaatagattctccggcagcaagagcggcaacaccgccagcctgacaatttctggactgcaagccgaggacgaggccgactactactgtagcagctacaccagcagcagcacactgtacgtgttcggcacaggcacccagctcacagttctt

SEQ ID NO: 658 - DNA, 732 bp, Artificial Sequence
  Synthetic Polynucloetide
gagatcgtgctgacacagtctcccgccacactgtcactgtctccaggcgaaagagccacactgagctgtagcgccagcagcagcgtgtcctacatgtactggtatcagcagaagcccggacaggcccctagactgctgatctacagaaccagcaacctggcctctggcatccccgccagattttctggctctggcagcggcaccgatttcaccctgaccataagcagcctggaacctgaggacttcgccgtgtactactgccagcagtaccacagctaccccaccacctttggacagggcaccaaggtggaaatcaagcggacagttggcggaggcggaagtggaggcggaggatctggcggcggaggctctgaagtgcagctggttgaatcaggtggcggcctggttcaacctggcggatctctgagactgtcttgtgccgccagcggcttcagcttcaacacctacgccatgaactgggtccgacaggctcctggcaaaggactggaatgggtgtcccacatcagaagcaagagcaacaacttcgccacctactacgccgacagcgtgaaggacagattcaccatcagccgggacaacgccaagaacagcctgtacctccagatgaactccctgagagccgaggacaccgccgtgtattattgcgccagacaaggcggcgacttccctatggattattggggccagggcaccctggtcaccgtttcttct

SEQ ID NO: 659 - DNA, 720 bp, Artificial Sequence
  Synthetic Polynucloetide
gacgtggtcatgacacagagcccttctagcctgtctgccagcgtgggcgacagagtgaccatcacctgtaaagccagcgaggacatctacatccggctggcctggtatcagcagaagcctggaaaggcccctaagctgctgatctacgccgccacctctctggaaacaggcgtgccaagcagattttccggcagcggctctggcaccgatttcaccctgacaatatccagcctccagcctgaggacttcgccacctactactgccagcagtattggaccacaccttggacctttggcggaggcaccaaggtggaaatcaaaggcggaggcggaagtggaggcggaggatctggcggcggaggctctcaggtgcagctccaagagtctggccctggactggtcaagcctagccagacactgagcctgacctgtaccgtgtccggctacagcatcaccatcgactacacctggaactggatcagacagcctcctggcaaaggactggaatggatcggctacatcacctacagcggcagcaccgactacaaccccagcctgaaaagccgggtgctgatctccgtggacaccagcaagaatcaggtgtccctgaagctgagcagcgtgacagccgctgataccgccgtgtactactgtgccagactgggcagaagatacgccctggattattggggccagggcaccaccgtgacagtgtcatct

SEQ ID NO: 660 - DNA, 735 bp, Artificial Sequence
  Synthetic Polynucloetide
gacatccagctgactcagagccctagctttctgagcgccagcgtgggcgacagagtgaccattacatgtagagccagccagggcatcagcaccgacctgaactggtatcagcagaagcctggcaaggcccctaagctgctgatctacgccgccagcaatctggaaagcggcgtgccaagcagattttccggctctggcagcggcaccgagttcaccctgacaatatctagcctccagcctgaggacttcgccacctactactgccagcagagctacaactggccctacacctttggcggaggcaccaaggtggaaatcaagagaggcggaggcggaagtggaggcggaggatctggcggcggaggctctgaagttcagctggttgaatcaggcggaggactcgtgaaacctggcggctctctgagactgtcttgtgccgccagcggcttcaccttcagcaacttcgagatgaactgggtccgacaggccccaggcaaaggactggaatgggtgtccggcatcagctccaatggccggtacatcaactacgccgacagcgtgaagggcagattcaccatcagccgggacaacgccaagaacagcctgtacctccagatgaactccctgagagccgaggacaccgccgtgtactattgtgccagagtggtggacttcgaccaggactacaacggcttcgactattggggccagggcaccctggttaccgttagctct

SEQ ID NO: 661 - DNA, 729 bp, Artificial Sequence
  Synthetic Polynucloetide
gacatccaactgactcagagccccagctttctgagcgcctctgtgggcgacagagtgaccatcacatgtagtctcagcctgggcatcagcacatggcgggattggtttccgccgaggcttggcaggggccttgagccgctgacctacgccgccagcacactgcaaagcggagtgcctagcagattttccggcagcggctctggcaccgagttcaccctgacaatatccagcctccagcctgaggacttcgccacctactactgccagcagctcaacagctaccctctgacctttggcggaggcaccaaggtggaaatcaagagaggcggaggcggaagtggaggcggaggatctggcggcggaggctctgaagttcaactggttgagtctggtggcggcctggttaagcctggcggatctctgagactgagctgtgccgccagcggcttcacctttagcacatacggcatgagctgggtccgacaggcccctggaaaaggacttgagtgggtcgcctacatcaacaacggctccggctacatctactacgccgacagcgtgaagggcagattcaccatcagccgggacaacgccaagaacagcctgtacctccagatgaactccctgagagccgaggacaccgccgtgtactattgtgccagaggacagtggtggagcggcggagactttgattattggggccagggcaccctggtcaccgtttcttct

SEQ ID NO: 662 - DNA, 735 bp, Artificial Sequence
  Synthetic Polynucloetide
gacatccagatgacccagaccacaagcagcctgtctgccagcctgggcgacagagtgaccatctcttgtagagccagccaggacatcagcaactacctgaactggtatcagcagaaacccgacggcaccgtgaagctgctgatctactacaccagcatcctgcacagcggcgtgcccagcagattttctggctctggcagcggcaccgactacagcctgaccatcagcaatctggaacaagaggacttcgctacctacttctgccagcaaggcaacaccctgccttggacatttggcggaggcaccaagctggaaatcaaagctggcggaggcggaagtggaggcggaggatctggcggcggaggctctgaagtgcaactggttgaatctggcggcggactggttaagcctggcggatctctgaagctgagctgtgccgcctctggcttcgccttcagcatctacgatatgagctgggtccgacagacccctgagaagagactggaatgggtcgcctacatctctagcggcggagggacctactatcccgacacagtgaagggcagattcaccatctccagagacaacgccaagaacaccctgtacctccagatgagcagcctgaagtccgaggacaccgccatgtactactgcgccagacacagcggctatggcacacattggggagtgctgtttgcctactggggccagggaacactggtcacagtttctgct

SEQ ID NO: 663 - DNA, 765 bp, Artificial Sequence
  Synthetic Polynucloetide
gacatcgtgatgacacagagccctgatagcctggccgtgtctctgggagagagagccaccatcaactgcaagagcagccagagcctgctgtacagaagcaaccagaagaactacctggcctggtatcagcagaagcccggccagcctcctaagctgctgatctactgggccagcaccagagaaagcggcgtgcccgatagattttctggctctggcagcggcaccgacttcaccctgacaatttctagcctgcaagccgaggacgtggccgtgtactactgccagcagtattacaactaccccagaaccttcggccagggcaccaaggtggaaatcaagagaacagttggcggaggcggaagtggaggcggaggatctggcggcggaggctctgaagttcagctgcttgaatcaggcggcggactggttcaacctggcggatctctgagactgagctgtgccgccagcggctacagcatcacaagcgactatgcctggaactgggtccgacaggcccctggcaaaggactggaatgggtgtcctacatcagcaacagcggcagcaccagctacaaccccagcctgaagtcccggttcaccatcagcagagacaacagcaagaacaccctgtacctccagatgaacagcctgagagctgaggacaccgccgtgtattattgcgccaaagagcggaactacgactacgacgattactactacgctatggactactggggccagggaaccctggtcacagtctcttct

SEQ ID NO: 664 - DNA, 744 bp, Artificial Sequence
  Synthetic Polynucloetide
gacgtggtcatgacacagagccctctgagcctgcctgtgacacttggacagcctgccagcatcagctgtagaagcagccagagcctgctgcacagcagcggcaatacctacctggaatggtatcagcagaggcccggacagagccccagacctctgatctacaagatcagcacccggttcagcggcgtgcccgatagattttctggctctggcagcggcaccgacttcaccctgaagattagcagagtggaagccgaggacgtgggcgtgtactactgcttccaaggcagccacgtgccatacacctttggcggcggaacaaaggtggaaatcaagagaggcggaggcggaagtggaggcggaggatctggcggcggaggctctcaagttcagctggttcagagcggagccgaagtgaagaaacctggggcctctgtgaaggtgtcctgcaaagcctctggcctgaccatcgaggactactacatgcactgggtccgacaggcccctggacaaggacttgaatggatgggctggatcgaccccgagaacggcgatacagagtacggccctaagttccagggcagagtgaccatgaccagagacaccagcatcaacaccgcctacatggaactgagccggctgagatccgatgacaccgccgtgtactattgcgccgtgcacaatgcccactacggcacttggtttgcctattggggccagggcacactggtcaccgttagctct

SEQ ID NO: 665 - DNA, 720 bp, Artificial Sequence
  Synthetic Polynucloetide
gacatccagatgacacagagccctagcagcctgtctgccagcgtgggagacagagtgaccatcacctgtagagccagcgagaacatctacagcaacctggcctggtatcagcagaagcctggcaaggcccctaagctgctgatctacgccgccaccaatctggctgatggcgtgccaagcagattttccggctctggcagcggcaccgatttcaccctgacaatatccagcctccagcctgaggacttcgccacctactactgccagcacttttggggcacccctacattcggccagggcaccaaggtggaaatcaagagaacagttggcggaggcggaagtggaggcggaggatctggcggcggaggctctgaagtgcagctggttgaatcaggtggcggcctggttcaacctggcggatctctgagactgagctgtgccgcctctggcttcagcctgacaaattacggcgtgcactgggtccgacaggcccctggaaaaggactggaatgggtgtccgtgatttggagcggcggcagcaccgattacaacgccgccttcatcagccggttcaccatcagcgccgacaccagcaagaataccgcctacctccagatgaactccctgagagccgaggacaccgccgtgtactattgcgccagagaactgatccacgctatggacaactggggccagggaaccctggtcacagtctcttct

SEQ ID NO: 666 - DNA, 741 bp, Artificial Sequence
  Synthetic Polynucloetide
gacttcgtgatgacacagagccctctgagcctgcctgtgacacctggcgaacctgccagcatcagctgtagaagcagccagagcatcgtgcacagcaacggcaacacctacctggaatggtatctccagaagcctggacagagcccacagctgctgatctacaaggtgtccaacagattcagcggcgtgcccgacagattttctggcagcggctctggcaccgacttcaccctgaagattagcagagtggaagccgaggacgtgggcgtgtactactgcttccaaggctctcacgtgcccctgacctttggacagggcaccaagctggaaatcaagagaggcggaggcggaagtggaggcggaggatctggcggcggaggctctgaagtgcagctggttgaaagcggagccgaagtgaagaaacctggggcctctgtgaaggtgtcctgcaaggccagcggctacacctttaccagctactggattcactgggtccgacaggcccctggacaaggacttgagtggatgggcgagaacgacccctccaacggcaggaccaactacaacgagaagttcaagaaccgcgtgaccctgaccgtggacaccagcatctctaccgcctacatggaactgagccggctgagatccgatgacaccgccgtgtactattgcgccagaggacccaactacttttacagcatggactactggggccagggcacaatggtcaccgttagctct

SEQ ID NO: 667 - DNA, 720 bp, Artificial Sequence
  Synthetic Polynucloetide
gacatccagctgactcagagccctagctttctgagcgccagcgtgggcgacagagtgaccatcacatgtagcgccagatccagcatcagcttcatgtactggtatcagcagaagcccggcaaggcccctaagctgctgatctacgacaccagcaatctggcctctggcgtgcccagcagattttctggaagcggcagcggcaccgagttcaccctgacaatctctagcctggaagccgaggatgccgccacctactattgccagcagtggtccagctatcccctgacatttggacagggcaccaagctggaaatcaaaggcggaggcggaagtggaggcggaggatctggcggcggaggctctcaggttcagctggttcagtctggggccgaagtgaagaaacctggggcctctgtgaaggtgtcctgcaaggcttccggctacacctttaccggctcttggatgaactgggtccgacaggctcctggacagggactcgaatggatcggcagaatctatcctggcgacggcgagacaaactacaacggcaagttcaaggaccgcgtgacaatcaccgccgacaagagcacaagcaccgcctacatggaactgagcagcctgcggagcgaagataccgccgtgtactactgcgcccggatctacggcaacaacgtgtacttcgatgtgtggggccagggcacaaccgtgacagtctcttct

SEQ ID NO: 668 - DNA, 744 bp, Artificial Sequence
  Synthetic Polynucloetide
cagctggtgctgacacagtctccaagcgcctctgccagcctgggatctagcgtgaagctgacctgtacactgagcagcggccacaagaccgacaccatcgactggtatcagcagcagcctggcaaggcccctagatacctgatgaagctggaaggcagcggcagctacaacaaaggctctggcgtgcccgatagattcagcggcagttcttctggcgctgattggtatctgaccatcagcagcctccagagcgaggacgaggccgattactactgcggcacagactaccccggcaactacctgtttggcggcggaacacagctgacagtgcttggcggcggaggcggaagtggaggcggaggatctggcggcggaggctctcaagaacagctggttgaaagcggcggaggactggttcaacctggcggttctctgagactgagctgtgccgccagcggcttcaccttcagcgactactacatgagctggatcagacaggccccaggcaaaggactggaatgggtcgccacaatctaccccagcagcggcaagacctactacgccgattctgccaagggcagactgaccatctccagcgacaacgccaaggacagcctgtacctccagatgaacagcctgagagccgaggacaccgccgtgtactactgcaccagagatagctacgccgacgacgccgctctgtttgacatttggggccagggcaccaccgtgaccgtttcttct

SEQ ID NO: 669 - DNA, 729 bp, Artificial Sequence
  Synthetic Polynucloetide
gacatcgtgctgacacagagccctccaagcctggctatgagcctgggaaagagagccaccatcagctgtagagccagcgagagcgtgacaatcctgggctctcacctgatccactggtatcagcagaagcccggccagcctcctacactgctgattcagctggcctccaatgtgcagacaggcgtgccagccagattttctggcagcggcagcagaaccgacttcaccctgaccattgatcccgtggaagaggacgacgtggccgtgtactactgcctccagagcagaacaatccccagaacctttggcggaggcaccaagctggaaatcaaaggcggcggaggaagcggaggcggaggatctggtggtggtggatctcaaatccagctggtgcagtctggccccgagctgaagaaacctggcgagacagtgaagatcagctgcaaggccagcggctacaccttcaccgactacagcatcaactgggtcaagagagcccctggcaagggcctgaaatggatgggctggatcaacaccgaaaccagagagcccgcctacgcctacgacttcagaggcagattcgccttcagcctggaaaccagcgccagcacagcctacctccagatcaacaacctgaagtacgaggacaccgccacctacttttgcgccctggactacagctacgctatggactattggggccagggcaccagcgtgacagtctcttct

SEQ ID NO: 670 - DNA, 741 bp, Artificial Sequence
  Synthetic Polynucloetide
caggtacagctgcaggaatctgggcccggacttgtcaagccaagtcagacactttctcttacatgtaccgtgagcggcggaagtataagcagtggaggcttttactggtcttggatacggcagcacccaggcaaaggcttggagtggattggatacattcatcattcaggatctacacactataatccatcccttaagtcccgggtcaccattagcattgatacgtctaagaatctgttcagtctcaggctgtcctccgtcactgctgccgacacagccgtgtactactgcgcctccttggtttactgcggaggcgactgttatagcggctttgattattgggggcaggggaccctcgtaaccgtgagctctggaggcggaggatcaggtggcggtggatctggcggtggcggatctgatatccagctcactcaaagcccctctagtctctctgcctcagtgggggatcgggtcagttttacttgtcaagcttcacaggatatcaacaacttccttaattggtatcagcagaagccaggaaaagcacccaagctgctcatctatgatgcctcaaatttggagacgggtgttcccagtcgattctctgggtcagggtccgggaccgactttacgtttacgatctcctctctgcagcccgaagacatcgccacatactattgtcaacagtacggcaacttgcctttcacatttgggggcgggactaaggttgaaatcaagagg

SEQ ID NO: 671 - DNA, 735 bp, Artificial Sequence
  Synthetic Polynucloetide
caggtccaactgcaagaaagcggacccggactggtgaagccttctgagacacttagtctgacgtgcacggtcagtggcggctccatctcctcctattattggtcatggatacgacaacccccaggtaagggcctggaatggattggctatatctactattcaggaagcacgaactacaatcccagcctgaagtcccgagtgacaatttcagtagataccagtaaaaaccagttcagtcttaaactgtcaagcgtgacagctgccgacaccgctgtgtattactgcgtctcactggtgtattgtggaggggattgttatagcgggttcgattattggggacagggaaccctggtgactgtatcttccggaggcggaggatcaggtggcggtggatctggcggtggcggatctgatattcaactgacacaatcccccagctcactcagcgccagcgtgggggacagggttagctttacctgtcaagcctctcaggatataaataactttctgaactggtatcaacagaagcctgggaaggcgcccaaactcctgatctatgatgcgtccaacctggaaactggcgtgccttcacgctttagcggctctggcagtggtacagacttcacttttaccatctcttcacttcagccggaggacatcgccacatattactgtcaacagtacggaaacttgccctttacttttggaggcggcaccaaagttgaaatcaaaaga

SEQ ID NO: 672 - DNA, 750 bp, Artificial Sequence
  Synthetic Polynucloetide
caagttactttgaaggagtctggacctgtactggtgaagccaaccgagacactgacactcacgtgtacagtgagtggtttttccttgatcaacgcaaggatgggcgtcagctggatcaggcaaccccctggcaaggctctggaatggctcgctcacatattcagcaatgccgaaaaaagctaccggacaagcctgaaatcccgcctgactatttccaaggacacttctaagtctcaggtggtgctgaccatgaccaacatggacccggtggacaccgccacctattactgcgcaagaatccctgggtatggtgggaatggtgactaccattattatgggatggatgtgtgggggcaaggcacaaccgtaacggtctcaagcggaggcggaggatcaggtggcggtggatctggcggtggcggatctgacattcagatgacccaaagcccgtccagcctgtccgccagcctgggagatagagtgacaatcacgtgtagagcttcccaagggataagaaatgatctcgggtggtatcagcagaagcccggcaaagcccccaaaaggcttatatatgctagtagtacactgcagtctggagttccttcccgattttcaggtagcggctccggtacagagttcaccctcacgataagctcactccagcctgaggatttcgcaacgtactactgcctccagcacaacaattttccctggactttcggccagggcaccaaggtggagatcaagagg

SEQ ID NO: 673 - DNA, 732 bp, Artificial Sequence
  Synthetic Polynucloetide
cagatccagttggtggaatcagggggcggtgtggtgcagccgggtaggagcctgagactgtcatgcgtggcgtctggcttcacattcaagaactacggcatgcactgggtgcgacaggcccccggaaagggtttggagtgggtcgccgtgatctggtacgacggatctaatgagtattacggagatcctgtgaagggaaggttcaccatctcccgcgacaatagcaaaaatatgctctacctgcaaatgaactcactcagggcggatgatacggcggtctactattgcgctcgctcagggattgctgtggccggcgcattcgattactggggacagggtaccctggtgacagtatcaagcggaggcggaggatcaggtggcggtggatctggcggtggcggatctgagattgtgttgacacagtctcccgataccctgtcactgtcacccggcgagaaggcaacgctgagttgcagagcaagccagtcagtctcctcttcttttctggcctggtatcagcaaaaaccaggtcaggcaccatctctcctgatttacgttgccagcagacgggcggctggcattcccgacaggttctctggaagcggatctgggaccgattttaccctgacaattagccgcttggagcccgaagactttggtatgttttactgccagcactacggaaggacacctttcacatttggcccgggcacgaaagtcgatataaaacgc

SEQ ID NO: 674 - DNA, 735 bp, Artificial Sequence
  Synthetic Polynucloetide
gacatccaactgactcagagccccagctttctgagcgcctctgtgggcgacagagtgaccatcacatgtagagccagccagggcatcagcagctacctggcttggtatcagcagaagcctggcaaggcccctaaactgctgatctacgccgccagcacactccagtctggcgtgccaagcagattttctggcagcggctctggcaccgagttcaccctgacaatatccagcctccagcctgaggacttcgccacctactactgccagcaagtgaacagctaccctctgacctttggcggaggcaccaaggtggaaatcaagagaggcggaggcggaagtggaggcggaggatctggcggcggaggctctcaactgcaactgcaagagtctggccctggcctggtcaagcctagcgaaacactgagcctgacctgtaccgtgtctggcggcagcatcagctccagcacatattactggggctggatcagacagcctcctggcaaaggactggaatggatcggctccatctacttcaccggcagcaccgactacaaccccagcctgaagtccagggtgtccatctccgtggacaccagcaagaaccagttctccctgaagctgagcagcgtgacagccgctgataccgccgtgtactactgcgccaaagaggacgatagcagcggctactacagcttcgactattggggccagggcaacctggtcaccgttagctct

SEQ ID NO: 675 - DNA, 744 bp, Artificial Sequence
  Synthetic Polynucloetide
cagtctgctctgacccagcctagatccgtgtctggctctcctggacacagcgtgaccatcagctgtaccggcacctcttccgacgtgggcgactacaattacgtgtcctggtatcagcagaggcccggcaaggtgccaaagctgctgatctacgacgtgtccaagaggccaagcggcgtgcccgatagattttccggcagcaagtctggcaacaccgccagcctgacaatctctggactgcaagccgaggacgaggccatctacttttgtgccagctacgccggcaactacaacgtggtgtttggcggaggcaccaagctgacagtgcttggacaaggcggaggcggaagtggaggcggaggatctggcggcggaggctctcaagttcagctggtgcagtctggcagcgagctgaagaaacctggggcctctgtgaaggtgtcctgcaaggcttccggctacaccttcaacacctacgccatgaattgggtccgacaggctccaggccaaggactggaatggatgggctggatcaacaccaacaccggcaatcccacatacgcccagggcttcaccggcagattcgtgttctctctggacacctccgtgtccaccgcctacctccagatcagctctctgaaggccgaggataccgccgtgtactactgcgccagacggtacttcgattggctgctgggagccttcgacatctggggccagggaacaatggtcaccgtgtctagt

SEQ ID NO: 676 - DNA, 720 bp, Artificial Sequence
  Synthetic Polynucloetide
gacatccagatgacacagagccctagcagcctgtctgccagcgtgggagacagagtgaccatcacatgtagcgccagccagggcatcaacaactacctgaactggtatcagcagaagcccggcaaggcccctaagctgctgatccactacacatctggactgcacgctggcgtgcccagcagattttctggctctggcagcggcaccgactacaccctgacaatatctagcctccagcctgaggacgtggcaacctactactgccagcagtacagcatcctgccttggacctttggcggaggcaccaaggtggaaatcaagagaggcggaggcggaagtggaggcggaggatctggcggcggaggctctcaagttcagcttgttcagagcggagccgaagtgaagaaacccggcagctctgtgaaggtgtcctgcaaggcttccggctacgcctttagcagcagctggatgaactgggtccgacaggctcctggacagggccttgaatggatgggcagaatctatcccggcgacggcaatacccactacgcccagaaattccagggccgcgtgacactgacagccgacaagtctacaagcaccgcctacatggaactgagcagcctgagaagcgaggacaccgccgtgtactattgcggcgaaggctatctggaccctatggactattggggccagggcacactggtcaccgttagctct

SEQ ID NO: 677 - DNA, 729 bp, Artificial Sequence
  Synthetic Polynucloetide
gaggtgcagctggttgaatctggcggaggactggttcagcctggcggatctctgagactgtcttgtgccgccagcggctacaccttcaccacctattggatgcactgggtccgacaggcccctggcaaaggacttgagtgggtcggatatatcaggcccagcaccggctacacagagtacaaccagaagttcaaggaccgcttcaccatcagcgccgacaccagcaagaataccgcctacctccagatgaacagcctgagagccgaggacaccgccgtgtactactgtgccagatccagatggctgctggactattggggccagggcacactggttacagtttctggcggaggcggaagtggaggcggaggatctggcggcggaggctctgacattcagatgacacagagccctagcagcctgagcgcctctgtgggagacagagtgaccatcacatgcaagagcagccagagcgtgctgtactccagcaatcagaagaactacctggcctggttccagcagaagcctggcaaggctcctaagctgctgatctactgggccagcaccagagaaagcggcgtgccaagcagattttctggcagcggctctggcaccgacttcaccctgacaatatccagcctccagcctgaggacttcgccacctacttttgccaccagtacctgagcagctacacattcggacagggcaccaaggtggaaatcaagcgg

SEQ ID NO: 678 - DNA, 720 bp, Artificial Sequence
  Synthetic Polynucloetide
gacatccagatgacacagagccctagcagcctgtctgccagcgtgggagacagagtgaccatcacctgtagagccagccaggacatcagcaactacctgaactggtatcagcagaagcccggcaaggcccctaagctgctgatctactacaccagcagactgcacagcggcgtgcccagcagattttctggctctggcagcggcaccgacttcaccctgacaatatctagcctccagcctgaggacttcgccacctactattgccagcagggcaacaccctgccttacacatttggacagggcaccaaggtggaaatcaagagaggcggaggcggaagtggaggcggaggatctggcggcggaggctctgaagtgcagctggttgaatcaggtggcggcctggttcaacctggcggatctctgagactgagctgtgccgccagcggcttcaccttcagcgactactttatgagctgggtccgacaggcccctggcaaaggacttgaatgggtcgccaccatcagcaatggcggcacctacacttactaccccgacagcgtgaagggcagattcaccatctccagagacaacagcaagaacaccctgtacctccagatgaactccctgagagccgaggacaccgccgtgtactactgcgccagattcgacggctacatcttcgactattggggccagggcaccctggtcacagtctcttct

SEQ ID NO: 679 - DNA, 741 bp, Artificial Sequence
  Synthetic Polynucloetide
gacatccagatgacacagagccctagcagcctgtctgccagcgtgggagacagagtgaccatcacctgtaccgccagcagcagagtgtccagcagctacctgcactggttccagcagaagcctggcaaggcccctaagctgctgatctacagcaccagcaatctggcctctggcgtgcccagcagattttctggctctggcagcggcaccgacttcaccctgacaatatctagcctccagcctgaggacttcgccacctactactgccaccagtaccacagaagcccctacacattcggccagggcaccaaggtggaaatcaagagaggcggaggcggaagtggaggcggaggatctggcggcggaggctctgaagttcagctggttgaatctggcggcggactggttcaacctggcggatctctgagactgagctgtgccgcctctggctacgccttcagcaacagctggatcaactgggtccgacaggcccctggcaaaggactggaatgggtcggacaaatctaccccggcgactacgacaccaactacaacggcaagttcaagggcagattcaccatcagccgggacaagagcaagaacaccgcctacctccagatgaactccctgagagccgaggacaccgccgtgtactattgtgctagaggcggctccatctactacggcaacctgggcttcttcgacgtgtggggacagggcacactggtcacagtctcttct

SEQ ID NO: 680 - DNA, 711 bp, Artificial Sequence
  Synthetic Polynucloetide
gacatccagatgacacagagccctagcagcctgtctgccagcgtgggagacagagtgaccatcacatgtagcgccagcagcagcgtgacctacatgtactggtatcagcagaagcccggcaaggcccctaagctgctgatctacgacaccagcaatctggcctctggcgtgcccagcagattttctggctctggcagcggcaccgactacaccctgacaatatctagcctccagcctgaggacttcgccacctactactgccagcagtggtccaactatcccctgacattcggccagggcaccaaggtggaaatcaaaggcggaggcggaagtggaggcggaggatctggcggcggaggctctcaagttcagctggttcagagcggagccgaagtgaagaaacctggggcctctgtgaaggtgtcctgcaaggccagcggctacagcttcatcgagtacaccatcaactgggtccgacaggcccctggacaaggcctggaatggatcggcaacatcgacccctactacggcacaacctactacaaccagatgttcaccggcagagccacactgaccgtggacacctctatcagcaccgcctacatggaactgagccggctgagatccgatgacaccgccgtgtactattgtgccagaggcagcgcctggtttccctattggggacagggaaccctggtcaccgttagctct

SEQ ID NO: 681 - DNA, 711 bp, Artificial Sequence
  Synthetic Polynucloetide
gagatcgtgctgacacagagcccttctagcctgtctgccagcgtgggcgacagagtgaccatcacatgtagagccagcgagaacatctacagctacctggcctggtatcagcagaagcctggcaaggcccctaagctgctgatctacaacaccaagacactcggcgagggcgtgcccagcagattttctggttctggcagcggcaccgacttcaccctgaccatatctagcctgcagcctgaggacttcgccacctactactgccagcaccactacggcacccctttcacatttggccctggcaccaaggtggacatcaaaggcggaggcggaagtggaggcggaggatctggcggcggaggctctcaagttcagctggttcagagcggagccgaagtgaagaaacctggggcctctgtgaaggtgtcctgcaaggccagcggctacaccttcagcgactattgggtgcactgggtccgacaggctccaggacaaggactggaatggatgggagccatcgacggcagcgataccttcaacgattacagccagaaattcaaaggccgcgtgaccatgaccagagacaccagcatcagcaccgcctacatggaactgagccggctgagatccgatgacaccgccgtgtactattgtgccagaggcggcctgctgcagtattggggacagggaacactggtcaccgtgtcctct

SEQ ID NO: 682 - DNA, 723 bp, Artificial Sequence
  Synthetic Polynucloetide
caggttcagctccagcagtctggacctgagctggttaagcctggcgcttccgtgaagatcagctgcaaggcttccggctacgccttcagcagcagctggatgaactgggtcaaacagaggcccggcaaaggactggaatggatcggcagaatctaccccggcgacgaggacaccaattacagcggcaagttcaaggacaaggccacactgaccgccgacaagagcagcaccacagcctacatgcagctgagcagcctgaccagcgaggatagcgccgtgtacttctgtgccagaagcctgctgtacggcgactacctggattattggggccagggcacaaccctgacagtgtctagcggcggaggcggaagtggaggcggaggatctggcggcggaggctctcaaattgtgctgacacagagccccgccatcatgagcgcttctccaggcgagaaagtgaccatgacctgtagcgccagcagctccgtgtcttacatgcactggtatcagcagaagtccggcacaagccccaagcggtggatctacgataccagcaaactggcctccggcgtgcccgatagattttctggcagcggcagcggaaccagctacttcctgaccatcaacaacatggaagccgaggacgccgccacctactactgccagcagtggaacatcaaccctctgacctttggagccggcaccaagctggaactgaagaga

SEQ ID NO: 683 - DNA, 732 bp, Artificial Sequence
  Synthetic Polynucloetide
gacatccagatgacacagagcagcgcctacctgagcgtgtcccttggaggcagagtgaccatcacatgcaaggccagcgaccacatcaacaactggctggcctggtatcagcacaagcccggcaatgcccctagactgctgatctctggcgctaccacactggaaacaggcgtgcccagcagattttctggcagcggctctggcaaggactacaccctgagcatcaccagcctccagaccgaggatgtggctacctactactgccagcagagctggaacaccccttggacatttggcggaggcaccaagctggaaatcaagagaggcggaggcggaagtggaggcggaggatctggcggcggaggctctcaagttcagctgcaacagagcggagccgagcttgtcagacctggcagctctgtgaagattagctgcaaagccagcggctacgccttcagcagctactgggtcaactggatgaagcagcggcctggacagggcctcgaatggatcggccaaatctatcctggcgacggcgacaccaactacaacggcaagtttaagggcagagccaccgtgaccgccgacaagagcagcagcacatcctacatgcagttcagcagcctgaccagcgaggacagcgccgtgtatttctgtgccagatccatcaccaccgtcgtgggctgcgctatggattattggggccagggcacaagcgtgaccgtgtcatct

SEQ ID NO: 684 - DNA, 729 bp, Artificial Sequence
  Synthetic Polynucloetide
gaggttcagctgcttgagtctggcggaggactggttcaacctggcggaagcctgagactgtcttgtgccgccagcggcttcacctttagcagctacgccatgagctgggtccgacaggctcctggcaaaggactggaatgggtgtccgtgatctctggctctggcggcagacccaattacgccgattctgtgaagggcagattcaccatcagccgggacaacagcaagaacaccctgtacctccagatgaacagcctgcgcgacgaggataccgccgtgtactattgtgccaaggtggactacagcaactacctgttcttcgactactggggccagggcaccctggtcacagtttctagcggcggaggcggaagtggaggcggaggatctggcggcggaggctctgaaatcgtgctgacacagagccccggcacactgtcactttctccaggcgaaggcgctaccctgtcttgtagagctggacagtctgtgcggagcagctacctcggatggtatcagcagaagcctggacaggcccctcggctgttgatctacggtgcttctagcagagccacaggcatccccgatagattttctggcagcggctccggcaccgacttcaccctgacaatcagcagactggaacccgaggacttcgccgtgtattactgccagcagtacggctacagccctcctacatttggcggaggcaccaagctggaaatcaag

SEQ ID NO: 685 - DNA, 738 bp, Artificial Sequence
  Synthetic Polynucloetide
gacatcgtgctgacacagagccctccaagcctggctatgagcctgggaaagagagccaccatcagctgtagagccagcgagagcgtgacaatcctgggctctcacctgatccactggtatcagcagaagcccggccagcctcctacactgctgattcagctggcctccaatgtgcagacaggcgtgccagccagattttctggcagcggcagcagaaccgacttcaccctgaccattgatcccgtggaagaggacgacgtggccgtgtactactgcctccagagcagaacaatccccagaacctttggcggaggcaccaagctggaaatcaagggcagcacaagcggcagcggaaagcctggatctggcgagggatctaccaagggacagatccagctggtgcagtctggccccgagctgaagaaacctggcgagacagtgaagatcagctgcaaggccagcggctacaccttcaccgactacagcatcaactgggtcaagagagcccctggcaagggcctgaaatggatgggctggatcaacaccgaaaccagagagcccgcctacgcctacgacttcagaggcagattcgccttcagcctggaaaccagcgccagcacagcctacctccagatcaacaacctgaagtacgaggacaccgccacctacttttgcgccctggactacagctacgctatggactattggggccagggcaccagcgtgacagtctcttct

SEQ ID NO: 686 - DNA, 738 bp, Artificial Sequence
  Synthetic Polynucloetide
gacatccagatgacacagagccctagcagcctgtctgccagcgtgggagacagagtgaccatcacctgtagagccagcagcagcgtgtcctacatgcactggtatcagcagaagcccggcaaggcccctaagctgctgatctacgccaccagcaatctggcctctggcgtgccaagcagattttctggcagcggctctggcaccgacttcaccctgacaatatccagcctccagcctgaggacttcgccacctactactgccagcagtggaccttcaatcctcctaccttcggccagggcaccaagctggaaatcaagagaacagtggctgccggcggaggcggaagtggaggcggaggatctggcggcggaggctctcaagttcagctggttcagtctggggccgaagtgaagaaacctggggcctctgtgaaggtgtcctgcaaggcttccggctacacctttaccagctacaatatgcactgggtccgacaggctcccggccagagacttgaatggatgggcggcatctaccccggcaatggcgacacctcctacaaccagaaattcaagggccgcgtgacaatcaccagagacacctctgccagcaccgcctacatggaactgagcagcctgagaagcgaggacaccgccgtgtactactgcgccagatacgactacaactacgctatggactactggggccagggaaccctggtcacagtgtctagtgcttcc

SEQ ID NO: 687 - DNA, 723 bp, Artificial Sequence
  Synthetic Polynucloetide
gagatcgtgctgacacagagccctggcacactgtcactgtctccaggcgaaagagccacactgagctgtagagccagccagagcgtgtccagctcttacctggcttggtatcagcagaagcccggacaggctcccagactgctgatctacggtgcctctagcagagccacaggcatccccgatagattttctggcagcggctccggcaccgacttcaccctgacaatcagcagactggaacccgaggacttcgccgtgtactactgccagcagtaccaccactctccactgacctttggcggaggcaccaaggtggaaatcaagagaggcggaggcggaagtggaggcggaggatctggcggcggaggctctgaagttcagctggttgaatcaggtggcggcctggttcaacctggcggatctctgagactgtcttgtgccgccagcggcttcactttcagcggcagatccatgaactgggtccgacaggcccctggcaaaggactggaatgggtgtcctacatcagcagcgacagccggaccatctactacgccgatagcgtgaagggcagattcaccatctccagagacaacgccaagaacagcctgtacctccagatgaactccctgagagccgaggacacagccgtgtattattgtgccagaggcggccacggctacttcgatctttggggcagaggcaccctggtcaccgtttcttct

SEQ ID NO: 688 - DNA, 732 bp, Artificial Sequence
  Synthetic Polynucloetide
gagatcgtgctgacacagagccctggcacactgtcactgtctccaggcgaaagagccacactgagctgtagagccagccagagcgtgtccagcgattacctggcttggtatcagcagaagcccggacaggctcccagactgctgatctatggtgcctctcggagagccacaggcatccccgatagattttctggcagcggctccggcaccgacttcaccctgacaatcagcagactggaacccgaggacttcgccgtgtactactgccagcagtacgtgtcctactggacctttggcggaggcaccaaggtggaaatcaagagaggcggaggcggaagtggaggcggaggatctggcggcggaggctctcaagttcagctggttgaatcaggcggaggcgttgtgcagcctggcagaagtctgagactgtcttgtgccgccagcggcttcaccttcagcagctatggaatgcactgggtccgacaggcccctggcaaaggacttgaatgggtggccggcatttggtgggacggcagcaatgagaagtacgccgacagcgtgaagggcagattcaccatctccagagacaacagcaagaacaccctgtacctccagatgaacagcctgagagccgaggacacagccgtgtattattgcgccaaagaggccccttactacgccaaggactacatggacgtgtggggcaagggcaccacagtgactgtctcttct

SEQ ID NO: 689 - DNA, 732 bp, Artificial Sequence
  Synthetic Polynucloetide
gacatccagatgacacagagccctagcagcctgtctgccagcgtgggagacagagtgaccatcacctgtagagccagccaggacgtgaacacagccgtggcttggtatcagcagaagcctggcaaggcccctaagctgctgatctacagcgccagctttctgtacagcggcgtgcccagcagattcagcggaagcagaagcggcaccgacttcaccctgacaatatccagcctccagcctgaggacttcgccacctactactgccagcagcactacaccacacctccaacattcggccagggcaccaaggtggaaatcaagagaacaggcggaggcggaagtggaggcggaggatctggcggcggaggctctgaagtgcagctggttgaatcaggtggcggcctggttcaacctggcggatctctgagactgagctgtgccgccagcggcttcaacatcaaggacacctacatccactgggtccgacaggcccctggcaaaggacttgaatgggtcgccagaatctaccccaccaacggctacaccagatacgccgactctgtgaagggcagattcaccatcagcgccgacaccagcaagaacaccgcctacctccagatgaactccctgagagccgaggacaccgccgtgtactactgtagcagatggggcggctggggcttctacgctatggattattggggccagggaaccctggtcaccgtgtcatct

SEQ ID NO: 690 - DNA, 717 bp, Artificial Sequence
  Synthetic Polynucloetide
caggtgcagctggttgaatctggcggcggacttgtgaagcctggcggatctctgagactgagctgtgccgccagcggcttcaccttcagcgactactacatgacctggatcagacaggcccctggcaaaggactggaatggatcagctacatcagcagcagcggcagcaccatctactacgccgatagcgtgaagggcagattcaccatcagccgggacaacgccaagaacagcctgtacctccagatgaactccctgagagccgaggacaccgccgtgtactactgcgccagagacagaaacagccacttcgactattggggccagggcaccctggtcacagtttctagcggcggaggcggaagtggaggcggaggatctggcggcggaggctctgatattcagatgacacagagccccagcagcgtgtccgcctctgtgggagatagagtgaccatcacctgtagagccagccagggcatcacaagatggctggcctggtatcagcagaagccaggcaaggcccctaagctgctgatctacgccgcttctgtgctccagagcggagtgcctagcagattttctggcagcggctccggcaccgatttcaccctgacaatatccagcctccagcctgaggacttcgccacctactactgccagcagagcaacagcttccccagaacattcggacagggcaccaaggtggaaatcaag

SEQ ID NO: 691 - DNA, 717 bp, Artificial Sequence
  Synthetic Polynucloetide
caggtgcagctggttgaatctggcggcggacttgtgaagcctggcggatctctgagactgagctgtgccgccagcggcttcaccttcagcgatcactacatgagctggatcagacaggcccctggcaaaggactggaatggttcagctacatcagcagcagcggcggcatcatctactacgccgatagcgtgaagggcagattcaccatcagccgggacaacgccaagaacagcctgtacctccagatgaactccctgagagccgaggacaccgccgtgtactactgtgccagagatgtgggcagccacttcgactattggggccagggaacactggtcaccgtttctagcggcggaggcggaagtggaggcggaggatctggcggcggaggctctgatattcagatgacacagagccccagcagcgtgtccgcctctgtgggagatagagtgaccatcacctgtcgggccagccaggacattagcagatggctggcttggtatcagcagaagccaggcaaggcccctaagctgctgatttcagccgccagcagactccagagcggagtgcctagcagattttctggctctggcagcggcaccgacttcaccctgacaatatctagcctccagcctgaggacttcgccatctactattgccagcaggccaagagcttccccagaacatttggacagggcaccaaggtggaaatcaag

SEQ ID NO: 692 - DNA, 753 bp, Artificial Sequence
  Synthetic Polynucloetide
caggtgcagctggttgaatctggtggcggagtggtgcagtctggcagaagcctgagactgtcttgtgccgccagcggcttcaccttcagaaactacggaatgcactgggtccgacaggcccctggcaaaggacttgaatgggtcgccgtgatttggtacgacggcagcgacaagtactacgccgattctgtgcggggcagattcaccatcagccgggacaacagcaagaacaccctgtacctccagatgaacagcctgagagccgaggacaccgccgtgtactactgtgccagagatggctacgacatcctgaccggcaatcccagagacttcgactattggggccagggcacactggtcacagtttctagcggcggaggcggaagtggaggcggaggatctggcggcggaggctctgataccgtgatgacccagacacctctgagcagccacgtgacacttggacagcctgccagcatcagctgtagaagcagccagagcctggtgcacagcgacggcaatacctacctgtcttggctccagcagaggccaggacagcctcctagactgctgatctaccggatcagcagacggttcagcggcgtgcccgatagattttctggaagcggagccggcaccgacttcaccctggaaatcagcagagtggaagccgaggatgtgggcgtctactactgtatgcagagcacccacgtgccacggacctttggacagggcaccaaggtggaaatcaag

SEQ ID NO: 693 - DNA, 732 bp, Artificial Sequence
  Synthetic Polynucloetide
gaggtgcagctggttgaatctggcggaggactggttcagcctggcggatctctgagactgtcttgtgccgccagcggcttcccattcagcagctacgatatgcactgggtccgacaggccacaggcaaaggactggaatgggtgtccgccatcggaacagccggcgctacctattatcccggctctgtgaagggcagattcaccatcagcagagagaacgccaagaacagcctgtacctccagatgaactccctgagagccggcgataccgccgtgtactattgtgccagaggcgactacgtgtggggcacctacagacccctgttcgattattggggccagggcaccctggtcacagtttctagtggcggaggcggaagtggaggcggaggatctggcggcggaggctctgatattcagctgactcagagccccagcttcctgtctgcctctgtgggcgacagagtgaccatcacatgttgggccagccagggcatcaacaactacctggcctggtatcagcagaagcccggcaaggctcctaagctgctgatctacgccgccagcacactgcaaacaggcgtgccaagcagattttccggctctggcagcggcaccgagttcaccctgacaatatctagcctccagcctgaggacttcgccacctactactgccagcagctgaacagctaccctctgacctttggaggcggcaccaaggtggaaatcaag

SEQ ID NO: 694 - DNA, 723 bp, Artificial Sequence
  Synthetic Polynucloetide
caggttcagctgcaagagtctggccctggcctggtcaagcctagcgaaacactgagcctgacctgtaccgtgtctggggccagcatcagcagcttctactggtcctggatcagacagcctcctggcaaaggactggaatggatcggctacatctactacagcggcaccaccaactacaaccccagcctgaagtccagagtgaccatcagcgtggacaccagcaagaaccagttctccctgaagctgagcagcgtgacagccgccgatacagccgtgtactactgtgccagaattgccgtggccggcttcttcttcgactattggggccagggcaccctggtcacagtttctagcggcggaggcggaagtggaggcggaggatctggcggcggaggctctgaaattgtgctgacacagagccccggcacactgtcactttctccaggcgaaagagccacactgagctgtagagccagccagagcgtgaacaagaactacctggcttggtatcagcagaagcccggacaggctcccagactgctgatctacggtgcctctagcagagccacaggcatccccgatagattttctggcagcggctccggcaccgacttcaccctgacaatcagcagactggaacccgaggacttcgccgtgtattattgccagcagtacgacagaagccctctgacctttggaggcggcaccaaggtggaaatcaag

SEQ ID NO: 695 - DNA, 750 bp, Artificial Sequence
  Synthetic Polynucloetide
caggttcagctggttcagtctggggccgaagtgaagaaacctggggcctctgtgaaggtgtcctgcaaggccagcggctacacctttaccaactactacatgcactgggtccgacaggcccctggactgggacttgagtggatgggcatcatcaaccctagcgacggcagcacaagctacgcccagaaattccagggcagagtgaccatgaccagagacaccagcaccaacaccgtgtacatggacctgagcagcctgagaagcgaggacaccgccgtgtactattgtgccagaggcggcaacagcgccttctacagctactacgacatggacgtgtggggccagggcaccacagtgacagtttctagcggcggaggcggaagtggaggcggaggatctggcggcggaggctctgatgtggtcatgacacagacccctctgagcctgcctgtgacacttggacagcctgccagcatcagctgtagatccagccagagcctggtgtacagagatggcaacacctacctgagctggttccagcagaggcctggacagtctcctcggcggctgatctacaaggtgtccaactggcagagcggcgtgcccgatagattttctggcggtggcagcggcaccgacttcaccctgaagatcagcagagtggaagccgaggacgtgggcgtgtactactgtatgcagggcacacactggcctccaacattcggccagggaacaaaggtggaaatcaag

SEQ ID NO: 696 - DNA, 711 bp, Artificial Sequence
  Synthetic Polynucloetide
caggttcagctccagcagtctggacctgagctggttaagcctggcgcttctgtgcggatctcttgcaaggccagcggctacaccttcaccacctactacatccactgggtcaagcagcggcctggacagggactcgaatggatcggctggatctaccccggcaacgtgaacaccaactacaacgagaagttcaagggcaaagccacactgaccgccgacaagagcagcagcacagcctacatgcagctgaccagcctgacctctgaggacagcgccgtgtacttttgtgccagaggcgtgtactacttcgactactggggccagggcaccatcctgacagtttctagcggcggaggcggaagtggaggcggaggatctggcggcggaggctctatcgtgatgacccagactcctaagttcctgctggtgtctgccggcgacagagtgaccatcacctgtaaagccagccagagcgtgaacaacgacgtgtcctggttccagcagaagcccggccaatctcctacactgctgatctactacgccagcaacagatacaccggcgtgcccgatagattcaccggctctggctacggcaccgacttcacctttaccatcagcaccgtgcaggccgaggacctggctgtgtacttctgccagcaagactacagcagcccttacacctttggaggcggcaccaagctggaaatcaag

SEQ ID NO: 697 - DNA, 720 bp, Artificial Sequence
  Synthetic Polynucloetide
caggttcagctgcaagagtctggccctggcctggtcaagcctagccaaacactgagcctgacctgtaccgtgtctggcggcagcatcaacaacaacaattactactggacctggatcagacagcaccccggcaaaggactggaatggatcggctacatctactacagcggcagcaccttctacaaccccagcctgaagtccagagtgaccatcagcgtggacaccagcaagacccagttctccctgaagctgagcagcgtgacagccgccgatacagccgtgtactactgcgccagagaagataccatgaccggcctggatgtgtggggccagggaacaacagtgacagtgtctagcggcggaggcggaagtggaggcggaggatctggcggcggaggctctgacattcagatgacacagagccctagcagcctgagcgcctctgtgggagacagagtgacaattacctgtcgggccagccagtctatcaacaactacctgaactggtatcagcagaagcccggcaaggcccctacactgctgatctatgccgccagctctctccagagcggagtgcctagcagattcagcggaagcagaagcggcaccgacttcaccctgacaatatccagcctccagcctgaggacttcgccgcctacttttgccagcagacctacagcaaccccacctttggccagggcaccaaggtggaagtgaag

SEQ ID NO: 698 - DNA, 735 bp, Artificial Sequence
  Synthetic Polynucloetide
agctacgagctgacacagcctccaagcgtgtccgtgtctcctggacagacagccagcatcacctgtagcggcgataagctgggcgataagtacgccagctggtatcagcagaagcccggccagtctcctgtgctggtcatctaccaggacaacagaaggcccagcggcatccccgagagattcagcggcagcaatagcggcaataccgccacactgaccatcagcggcacccaggctatggacgaggccgactactattgccaggcttgggacagcgacacctacgtgttcggcaccggcaccaaagtgacagtgcttggacaaggcggaggcggaagtggaggcggaggatctggcggcggaggctctgaagttcagctggttcagagcggagccgaagtgaagaaacctggggcctctgtgaaggtgtcctgcaaggcttccggcgataccttcaagcggtactacgtgcactgggtccgacaggctccaggacaaggactggaatggatgggcatcatcaaccccagcggcgtgtccacaacatacgcccagaaattccagggcagagtgaccatgaccagagacaccagcacctccaccgtgtacatggaactgagcagcctgagaagcgaggacaccgccgtgtactactgtgctgaagtgcgcggcagcggcttcaactacttcggcatggatgtgtggggccagggcacactggttaccgtttcttct

SEQ ID NO: 699 - DNA, 732 bp, Artificial Sequence
  Synthetic Polynucloetide
gaggttcagctgcttgagtctggcggaggactggttcaacctggcggaagcctgagactgtcttgtgccgccagcggcttcacctttagcagctacgccatgagctgggtccgacaggctcctggcaaaggactggaagtggtggtgtctgccatttctggcggcggaggcagaacctactacgccgattctgtgaagggcagattcaccatcagccgggacaacagcaagaacaccctgtacctgcagatgaacagcctgagagccgaggacaccgccgtgtactactgtgccagagaagagatggccttccgggcctacagattcgacatctggggccagggaaccctggtcacagtttctagcggcggaggcggaagtggaggcggaggatctggcggcggaggctctgatattcagatgacacagagccccagcagcctgtctgcctctgtgggagacagagtgaccatcacctgtagagccagccagagcatcagcagctacctgaactggtatcagcagaagcccggcaaggcccctaaactgctgatctatgccgcctccagtctgcagagcggagtgcctagcagattttctggctctggcagcggcaccgacttcaccctgacaatatctagcctgcagcctgaggacttcgccacctactactgccagcagagctacatcacccctctgacattcggtggcggcaccaaggtggaaatcaag

SEQ ID NO: 700 - DNA, 756 bp, Artificial Sequence
  Synthetic Polynucloetide
gacatcgtgctgacacagagccctgcttctctggccgtgtctcttggacagggcgctaccatcagctgtagagccagcaagagcgtgtccaccagcggctacacctacatgcactggtatcagcagaagcccggccagcctcctaagctgctgatctacctggcctccaacctggaaagcggagtgcctgccagattttctggcagcggctctggcaccgacttcaccctgaatatccatcctgtggaagaagaggacgccgccacctactactgtcagcactctggcgaactgccacctagctttggcggaggcaccaagctggaaatcaagagagctggcggaggcggaagtggaggcggaggatctggcggcggaggctctgaagtgcagctggtggaatctggcggcgaccttgtgaaacctggcggctctctgaagctgagctgtgccgtgtccggcttcacctttagcagctacggcatgagctgggtccgacagacccctgacaagagactggaatgggtcgccacagtgtctagcggcggcacctacacatattaccccgacagcgtgaagggcagattcaccatcagccgggacaacgccaagaacaccctgtacctccagatgagcagcctgaagtccgaggacagcgccatgtactactgcgccagacaccggggcaattactacgccacctattattacgctatggactactggggccagggcaccagcgtgacagtttcttct

SEQ ID NO: 701 - DNA, 738 bp, Artificial Sequence
  Synthetic Polynucloetide
gacatccagatgacacagagccctagcagcctgtctgccagcgtgggagacagagtgaccatcacatgtagcgccagccagggcatcagaaactacctgaactggtatcagcagaaacccggcaaggtgcccaagctgctgatctactacaccagcagactgcacagcggcgtgcccagcagattttctggctctggcagcggcaccgacttcaccctgacaatatctagcctccagcctgaggacgtggcaacctactactgtcagcagtacggcaagctgccctacacattcggccagggcaccaagctggaaatcaagagaacagtggctgccggcggaggcggaagtggaggcggaggatctggcggcggaggctctgaagttcagctggttgaatcaggcggcggactggttcaacctggcggatctctgagactgagctgtgccgccagcggcttcacattttccgacgcctggatggactgggtccgacaggctcctggaaaaggactggaatgggtcggagagatccggtccaaagtgaacaaccacgaaacctactatgccgagagcgtgaagggcagattcaccatcagccgggacgacagcaagaacagcctgtacctccagatgaactccctgaaaaccgaggacaccgccgtgtactactgcgccagaaacgactacttcgactactggggccagggaaccaccgtgacagtgtctagtgcttcc

SEQ ID NO: 702 - DNA, 762 bp, Artificial Sequence
  Synthetic Polynucloetide
gaggttcagctgcaagagtctggggccgaagtgaagaaacctggcagcagcgtgaaggtgtcctgcaaggccagcggcttcaacatcaaggacacctacatgcactgggtccgacaggcccctggacaaggacttgagtggatgggcagaatcgaccccgccaacggcaacagcaaatacgtgcccaagttccagggcagagtgaccatcacagccgacgagagcacaagcaccgcctacatggaactgagcagcctgagaagcgaggacaccgccgtgtactactgtgcccctttcggctactacgtgtccgactacgccatggcctattggggccagggaaccaccgtgacagtgtctagtgcatctggcggaggcggaagtggaggcggaggatctggcggcggaggctctgacatcgtgatgacacagagccccgatagcctggccgtgtctctgggagaaagagccaccatcaactgtagagccggcgagagcgtggacatcttcggcgtgggatttctgcactggtatcagcagaagcccggccagcctcctaagctgctgatctacagagccagcaacctggaaagcggcgtgcccgatagattttctggcagcggctctggcaccgacttcaccctgacaatcagacctctccaggccgaggatgtggccgtgtattattgccagcagaccaacgaggacccctacacatttggacagggcaccaagctggaaatcaagagaacagtggccgcc

SEQ ID NO: 703 - DNA, 741 bp, Artificial Sequence
  Synthetic Polynucloetide
caagttcagctggttcagtctggggccgaagtgaagaaacctggcagcagcgtgaaggtgtcctgcaaagcaagcggcggcacctttagcagctacgccatctcttgggtccgacaggcaccaggacaaggactggaatggatgggcctgattatccccagatacggcaaggccagatacgcccagaaattccagggcagagtgaccatcaccgccgacgagtctacaagcaccgcctacatggaactgagcagcctgagaagcgaggacacagccgtgtattattgcgcccggaactggccctactactacatggatttttggggccagggaaccctggtcaccgtgtctagtgcatctggcggaggcggaagtggaggcggaggatctggcggcggaggctctgacatcgtgctgacacagtctcccgccacactgtcactgtctccaggcgaaagagccacactgagctgtagagccagccagaacatcgtgttcaacctggcctggtatcagcagaagcctggacaggctccccggctgctgatctacgatgccagcaatagagccaccggcgtgcccgccagattttctggttctggcagcggcaccgacttcaccctgaccatatctagcctggaacctgaggacttcgccgtgtactactgccagcagaaaaagtccatgcctctgaccttcggccagggcaccaaggtggaaatcaagagaacagtggctgcc

SEQ ID NO: 704 - DNA, 750 bp, Artificial Sequence
  Synthetic Polynucloetide
gaggtgcagctggttgaatctggcggcggacttgtgaagcctggcggatctctgagactgagctgtgccgccagcggcttcacctttagcaatgcctggatgagctgggtccgacaggcccctggaaaaggactggaatgggtcggacggatcaagagcaagaccgaaggcggcaccaccgattatgctgcccctgtgaagggcagattcaccatcagcagggacgacagcaagaacaccctgtacctccagatgaacagcctgaaaaccgaggacaccgccgtgtactactgcaccacaccttacgagtggtcttggtacgactactggggccagggcacactggtcacagtgtcatctgcatctggcggaggcggaagtggaggcggaggatctggcggcggaggctctcagacagtggtcacccaagagcctagcctgacagtgtctcctggcggaaccgtgacactgacatgtggcagttctaccggcgctgtgaccaccagcaattacgccaactgggtgcagcagaagccaggccaagctcctagaggactgatcggcggcacaaacaagagagcccctggcacaccagccagattttctggctctctgctcggcggaaaggccgctcttacactgtctggtgtccagcctgaggacgaggccgagtattattgcgccctgtggtacagcaacctgtgggttttcggcggaggcaccaagctgacagtgctgactgttgctgct

SEQ ID NO: 705 - DNA, 750 bp, Artificial Sequence
  Synthetic Polynucloetide
caggttcagctggttcagtctggggccgaagtgaagaaacctggggcctctgtgaaggtgtcctgcaaggcttccggctacacctttaccagctactacatgcactgggtccgacaggcccctggacaaggacttgagtggatgggcatcatcaaccctagcggcggcagcacaagctacgcccagaaattccagggcagagtgaccatgacacacgacaccagcacctccaccgtgtacatggaactgagcagcctgagaagcgaggacaccgccgtgtactactgcgccagatccttcttcaccggcttccacctggattactggggccagggaacactggtcacagtgtcatctgcatctggcggaggcggaagtggaggcggaggatctggcggcggaggctctgaaattgtgctgacacagagccccggcacactgtcactttctccaggcgaaagagccacactgagctgtagagccagccagagcgtgtccagctcttacctggcttggtatcagcagaagcccggccaggctcctagactgctgatctacggtgccagcagcagagccacaggcatccccgatagattttctggcagcggctccggcaccgacttcaccctgacaatcagcagactggaacccgaggactttgccgtgtattattgccagcagtacaccaacgagcactactacaccttcggccagggcaccaaggtggaaatcaagagaacagtggccgcc

SEQ ID NO: 706 - DNA, 768 bp, Artificial Sequence
  Synthetic Polynucloetide
gagatcgtgctgacacagtctcccgccacactgtcactgtctccaggcgaaagagccacactgagctgtagcgtgtccagcagcatcagcagcagcaacctgcactggtatcagcagaagcctggacaggcccctcggctgctgatctacggcacatctaatctggcctctggcatccccgccagattttctggctctggaagcggcaccgacttcaccctgaccataagcagcctggaacctgaggacttcgccgtgtactactgccagcagtggtccagctatccccacacatttggcggaggcaccaaggtggaaatcaagagaacagtggctgccggcggaggcggaagtggaggcggaggatctggcggcggaggctctcaggttcagctggttcagagcggagccgaagtgaagaaacctggggcctctgtgaaggtgtcctgcaaggcttccggctacacctttaccaactacctgatcgagtgggtccgacaggctccaggacaaggactggaatggatgggcctgattaaccctggcagcggcggcaccaactacaacgagaagttcaagggcagagtgaccatgaccaccgacaccagcacaagcaccgcctacatggaactgcggagcctgagaagcgacgacaccgccgtgtattattgcgccagaagaagccctctcggctcttggatctactacgcctatgacggcgtggcctattggggccagggaacactggttacagtgtcctctgccagc

SEQ ID NO: 707 - DNA, 723 bp, Artificial Sequence
  Synthetic Polynucloetide
gacatccagatgacacagagccctagcagcctgtctgccagcgtgggagacagagtgaccatcacctgtaaagccggccagaacgtgggcacaagcgtggcatggtatcagcagaagcctggcaaggcccctaagctgctgatctacagcgccagctacagatacagcggcgtgcccagcagattttctggcagcggctctggcaccgacttcaccctgacaatatccagcctccagcctgaggacttcgccacctactactgccagcagtacatcacatacccctacaccttcggccagggcaccaaggtggaaatcaagagaacagtggctgccggcggaggcggaagtggaggcggaggatctggcggcggaggctctgaagttcagctggttgaatcaggcggcggactggttcaacctggcggatctctgagactgagctgtgccgccagcggcttcaccttcagcagatactggatgagctgggtccgacaggcccctggcaaaggacttgaatgggtcgccgagatcaaccccgacagcagcaccatccagtacaccccatctctgaaggcccggttcaccctgtccgtggacagaagcaagaacaccctgtacctccagatgaactccctgagagccgaggacaccgccgtgtactattgtgccagacctgcctattggggccagggaacactggtcacagtgtctagcgcttcc

SEQ ID NO: 708 - DNA, 744 bp, Artificial Sequence
  Synthetic Polynucloetide
gacatccagatgacacagagccctagcagcctgtctgccagcgtgggagacagagtgaccatcacatgtagcgccagccaggacatcggcaactttctgaactggtatcagcagaagcccggcaaggcccctaagctgctgatctactacacctccagcctgtacagcggcgtgcccagcagattttctggcagcggctctggcaccgacttcaccctgacaatatccagcctccagccagaggacttcgccacctactactgccagcagtacagcaagctgcccctgacctttggacagggcaccaagctggaaatcaagagaacagtggctgccggcggaggcggaagtggaggcggaggatctggcggcggaggctctcaagttcagctggttcagtctggggccgaagtgaagaaacctggggcctctgtgaaggtgtcctgcaaggcttccggctacacctttaccggctacaacatccactgggtccgacaggctcccggccaaagacttgaatggatgggcgctatctaccccggcaacggcgataccagctacaagcagaaattccggggcagagtgacaattaccagagacaccagcgccagcaccgcctacatggaactgtctagcctgagaagcgaggacaccgccgtgtactattgcgccagaggcgaaacagccagagccacctttgcctattggggccagggaaccctggtcacagtgtctagtgcttcc

SEQ ID NO: 709 - DNA, 336 bp, Artificial Sequence; identical to SEQ ID NO: 225
  Synthetic Polynucloetide

SEQ ID NO: 710 - DNA, 321 bp, Artificial Sequence; identical to SEQ ID NO: 226
  Synthetic Polynucloetide

SEQ ID NO: 711 - DNA, 324 bp, Artificial Sequence; identical to SEQ ID NO: 227
  Synthetic Polynucloetide

SEQ ID NO: 712 - DNA, 324 bp, Artificial Sequence; identical to SEQ ID NO: 228
  Synthetic Polynucloetide

SEQ ID NO: 713 - DNA, 324 bp, Artificial Sequence; identical to SEQ ID NO: 229
  Synthetic Polynucloetide

SEQ ID NO: 714 - DNA, 324 bp, Artificial Sequence; identical to SEQ ID NO: 230
  Synthetic Polynucloetide

SEQ ID NO: 715 - DNA, 324 bp, Artificial Sequence; identical to SEQ ID NO: 231
  Synthetic Polynucloetide

SEQ ID NO: 716 - DNA, 336 bp, Artificial Sequence; identical to SEQ ID NO: 232
  Synthetic Polynucloetide

SEQ ID NO: 717 - DNA, 336 bp, Artificial Sequence; identical to SEQ ID NO: 233
  Synthetic Polynucloetide

SEQ ID NO: 718 - DNA, 327 bp, Artificial Sequence; identical to SEQ ID NO: 234
  Synthetic Polynucloetide

SEQ ID NO: 719 - DNA, 735 bp, Artificial Sequence
  Synthetic Polynucloetide
agctacgtgctgacacagcctccatccgtgtctgtggctccaggacagaccgccagaatcacatgcggcggcaacaacatcggcagcaagagcgtgcactggtatcagcagccacctggacaggctccagtggtggtggtgtacgacgacagcgatagacctagcggcatccccgagagattcagcggcagcaattccggcaataccgccacactgaccatcagcagagtggaagctggcgacgaggccgtgtactactgccaagtgtgggacagcagcagcgatcacgtggtgtttggcggcggaacaaagctgacagtgcttggcggaggcggaagtggaggcggaggatctggcggcggaggctctcaactccagctgcaagagtctggccctggcctggtcaagcctagcgaaacactgagcctgacctgtaccgtgtctggcggctctatcagctccagcagctatttctggggctggatcagacaacctcctggcaaaggactggaatggatcggctccatctactacagcggcatcacctactacaaccccagcctgaagtccagagtgaccatctccgtggacaccagcaagaaccagttctccctgaagctgagcagcgtgacagccgccgataccgccgtgtattattgtgccagacatgacggcgctgtggccggcctgtttgattattggggacagggcaccctggtcaccgtgtcatctgct

SEQ ID NO: 720 - DNA, 735 bp, Artificial Sequence
  Synthetic Polynucloetide
agctacgtgctgacacagcctccatccgtgtctgtggctccaggacagaccgccagaatcacatgcggcggcaacaacatcggcagcaagagcgtgcactggtatcagcagccacctggacaggctccagtggtggtggtgtacgacgacagcgatagacctagcggcatccccgagagattcagcggcagcaattccggcaataccgccacactgaccatcagcagagtggaagctggcgacgaggccgtgtactactgccaagtgtgggacagcagcagcgatcacgtggtgtttggcggcggaacaaagctgacagtgcttggcggaggcggaagtggaggcggaggatctggcggcggaggctctcaactccagctgcaagagtctggccctggcctggtcaagcctagcgaaacactgagcctgacctgtaccgtgtctggcggctctatcagctccggcagctatatctggggctggatcagacaacctcctggcaaaggactggaatggatcggctccatctactacagcggcatcacctactacaaccccagcctgaagtccagagtgaccatctccgtggacaccagcaagaaccagttctccctgaagctgagcagcgtgacagccgccgataccgccgtgtattattgtgccagacatgacggcgctgtggccggcctgtttgattattggggacagggcaccctggtcaccgtgtcatctgct

SEQ ID NO: 721 - DNA, 735 bp, Artificial Sequence
  Synthetic Polynucloetide
agctacgtgctgacacagcctccatccgtgtctgtggctccaggacagaccgccagaatcacatgcggcggcaacaacatcggcagcaagagcgtgcactggtatcagcagccacctggacaggctccagtggtggtggtgtacgacgacagcgatagacctagcggcatccccgagagattcagcggcagcaattccggcaataccgccacactgaccatcagcagagtggaagctggcgacgaggccgtgtactactgccaagtgtgggacagcagcagcgatcacgtggtgtttggcggcggaacaaagctgacagtgcttggcggaggcggaagtggaggcggaggatctggcggcggaggctctcaactccagctgcaagagtctggccctggcctggtcaagcctagcgaaacactgagcctgacctgtaccgtgtctggcggctctatcagctccggcagctatttctggggctggatcagacaacctcctggcaaaggactggaatggatcggctccatctactacagcggcatcacctactacaaccccagcctgaagtccagagtgaccatctccgtggacaccagcaagaaccagttctccctgaagctgagcagcgtgacagccgccgataccgccgtgtattattgtgccagacatgacggcgctatggccggcctgtttgattattggggacagggcaccctggtcaccgtgtcatctgct

SEQ ID NO: 722 - DNA, 735 bp, Artificial Sequence
  Synthetic Polynucloetide
agctacgtgctgacacagcctccatccgtgtctgtggctccaggacagaccgccagaatcacatgcggcggcaacaacatcggcagcaagagcgtgcactggtatcagcagccacctggacaggctccagtggtggtggtgtacgacgacagcgatagacctagcggcatccccgagagattcagcggcagcaattccggcaataccgccacactgaccatcagcagagtggaagctggcgacgaggccgtgtactactgccaagtgtgggacagcagcagcgatcacgtggtgtttggcggcggaacaaagctgacagtgcttggcggaggcggaagtggaggcggaggatctggcggcggaggctctcaactccagctgcaagagtctggccctggcctggtcaagcctagcgaaacactgagcctgacctgtaccgtgtctggcggctctatcagctccggcagctatttctggggctggatcagacaacctcctggcaaaggactggaatggatcggctccatctactacagcggcagcacctactacaaccccagcctgaagtccagagtgaccatctccgtggacaccagcaagaaccagttctccctgaagctgagcagcgtgacagccgccgataccgccgtgtattattgtgccagacatgacggcgctgtggccggcctgtttgattattggggacagggcaccctggtcaccgtgtcatctgct

SEQ ID NO: 723 - DNA, 735 bp, Artificial Sequence
  Synthetic Polynucloetide
agctacgtgctgacacagcctccatccgtgtctgtggctccaggacagaccgccagaatcacatgcggcggcaacaacatcggcagcaagagcgtgcactggtatcagcagccacctggacaggctccagtggtggtggtgtacgacgacagcgatagacctagcggcatccccgagagattcagcggcagcaattccggcaataccgccacactgaccatcagcagagtggaagctggcgacgaggccgtgtactactgccaagtgtgggacagcagcagcgatcacgtggtgtttggcggcggaacaaagctgacagtgcttggcggaggcggaagtggaggcggaggatctggcggcggaggctctcaactccagctgcaagagtctggccctggcctggtcaagcctagcgaaacactgagcctgacctgtaccgtgtctggcggctctatcagctccggcagctatttctggggctggatcagacaacctcctggcaaaggactggaatggatcggctccatctactacagcggcatcagctactacaaccccagcctgaagtccagagtgaccatctccgtggacaccagcaagaaccagttctccctgaagctgagcagcgtgacagccgccgataccgccgtgtattattgtgccagacatgacggcgctgtggccggcctgtttgattattggggacagggcaccctggtcaccgtgtcatctgct

SEQ ID NO: 724 - DNA, 735 bp, Artificial Sequence
  Synthetic Polynucloetide
agctacgtgctgacacagcctccatccgtgtctgtggctccaggacagaccgccagaatcacatgcggcggcaacaacatcggcagcaagagcgtgcactggtatcagcagccacctggacaggctccagtggtggtggtgtacgacgacagcgatagacctagcggcatccccgagagattcagcggcagcaattccggcaataccgccacactgaccatcagcagagtggaagctggcgacgaggccgtgtactactgccaagtgtgggacagcagcagcgatcacgtggtgtttggcggcggaacaaagctgacagtgcttggcggaggcggaagtggaggcggaggatctggcggcggaggctctcaactccagctgcaagagtctggccctggcctggtcaagcctagcgaaacactgagcctgacctgtaccgtgtctggcggctctatcagctccggcagctatttctggggctggatcagacaacctcctggcaaaggactggaatggatcggctccatctactacagcggcatcacctactacaaccccggcctgaagtccagagtgaccatctccgtggacaccagcaagaaccagttctccctgaagctgagcagcgtgacagccgccgataccgccgtgtattattgtgccagacatgacggcgctgtggccggcctgtttgattattggggacagggcaccctggtcaccgtgtcatctgct

SEQ ID NO: 725 - DNA, 735 bp, Artificial Sequence
  Synthetic Polynucloetide
agctacgtgctgacacagcctccatccgtgtctgtggctccaggacagaccgccagaatcacatgcggcggcaacaacatcggcagcaagagcgtgcactggtatcagcagccacctggacaggctccagtggtggtggtgtacgacgacagcgatagacctagcggcatccccgagagattcagcggcagcaattccggcaataccgccacactgaccatcagcagagtggaagctggcgacgaggccgtgtactactgccaagtgtgggacagcagcagcgatcacgtggtgtttggcggcggaacaaagctgacagtgcttggcggaggcggaagtggaggcggaggatctggcggcggaggctctcaactccagctgcaagagtctggccctggcctggtcaagcctagcgaaacactgagcctgacctgtaccgtgtctggcggctctatcagctccggcagctatttctggggctggatcagacaacctcctggcaaaggactggaatggatcggctccatctactacagcggcatcacctactacaaccccaccctgaagtccagagtgaccatctccgtggacaccagcaagaaccagttctccctgaagctgagcagcgtgacagccgccgataccgccgtgtattattgtgccagacatgacggcgctgtggccggcctgtttgattattggggacagggcaccctggtcaccgtgtcatctgct

SEQ ID NO: 726 - DNA, 735 bp, Artificial Sequence
  Synthetic Polynucloetide
agctacgtgctgacacagcctccatccgtgtctgtggctccaggacagaccgccagaatcacatgcggcggcaagaacatcggcagcaagagcgtgcactggtatcagcagccacctggacaggctccagtggtggtggtgtacgacgacagcgatagacctagcggcatccccgagagattcagcggcagcaattccggcaataccgccacactgaccatcagcagagtggaagctggcgacgaggccgtgtactactgccaagtgtgggacagcagcagcgatcacgtggtgtttggcggcggaacaaagctgacagtgcttggcggaggcggaagtggaggcggaggatctggcggcggaggctctcaactccagctgcaagagtctggccctggcctggtcaagcctagcgaaacactgagcctgacctgtaccgtgtctggcggctctatcagctccggcagctatttctggggctggatcagacaacctcctggcaaaggactggaatggatcggctccatctactacagcggcatcacctactacaaccccagcctgaagtccagagtgaccatctccgtggacaccagcaagaaccagttctccctgaagctgagcagcgtgacagccgccgataccgccgtgtattattgtgccagacatgacggcgctgtggccggcctgtttgattattggggacagggcaccctggtcaccgtgtcatctgct

SEQ ID NO: 727 - DNA, 735 bp, Artificial Sequence
  Synthetic Polynucloetide
agctacgtgctgacacagcctccatccgtgtctgtggctccaggacagaccgccagaatcacatgcggcggcaacaacctcggcagcaagagcgtgcactggtatcagcagccacctggacaggctccagtggtggtggtgtacgacgacagcgatagacctagcggcatccccgagagattcagcggcagcaattccggcaataccgccacactgaccatcagcagagtggaagctggcgacgaggccgtgtactactgccaagtgtgggacagcagcagcgatcacgtggtgtttggcggcggaacaaagctgacagtgcttggcggaggcggaagtggaggcggaggatctggcggcggaggctctcaactccagctgcaagagtctggccctggcctggtcaagcctagcgaaacactgagcctgacctgtaccgtgtctggcggctctatcagctccggcagctatttctggggctggatcagacaacctcctggcaaaggactggaatggatcggctccatctactacagcggcatcacctactacaaccccagcctgaagtccagagtgaccatctccgtggacaccagcaagaaccagttctccctgaagctgagcagcgtgacagccgccgataccgccgtgtattattgtgccagacatgacggcgctgtggccggcctgtttgattattggggacagggcaccctggtcaccgtgtcatctgct

SEQ ID NO: 728 - DNA, 735 bp, Artificial Sequence
  Synthetic Polynucloetide
agctacgtgctgacacagcctccatccgtgtctgtggctccaggacagaccgccagaatcacatgcggcggcaacaacatcggcggcaagagcgtgcactggtatcagcagccacctggacaggctccagtggtggtggtgtacgacgacagcgatagacctagcggcatccccgagagattcagcggcagcaattccggcaataccgccacactgaccatcagcagagtggaagctggcgacgaggccgtgtactactgccaagtgtgggacagcagcagcgatcacgtggtgtttggcggcggaacaaagctgacagtgcttggcggaggcggaagtggaggcggaggatctggcggcggaggctctcaactccagctgcaagagtctggccctggcctggtcaagcctagcgaaacactgagcctgacctgtaccgtgtctggcggctctatcagctccggcagctatttctggggctggatcagacaacctcctggcaaaggactggaatggatcggctccatctactacagcggcatcacctactacaaccccagcctgaagtccagagtgaccatctccgtggacaccagcaagaaccagttctccctgaagctgagcagcgtgacagccgccgataccgccgtgtattattgtgccagacatgacggcgctgtggccggcctgtttgattattggggacagggcaccctggtcaccgtgtcatctgct

SEQ ID NO: 729 - DNA, 735 bp, Artificial Sequence
  Synthetic Polynucloetide
agctacgtgctgacacagcctccatccgtgtctgtggctccaggacagaccgccagaatcacatgcggcggcaacaacatcggcagcaagaccgtgcactggtatcagcagccacctggacaggctccagtggtggtggtgtacgacgacagcgatagacctagcggcatccccgagagattcagcggcagcaattccggcaataccgccacactgaccatcagcagagtggaagctggcgacgaggccgtgtactactgccaagtgtgggacagcagcagcgatcacgtggtgtttggcggcggaacaaagctgacagtgcttggcggaggcggaagtggaggcggaggatctggcggcggaggctctcaactccagctgcaagagtctggccctggcctggtcaagcctagcgaaacactgagcctgacctgtaccgtgtctggcggctctatcagctccggcagctatttctggggctggatcagacaacctcctggcaaaggactggaatggatcggctccatctactacagcggcatcacctactacaaccccagcctgaagtccagagtgaccatctccgtggacaccagcaagaaccagttctccctgaagctgagcagcgtgacagccgccgataccgccgtgtattattgtgccagacatgacggcgctgtggccggcctgtttgattattggggacagggcaccctggtcaccgtgtcatctgct

SEQ ID NO: 730 - DNA, 735 bp, Artificial Sequence
  Synthetic Polynucloetide
agctacgtgctgacacagcctccatccgtgtctgtggctccaggacagaccgccagaatcacatgcggcggcaagaacatcggcagcaagagcgtgcactggtatcagcagccacctggacaggctccagtggtggtggtgtacgacgacagcgatagacctagcggcatccccgagagattcagcggcagcaattccggcaataccgccacactgaccatcagcagagtggaagctggcgacgaggccgtgtactactgccaagtgtgggacagcagcagcgatcacgtggtgtttggcggcggaacaaagctgacagtgcttggcggaggcggaagtggaggcggaggatctggcggcggaggctctcaactccagctgcaagagtctggccctggcctggtcaagcctagcgaaacactgagcctgacctgtaccgtgtctggcggctctatcagctccagcagctatttctggggctggatcagacaacctcctggcaaaggactggaatggatcggctccatctactacagcggcatcacctactacaaccccagcctgaagtccagagtgaccatctccgtggacaccagcaagaaccagttctccctgaagctgagcagcgtgacagccgccgataccgccgtgtattattgtgccagacatgacggcgctgtggccggcctgtttgattattggggacagggcaccctggtcaccgtgtcatctgct

SEQ ID NO: 731 - DNA, 735 bp, Artificial Sequence
  Synthetic Polynucloetide
agctacgtgctgacacagcctccatccgtgtctgtggctccaggacagaccgccagaatcacatgcggcggcaacaacctcggcagcaagagcgtgcactggtatcagcagccacctggacaggctccagtggtggtggtgtacgacgacagcgatagacctagcggcatccccgagagattcagcggcagcaattccggcaataccgccacactgaccatcagcagagtggaagctggcgacgaggccgtgtactactgccaagtgtgggacagcagcagcgatcacgtggtgtttggcggcggaacaaagctgacagtgcttggcggaggcggaagtggaggcggaggatctggcggcggaggctctcaactccagctgcaagagtctggccctggcctggtcaagcctagcgaaacactgagcctgacctgtaccgtgtctggcggctctatcagctccagcagctatttctggggctggatcagacaacctcctggcaaaggactggaatggatcggctccatctactacagcggcatcacctactacaaccccagcctgaagtccagagtgaccatctccgtggacaccagcaagaaccagttctccctgaagctgagcagcgtgacagccgccgataccgccgtgtattattgtgccagacatgacggcgctgtggccggcctgtttgattattggggacagggcaccctggtcaccgtgtcatctgct

SEQ ID NO: 732 - DNA, 735 bp, Artificial Sequence
  Synthetic Polynucloetide
agctacgtgctgacacagcctccatccgtgtctgtggctccaggacagaccgccagaatcacatgcggcggcaacaacatcggcggcaagagcgtgcactggtatcagcagccacctggacaggctccagtggtggtggtgtacgacgacagcgatagacctagcggcatccccgagagattcagcggcagcaattccggcaataccgccacactgaccatcagcagagtggaagctggcgacgaggccgtgtactactgccaagtgtgggacagcagcagcgatcacgtggtgtttggcggcggaacaaagctgacagtgcttggcggaggcggaagtggaggcggaggatctggcggcggaggctctcaactccagctgcaagagtctggccctggcctggtcaagcctagcgaaacactgagcctgacctgtaccgtgtctggcggctctatcagctccagcagctatttctggggctggatcagacaacctcctggcaaaggactggaatggatcggctccatctactacagcggcatcacctactacaaccccagcctgaagtccagagtgaccatctccgtggacaccagcaagaaccagttctccctgaagctgagcagcgtgacagccgccgataccgccgtgtattattgtgccagacatgacggcgctgtggccggcctgtttgattattggggacagggcaccctggtcaccgtgtcatctgct

SEQ ID NO: 733 - DNA, 726 bp, Artificial Sequence
  Synthetic Polynucloetide
gagatcgtgctgacacagtctcccgccacactgtcactgtctccaggcgaaagagccacactgagctgtagagccagccagagcgtgtcctcttacctggcctggtatcagcagaagcctggacaggctccccggctgctgatctacgatgccagcaatagagccacaggcatccccgccagattttctggctctggcagcggcaccgatttcaccctgaccataagcagcctggaacctgaggacttcgccgtgtactactgccagcagagaagcaactggcccctgacctttggacagggcaccaaggtggaaatcaaaggcggaggcggaagtggaggcggaggatctggcggcggaggctctcaagttcagctggttcagagcggagccgaagtgaagaaacctggcagcagcgtgaaggtgtcctgcaaagcaagcggcggcacctttagcacctacgccatccactgggttcgacaggcaccaggacaaggactggaatggatgggcagaatcatccccatcgagggcagagcctactacgcccagaaattccagggcagagtgaccatcaccgccgacgagtctacaagcaccgcctacatggaactgagcagcctgagaagcgaggataccgctgtgtactattgcgccagaggccggtacagctacagatattggttcgactactggggccagggcaccctggttacagtctcttct

SEQ ID NO: 734 - DNA, 750 bp, Artificial Sequence
  Synthetic Polynucloetide
gacatcgtgatgacacagagccctgatagcctggccgtgtctctgggagagagagccaccatcaactgcaagagcagccagagcgtgctgtactccagcaacaacaagaactacctggcctggtatcagcagaagcccggccagcctcctaagctgctgatctactgggccagcaccagagaaagcggcgtgcccgatagattttctggcagcggctctggcaccgacttcaccctgacaattagcagcctccaggccgaggatgtggccgtgtactactgccagcagtattacagcacccctctgaccttcggccagggcaccaaggtggaaatcaaaggcggaggcggaagtggaggcggaggatctggcggcggaggctctgaagttcagctggttcagagcggagccgaagtgaagaagccaggcgagagcctgaagattagctgcaaaggctccggctacagcttcaccagctactggatcggctgggtccgacagatgcctggcaaaggactggaatggatgggcatcatctaccccggcgacagcgacaccagatacagccctagctttcagggccaagtgaccatcagcgccgacaagagcatcagcacagcctacctccagtggtcctctctgaaggccagcgataccgccatgtactattgcgccagagatgtcggcagatgggctcctggcggcttcctggattattggggacagggcacactggtcaccgtgtctagt

SEQ ID NO: 735 - DNA, 723 bp, Artificial Sequence
  Synthetic Polynucloetide
gacatccagatgacacagagccctagcagcctgtctgccagcgtgggagacagagtgaccatcacctgtagagccagccagagcatcaacaagtggctgaactggtatcagcagaagcccggcaaggcccctaagctgctgatctatgccgccagctctctccagagcggagtgcctagcagattttctggcagcggctccggcaccgatttcaccctgacaatatccagcctccagcctgaggacttcgccacctactactgccagcaggactacaacttcccctacaccttcggccagggcaccaaggtggaaatcaaaagaggcggaggcggaagtggaggcggaggatctggcggcggaggctctcaagttcagctggttcagagcggcgctgaagtgaagaaacctggcagcagcgtgaaggtgtcctgcaaagcaagcggcggcacctttagcagctacggcatctcttgggtccgacaggctcctggacaaggactggaatggatgggctggatcagcgccatcttcggcacagccaattacgcccagaaattccagggccgcgtgacaatcacagccgacgagtctacaagcaccgcctacatggaactgagcagcctgagaagcgaggacaccgccgtgtactattgtgccagaggcgtggcctcctggtatctggattattggggccagggaaccctggtcaccgtgtcatct

SEQ ID NO: 736 - DNA, 723 bp, Artificial Sequence
  Synthetic Polynucloetide
cagatcgtgctgtctcagtctcctgccatcctgagtgcctctccaggcgagaaagtgaccatgacctgtagagccagcagcagcgtgtcctacatccactggttccagcagaagcctggcagcagccctaagccttggatctacgccaccagcaatctggcctctggcgtgccagtcagattttctggcagcggctctggcaccagctacagcctgacaatcagcagagtggaagccgaggatgccgccacctactactgtcagcagtggacctccaatcctcctacctttggcggaggcaccaagctggaaatcaaaggcggaggcggaagtggaggcggaggatctggcggcggaggctctcaggttcagctgcaacagcctggcgctgagcttgtgaaacctggcgcttccgtgaagatgagctgcaaggccagcggctacaccttcaccagctataacatgcactgggtcaagcagaccccaggcagaggactggaatggatcggagccatctatcccggcaacggcgacacctcctacaaccagaagttcaagggcaaagccacactgaccgccgacaagagcagcagcacagcctacatgcagctgagcagcctgaccagcgaagatagcgccgtgtactactgcgcccggtctacctattatggcggcgactggtacttcaacgtgtggggagctggcaccaccgtgacagtttct

SEQ ID NO: 737 - DNA, 723 bp, Artificial Sequence
  Synthetic Polynucloetide
gatattcagctgacccagagccacaagtttctgagcaccagcgtgggcgacagagtgtccatcacctgtaaagccagccaggacgtgtacaacgccgtggcctggtatcagcagaagcctggacagagccccaagctgctgatctacagcgccagcagcagatacacaggcgtgcccagcagattcaccggctctggatctggccccgacttcacctttaccatcagctctgtgcaggccgaggacctggccgtgtacttttgtcagcagcacttcagaacccctttcaccttcggcagcggcaccaagctggaaatcaagggcggaggcggaagtggaggcggaggatctggcggcggaggctctcaggttcagctccagcagtctggacccgagctgaagaaacctggcgagacagtgaagatcagctgcaaggccagcggctaccccttcaccaactacggcatgaactgggtcaagcaggcccctggacagggcctgaaatggatgggctggatcaataccagcaccggcgagagcaccttcgccgacgatttcaagggcagattcgacttcagcctggaaaccagcgccaacaccgcctacctccagatcaacaacctgaagtccgaggatatggctacctacttctgcgccagatgggaagtgtaccacggctacgtgccatattggggccagggcacaaccgtgacagtctcttct

SEQ ID NO: 738 - DNA, 720 bp, Artificial Sequence
  Synthetic Polynucloetide
gacatccagctgacacagagcccttctagcctgtctgccagcgtgggcgacagagtgaccatcacctgtaaagccagccaggacgtgggcacaagcgtggcatggtatcagcagaagcctggcaaggcccctaagctgctgatctactggaccagcaccagacacacaggcgtgcccagcagattttctggcagcggctctggcaccgacttcaccttcacaatatccagcctccagcctgaggacattgccacctactactgccagcagtacagcctgtaccgctctttcggccagggcaccaaggtggaaatcaaaggcggaggcggaagtggaggcggaggatctggcggcggaggctctgaagtgcagctggttgaatcaggtggcggcgttgtgcagcctggcagaagtctgagactgagctgtagcgccagcggcttcgatttcaccacctactggatgagctgggtccgacaggcccctggcaaaggactggaatggatcggcgagattcaccccgacagcagcaccatcaattacgcccctagcctgaaggacagattcaccatcagccgggacaacgccaagaacaccctgttcctccagatggactccctgaggccagaggataccggcgtgtacttttgcgccagcctgtatttcggcttcccttggtttgcctactggggccagggaacccctgtgacagttagctct

SEQ ID NO: 739 - DNA, 732 bp, Artificial Sequence
  Synthetic Polynucloetide
gacatccagctgacacagagcccttctagcctgtctgccagcgtgggcgacagagtgaccatcacctgtagcacaagcagcagcgtgtcctacatgcactggtatcagcagaagcccggcaaggcccctaagctgctgatctacagcaccagcaatctggcctctggcgtgcccagcagattttctggctctggcagcggcaccgacttcaccttcacaatatccagcctccagcctgaggacattgccacctactactgccaccagtggtctagctaccccacattcggccagggcaccaaggtggaaatcaaaggcggaggcggaagtggaggcggaggatctggcggcggaggctctggagtgcattctcaggttcagctgcaagagtctggccctggacttgtgcggcctagccaaacactgagcctgacctgtaccgtgtccggcttcacaatcagctccggctacagctggcactgggtccgacaaccacctggcagaggactggaatggatcggctacatccagtacagcggcatcaccaactacaaccccagcctgaagtcccgcgtgaccatgctggtggacacctccaagaaccagttcagcctgagactgagcagcgtgacagccgccgatacagccgtgtactactgcgccagagaggactacgactaccactggtacttcgacgtgtggggccagggaaccaccgtgacagtttcttct

SEQ ID NO: 740 - DNA, 732 bp, Artificial Sequence
  Synthetic Polynucloetide
gacatccagatgacacagagccctagcagcctgtctgccagcgtgggagacagagtgaccatcacctgtagagccagccaggacgtgaacacagccgtggcttggtatcagcagaagcctggcaaggcccctaagctgctgatctacagcgccagctttctgtacagcggcgtgcccagcagattcagcggaagcagaagcggcaccgacttcaccctgacaatatccagcctccagcctgaggacttcgccacctactactgccagcaggcttacaccacacctccaacattcggccagggcaccaaggtggaaatcaagagaacaggcggaggcggaagtggaggcggaggatctggcggcggaggctctgaagtgcagctggttgaatcaggtggcggcctggttcaacctggcggatctctgagactgagctgtgccgccagcggcttcaacatcaaggacacctacatccactgggtccgacaggcccctggcaaaggacttgaatgggtcgccagaatctaccccaccaacggctacaccagatacgccgactctgtgaagggcagattcaccatcagcgccgacaccagcaagaacaccgcctacctccagatgaactccctgagagccgaggacaccgccgtgtactactgtagcagatggggcggagccggagcctacgctatggatgtttggggccagggaaccctggtcaccgtgtcatct

SEQ ID NO: 741 - DNA, 741 bp, Artificial Sequence
  Synthetic Polynucloetide
gagatcgtgctgacacagagccctggcacactgtcactgtctccaggcgaaagagccacactgagctgtagagccagccagagcgtgtccagcgattacctggcttggtatcagcagaagcccggacaggctcccagactgctgatctacggtgcctctagcagagccacaggcatccccgatagattttctggcagcggctccggcaccgacttcaccctgacaattagcagactgcccgaggacttcgccgtgtactactgccagcagtacgtgtcctactggacctttggcggaggcaccaaggtggaaatcaaaagaacagtggctgccggcggaggcggaagtggaggcggaggatctggcggcggaggctctcaggtgcagctggttgaatctggtggcggagttgtgcagcctggcagaagcctgagactgtcttgtgccgccagcggcttcacctttagcagctatgccatgcactgggtccgacaggcccctggcaaaggacttgaatgggtcgccgtgatctcctacgacggcagcaacaagtattacgccgacagcgtgaagggcagattcaccatcagccgggacaacagcaagaacaccctgtacctccagatgaacagcctgagagccgaggacaccgccgtgtactactgtgccaaagaggccccttactacgccaaggactacatggacgtgtggggcaagggcaccaccgtgacagtttcttct

SEQ ID NO: 742 - DNA, 738 bp, Artificial Sequence
  Synthetic Polynucloetide
agctacgagctgatccagcctccttctgccgctgtgacactgggcaataccgtgtctctgacctgtgtgggagatgagctgcccaagagatacgcctactggtatcagcagaagcccgaccagagcatcgtgcgcgtgatctacgaagatagcgtgcggcctcctggcatcagcgatagattttctggcagcagcagcggcaccaccgccacactgacaattagagatgcccagaacgaggacgaggccgactactactgtcagagcacctacggcgacgacaagctgtacatctttggcggaggcaccaagctgacagtgcttggaggcggaggcggaagtggaggcggaggatctggcggcggaggctctgaagttcagctggttgaaacaggtggcggcctggtgcagcctggcaaatctctggaactgacctgcgccaccagcggcttcacctttaataccgcctggatgcactgggtccgacagagccccgataagcggctggaatggatcgccagaatcaaggacaccagcaacaactacgccaccgactacgtggaatccatgaagggcagattcaccatcagccgggacgacagcaagggctccgtgaacctccagatgaacagcctgaaagaagaggacaccgccacctactactgcaccaccgacttctacgacggcacctactattggaactactggggccagggcgtgatggtcacagtgtcatct

SEQ ID NO: 743 - DNA, 750 bp, Artificial Sequence
  Synthetic Polynucloetide
agcgtgatcgagctgacacagagccccaagttcatgagcaccagcgtgggcgacagagtgaacgtgacatacaaggccagccagaacgtgggcaccaacgtggcatggttccagcagaagcctggacagagccctaaggtgctgatctacagcgccagctacagatacagcggcgtgcccgatagattcacaggctctggcagcggcaccgacttcaccctgacaatcagcaacgtgcagagcgaggacctggccgagtatttctgccagcagtaccacacataccctctgacctttggcggaggcaccaagctggaaatcaagagaggcggaggcggaagtggaggcggaggatctggcggcggaggctctagaatggctcaggttcagctgcaacagagcggagccgaacttgctagacctggcgcttccgtgaagatgagctgtaaagccagcggctacaccttcaccacctacaccatccactgggtccgaagaaggccaggccacgaccttgagtggatcggctacatcaaccccagcagcggctgctccgactacaaccagaacttcaagggcaagaccacactgaccgccgacaagagcagcaacaccgcctacatgcagctcaacagcctgaccagcgaggacagcgccgtgtactattgtgccagaagggccgactacggcaactacgagtacacttggtttgcctactggggccagggcaccaccgtgacagtttcttct

SEQ ID NO: 744 - DNA, 723 bp, Artificial Sequence
  Synthetic Polynucloetide
gacatccagatgacacagagccctagcagcgtgtccgcctctgtgggagacagagtgaccatcacctgtagagccagccagagcgtgtccagctacctgaactggtatcagcagaagcccggcaaggcccctaagctgctgatctatgctgccagctctctgcagtctggcgtgcccagcagattttctggcagcggctctggcaccgacttcaccctgaccatatctagcctgcagcctgaggacttcgccacctactactgccagcagagctacagcaccccttggacctttggacagggcaccaagctggaaatcaagagaggcggaggcggaagtggaggcggaggatctggcggcggaggctctgaagtgcagctggttgaatcaggtggcggcctggttcagcctggcagaagtctgagactgagctgtgccgccagcggcttcaccttcgacgattacggaatgcactgggtccgacaggcccctggcaaaggacttgaatgggtgtccggcatcagctggaacagcggcagcatcggctatgccgatagcgccaagggcagattcaccatcagccgggacaacagcaagaacaccctgtacctgcagatgaacagcctgagagccgaggacaccgccgtgtactactgtgccaagaggggcaacagcaacagcttcgactattggggccagggcaccctggtcacagtctcttct

SEQ ID NO: 745 - DNA, 744 bp, Artificial Sequence
  Synthetic Polynucloetide
cagtctgctctgacccagcctagatccgtgtctggctctcctggacagagcgtgaccatcagctgtaccggcacctcttctgacgtgggcagctacaactacgtgtcctggtatcagcagagccccggcaaggcccctaagctgatgatctacgacgtgtccaacagacccagcggcgtgtccaatagattctccggcagcaagagcggcaacaccgccagcctgacaatctctggactccagtctgaggacgaggccgactactactgtaccagctacggcagctacgacatccccgtgatttttggcggaggcaccaaggtggaaatcaaaggcggaggcggaagtggaggcggaggatctggcggcggaggctctcagatgcagctggtgcagtctggggccgaagtgaagaaacctggcagcagcgtgaaggtgtcctgcaaagcaagcggcggcacctttagctcctacgccatctcttgggtccgacaggctccaggacaaggactggaatggatgggcggcatcatccccatcttcggcacagccaattacgcccagaaattccagggcagagtgacaatcaccgccgacaagagcaccagcaccgcctacatggaactgagcagcctgagaagcgacgacaccgccgtgtactactgcgccagagatgaactgtgggccaccaactactactacatggacgtgtggggcaagggcaccctggtcacagtttcttct

SEQ ID NO: 746 - DNA, 723 bp, Artificial Sequence
  Synthetic Polynucloetide
gacgtggtcatgacacagagcccttctagcctgtctgccagcgtgggcgacagagtgaccatcacctgtaaagccagccagagcgtgtccagctacctgaactggtatcagcagaagcccggcaaggcccctaagctgctgatctatgctgccagcagcctggaaacaggcgtgcccagcagattttctggcagcggctctggcaccgacttcaccctgacaatatccagcctccagcctgaggacttcgccacctactactgtcagcagagctacagcaccccttggacctttggccagggcaccaaggtggaaatcaagagaggcggaggcggaagtggaggcggaggatctggcggcggaggctctgaagttcagctggttgaatctggcggcggactcgttagacctggcggatctctgagactgagctgtgccgccagcggcttcaccttcgatgattacggcatgagctgggtccgacaggcccctggaaaaggactggaatgggtgtccggcatcagctggaatagcggctctatcggctacgccgacagcgtgaagggcagattcaccatcagccgggacaacgccaagaacagcctgtacctccagatgaactccctgagagccgaggacacagccctgtactactgtgccaagcggggcaacagcaacagcttcgattattggggccagggaaccaccgtgaccgtgtcatct

SEQ ID NO: 747 - DNA, 723 bp, Artificial Sequence
  Synthetic Polynucloetide
gacatccagatgacacagagccctagcagcgtgtccgcctctgtgggagacagagtgaccatcacctgtagagccagccagagcatcagcagctacctgaactggtatcagcagaagcccggcaaggcccctaaactgctgatctatgccgccagctctctccagagcggagtgcctagcagattttctggcagcggctccggcaccgatttcaccctgacaatatccagcctccagcctgaggacttcgccacctactactgccagcagagctacagcaccccttggacctttggacagggcaccaaggtggaaatcaagagaggcggaggcggaagtggaggcggaggatctggcggcggaggctctgaagtgcagctggttgaatcaggtggcggcctggttcagcctggcagaagtctgagactgagctgtgccgcctccggcttcaccttcgatgattacgccatgcactgggtccgacaggcccctggaaaaggactggaatgggtgtccggcatcagctggaatagcggctctatcggctacgccgattccgccaagggcagattcaccatcagccgggacaacagcaagaacaccctgtacctccagatgaactccctgagagccgaggacaccgccgtgtactactgtgccaagaggggcaacagcaacagcttcgactattggggccagggcaccctggtcacagtctcttct

SEQ ID NO: 748 - DNA, 723 bp, Artificial Sequence
  Synthetic Polynucloetide
gacacagtgctgacacagtctccagctctggctgtgtctcctggcgagagagtgaccatctcttgcaaggccagcgagagcgtgtccaccagaatgcactggtacagacagaagcccggccagcagccaaagctgctgatctacaagaccagcaacctggcctctggcgtgccagccagattttctggctctggcagcggcaccgacttcaccctgaccattgatcccgtggaagccgacgacaccgccacctacttttgtcagcagtcctggaacggccctctgacatttggaagcggcaccaagctggaaatcaagagaggcggaggcggaagtggaggcggaggatctggcggcggaggctctcaggtgcagctgaaagagtctggccctggactggtgcagcctagccaaacactgagcctgacctgtaccgtgtctggcctgtctctgaccagcaatggcgtgtcctggatcagacagcctcctggcaaaggactggaatggctgggcgtgatctggtccaatggcggcacagactacaacagcgccatcaagagccggctgagcttcagcagagacaccagcaagagccaggtgttcctgaagatgaacagcctccagaccgaggataccgccatgtacttttgcgccagacctcggtacaactccggctacttcttcgactattggggccagggcgtgatggtcaccgttagctct

SEQ ID NO: 749 - DNA, 759 bp, Artificial Sequence
  Synthetic Polynucloetide
gacctggtcatgacacagagcccttttagcctggccgtgtccgagggcgagatggtcacaatcaagtgcaagagcagccagagcctgctgagcagcagacaccagaagaactttctggcctggtacagacagaagcccggacagtctcccaagctgctgatctaccacgccagcacaagacagagcggcgtgcccgatagattcatcggctctggcagcggcaccgacttcaccctgacaatctctgatgtgcaggccgaggacctggccgactactattgtctccagcactacacaagcccctacacctttggagccggcaccaagctggaactgaaaagaggcggaggcggaagtggaggcggaggatctggcggcggaggctctcaagtgcagctgaaagagtctggccccggactggttcagcctagccaaacactgagcctgacctgtaccgtgtccggctttagcctgaccagctaccacgtgcactgggtccgacaacctccaggcaaaggactggaatggatgggcgtgatgtggagcgacggcgacaccctgtataacagcgccctgaagtcccggctgagcatcagcagagataccagcaagagccaggtgctgctccagatggatagcctccagagcgaggataccgccacctactactgtgccagactccaggtgttcggctaccccggcatcagagactacgtgatggatgcctggggacagggcgcttctgtgacagtctcttct

SEQ ID NO: 750 - DNA, 762 bp, Artificial Sequence
  Synthetic Polynucloetide
gacatccagctgactcagagccctagctttctgagcgccagcgtgggcgacagagtgaccattacatgtagagccagccaggacatcagcagctacctggcctggtatcagcagaagcctggcaacgcccctaaactgctgatctacgccgccagcctgctgcaatctggcgtgccaagcagattcagcgcctttggcagcggcaccgagttcaccctgacaatatctagcctccagccagaggacttcgccacctactactgccagcacctgaagtcttaccctctgttcaccttcggacccggcaccaaggtggacatcaaaagaggcggaggcggaagtggaggcggaggatctggcggcggaggctctgaagttcagctggttgagtctggcggcagagtcgttagacctggcggaagcctgagactgtcttgtgccgccagcggcttcacctttgacgactacggcatgagctgggtccgacagcctcctggaaagggcctcgaatttgtgtccggcctgaactggaacggcgacatcaccgcctttaccgacagcgtgaagggcagattcaccatcagccgggacaacgtgaagtccagcctgtacctccagatgaacagcctgagagccgacgacaccgccttctactactgtgccagagtgcggacctggggcgattacacaacaggcgaggaaatcatcaacagctggtacttcgacctgtggggcagaggcacactggtcacagtctcttct

SEQ ID NO: 751 - DNA, 726 bp, Artificial Sequence
  Synthetic Polynucloetide
gaactccagatgacacagagccctagcagcctgtctgccagcgtgggagacagagtggctatcacctgtagagccagccagagcatcagcagccacctgaactggtatcagcagaagcctggcaaggcccctaagctgctgatctatgccgccagctctctccagagcggagtgcctagcagattttctggcagcggctccggcaccgatttcaccctgacaatatccagcctccagcctgaggacttcgccacctactactgccagcagagctacagcaccccttacacattcggccagggcaccaagctggaaatcaaaggcggaggcggaagtggaggcggaggatctggcggcggaggctctgaagtgcagctggttgaatcaggtggcggcctggttcaacctggcggatctctgagactgagctgtgccgcctccggcttcacctttagcagctactggatgagctgggtccgacaggcccctggcaaaggacttgagtgggtcgccaacatcaagcaggacggcagcgagaagtattacgtggacagcgtgaagggcagattcaccatcagccgggacaacgccaagaacagcctgtacctgcggatgaactccctgagagccgaggataccgccgtgtactattgtgccagagcctggggctacagctcctactacttcgactattggggccagggaaccctggtcaccgtttctcca

SEQ ID NO: 752 - DNA, 714 bp, Artificial Sequence
  Synthetic Polynucloetide
gacatcgtgatgacccagagccacaagttcatgagcaccagcgtgggcgacagagtgtccatcatctgcaaggccagccaggatgtgggcacagccgtggattggtatcagcagaagcctggacagagccccaagctgctgatctactgggccagcacaagacacaccggcgtgcccgatagattcacaggctctggcagcggcaccgatttcaccctggccatcacaaacgtgcagagcgaggacctggccgactacttctgccagcagtacaacagctaccctctgacctttggagccggcaccaagctggaaatcaagagaggcggaggcggaagtggaggcggaggatctggcggcggaggctctgaagttcagctgcaacagtctggccccgagctggttaagcctggaacaagcgtgcggatctcctgcaagaccagcggctacaccttcaccgagtacaccatccactgggtcaagcagagccacggcaagagcctggaatggatcggcaacatcaaccccaacaacggcggcaccacctacaaccagaagttcgaggacaaggccacactgaccgtggacaagagcagcagcaccgcctacatggaactgagaagcctgaccagcgaggacagcgccgtgtactattgtgccgccggatggaacttcgactactggggccagggaacaaccctgaccgttagctct

SEQ ID NO: 753 - DNA, 714 bp, Artificial Sequence
  Synthetic Polynucloetide
gacatccagatgacacagagccctagcagcctgtctgccagcgtgggagacagagtgaccatcacatgcaaggccagccaggatgtgggcacagccgtggattggtatcagcagaagcctggcaaggcccctaagctgctgatctactgggccagcacaagacacacaggcgtgcccagcagattttctggcagcggctctggcaccgacttcaccctgacaatatccagcctccagcctgaggacttcgccacctactactgccagcagtacaacagctaccctctgaccttcggccagggcaccaaggtggaaatcaaaagaggcggaggcggaagtggaggcggaggatctggcggcggaggctctgaagtgcagctggttgaatcaggtggcggcctggttcaacctggcggatctctgagactgagctgtgccgccagcggctacacctttaccgagtacacaatccactgggtccgacaggcccctggcaaaggacttgagtgggtcgccaacatcaaccccaacaatggcggcaccacctacaaccagaagttcgaggacagattcaccatcagccgggacaacagcaagaacaccctgtacctccagatgaactccctgagagccgaggacaccgccgtgtactattgtgccagaggctggaacttcgactactggggccagggaacactggtcaccgttagctct

SEQ ID NO: 754 - DNA, 720 bp, Artificial Sequence
  Synthetic Polynucloetide
gacatccagatgacacagagccctagcagcctgtctgccagcgtgggagacagagtgaccatcacatgcaaggccagccaggatgtgggcacagccgtggattggtatcagcagaagcctggcaaggcccctaagctgctgatctcttgggccagcacaagacacacaggcgtgcccagcagattttctggcagcggctctggcaccgacttcaccctgacaatatccagcctccagcctgaggacttcgccacctacttttgccagcagtacaacagctaccctctgaccttcggccagggcaccaaggtggaaatcaagagaacagttggcggaggcggaagtggaggcggaggatctggcggcggaggctctcaagttcagctggttcagagcggagccgaagtgaagaaacctggcgagagcgtgaaggtgtcctgcaaagccagcggctacacctttaccgagtacaccatccactgggtccgacaggctccaggacaaggactggaatggatgggcaacatcaaccccaacaacggcggcaccacctacaaccagaaattcgaggatcgcgtgacaatcaccgccgacaagagcaccagcaccgcctacatggaactgagcagcctgagaagcgaggacaccgccgtgtactattgtgccagaggctggaacttcgactactggggccagggaaccaccgtgacagtctcttct

SEQ ID NO: 755 - DNA, 714 bp, Artificial Sequence
  Synthetic Polynucloetide
gacatccagatgacacagagccctagcagcctgtctgccagcgtgggagacagagtgaccatcacatgcaaggccagccaggatgtgggcacagccgtggattggtatcagcagaagcctggcaaggcccctaagctgctgatctactgggccagcacaagacacacaggcgtgcccagcagattttctggcagcggctctggcaccgacttcaccctgacaatatccagcctccagcctgaggacttcgccacctactactgccagcagtacaacagctaccctctgaccttcggccagggcaccaaggtggaaatcaaaagaggcggaggcggaagtggaggcggaggatctggcggcggaggctctgaagttcagctgcaacagtctggccccgagctggttaagcctggaacaagcgtgcggatctcctgcaagaccagcggctacaccttcaccgagtacaccatccactgggtcaagcagagccacggcaagagcctggaatggatcggcaacatcaaccccaacaacggcggcaccacctacaaccagaagttcgaggacaaggccacactgaccgtggacaagagcagcagcaccgcctacatggaactgagaagcctgaccagcgaggacagcgccgtgtactattgtgccgccggatggaacttcgactactggggccagggaacaaccctgaccgttagctct

SEQ ID NO: 756 - DNA, 714 bp, Artificial Sequence
  Synthetic Polynucloetide
gacatcgtgatgacccagagccacaagttcatgagcaccagcgtgggcgacagagtgtccatcatctgcaaggccagccaggatgtgggcacagccgtggattggtatcagcagaagcctggacagagccccaagctgctgatctactgggccagcacaagacacaccggcgtgcccgatagattcacaggctctggcagcggcaccgatttcaccctggccatcacaaacgtgcagagcgaggacctggccgactacttctgccagcagtacaacagctaccctctgacctttggagccggcaccaagctggaaatcaagagaggcggaggcggaagtggaggcggaggatctggcggcggaggctctgaagtgcagctggttgaatcaggtggcggcctggttcaacctggcggatctctgagactgagctgtgccgccagcggctacacctttaccgagtacacaatccactgggtccgacaggcccctggcaaaggacttgagtgggtcgccaacatcaaccccaacaatggcggcaccacctacaaccagaagttcgaggacagattcaccatcagccgggacaacagcaagaacaccctgtacctccagatgaactccctgagagccgaggacaccgccgtgtactattgtgccagaggctggaacttcgactactggggccagggaacactggtcaccgttagctct

SEQ ID NO: 757 - DNA, 732 bp, Artificial Sequence
  Synthetic Polynucloetide
gagatcgtgctgacacagtctcccgccacactgtcactgtctccaggcgaaagagccacactgagctgtagcgccaccagcagcgtgtcctacatccactggtatcagcagaagcccggacaggcccctagactgctgatctacagcaccagcaatctggcctctggcatccccgccagattttctggctctggaagcggcaccgacttcaccctgacaatcggcagactggaacccgaggacttcgccgtgtactactgccagcagagaagcagcagccccttcacctttggacagggcaccaaggtggaaatcaagagaggcggaggcggaagtggaggcggaggatctggcggcggaggctctgaagtgcagctggttgagtctggcggcggactggttaagcctgagggaagcctgagactgtcttgtgccgccagcggcttcaccttcagcagatacggcatgagctgggtccgacaggctcctggcaaaggactggaatgggtgtccacaatttccggcggaggcacctacatctactaccccgatagcgtgaagggcagattcaccatctccagagacaacgccaagaacagcctgttcctccagatgaactccctgagagccgaggacacagccgtgtattattgcgctcgggacaactacggcagaaactacgactacggcatggactactggggccagggcacactggttaccgttagctct

SEQ ID NO: 758 - DNA, 729 bp, Artificial Sequence
  Synthetic Polynucloetide
cagatcgtgctgacacagagccctgccatcatgagtgcctctccaggcgaggaagtgaccctgacctgtagcgccaccagcagcgtgtcctacatccactggtttcagcagaggcccggcacaagccctaagctgtggatctacagcaccagcaatctggcctctggcgtgccagtgcggtttagcggatctggctacggcaccagctacagcctgaccatcagcagaatggaagccgaggatgccgccacctactactgccagcagagaagcagcagccccttcacatttggcagcggcaccaagctggaaatcaaaggcggaggcggaagtggaggcggaggatctggcggcggaggctctgaagtgaaggtggtggaatctggcggcgacctggttaagcctggcggatctctgaagctgagctgtgtggtgtccggcttcaccttcagcagatacggcatgagctgggtccgacagacccctggcaaaagactggaatgggtcgccacaatttccggcggaggcacctacatctactaccccgatagcgtgaagggcagattcaccatctccagagacaacgccaagaacaccctgtacctccagatgagcagcctgaagtctgaggacaccgccatgtaccactgcaccagggacaactacggcagaaactacgactacggcatggactactggggccagggcacaagcgtgacagtctcttct

SEQ ID NO: 759 - DNA, 747 bp, Artificial Sequence
  Synthetic Polynucloetide
gacatcgtgctgacacagagccctgcttctctggccgtttctcctggacagagggccaccatcacatgcagagccagcaagagcgtgtccaccagcggctacagctacatgcactggtatcagcagaagcccggccagcctcctaagctgctgatctacctggcctccaacctggaaagcggagtgcctgccagattttctggcagcggctctggcaccgacttcaccctgacaatcaaccccgtggaagccaacgacaccgccaactactactgccagcacagcagagagctgcccttcacatttggcggaggcaccaaggtggaaatcaagagaacaggcggaggcggaagtggaggcggaggatctggcggcggaggctctgaagtgcagctggttgagtctggcggcggacttgtgaaacctggcggaagcctgagactgagctgtgccgcttccggctttacctttagcggctacgccatgagctgggtccgacaggctcctggcaaaggactggaatgggtgtccacaatcagcagcggcggcacctacatctactaccccgatagcgtgaaaggccggttcaccatcagccgggacaacgccaagaacagcctgtacctccagatgaactccctgagagccgaggacaccgccgtgtactattgtgccagactcggcggcgacaattactacgagtatttcgacgtgtggggcaagggcaccaccgtgacagtttcttct

SEQ ID NO: 760 - DNA, 720 bp, Artificial Sequence
  Synthetic Polynucloetide
gacatccagatgacacagagccctagcagcctgtccgtgtccgtgggagacagagtgaccatcacatgcaaggccagccagaacgtgcggacagtggtggcttggtatcagcagaagcctggactggcccctaagacactgatctacctggcctccaacagacacaccggcgtgccaagcagattttctggcagcggctctggcaccgacttcaccttcacaatatccagcctccagcctgaggacattgccacctacttttgccagcagcactggtcttaccctctgacctttggacagggcaccaaggtggaagtgaagagaggcggaggcggaagtggaggcggaggatctggcggcggaggctctgaagttcagctgcttgaatctggcggcggactggttcaacctggcggatctctgagactgagctgtgccgcctctggcttcgccttcagcacctacgatatgagctgggtccgacaggcccctggcaaaggacttgaatgggtcgccacaatcagcagcggcggcagctacacctactacctggatagcgtgaagggcagattcaccatcagccgggacagcagcaagaacaccctgtacctccagatgaactccctccaggccgaggactccgccatctactattgtgcccctaccaccgtggtgcctttcgcctattggggacagggaaccctggtcaccgttagctct

SEQ ID NO: 761 - DNA, 732 bp, Artificial Sequence
  Synthetic Polynucloetide
gacattcagatgacacagagccctagcagcctgagcgcctctgtgggagacagagtgaccatcacatgcaagagcagccagagcctgctgtactccagcaatcagaagaactacctggcctggttccagcagaagcctggcaaggctcctaagctgctgatctactgggccagcaccagagaaagcggcgtgccaagcagattttctggcagcggctctggcaccgacttcaccctgacaatatccagcctccagcctgaggacttcgccacctacttttgccaccagtacctgagcagctacacattcggacagggcaccaaggtggaaatcaagcggggcggaggcggaagtggaggcggaggatctggcggcggaggctctgaggtgcagctggttgaatctggcggaggactggttcagcctggcggatctctgagactgtcttgtgccgccagcggctacaccttcaccagctattggctgcactgggtccgacaggcccctggcaaaggacttgagtgggtcggatatatcaggcccagcaccggctacacagagtacaaccagaagttcaaggaccgcttcaccatcagcgccgacaccagcaagaataccgcctacctccagatgaacagcctgagagccgaggacaccgccgtgtactactgtgccagatccagatggctgctggactattggggccagggcacactggttacagttagctct

SEQ ID NO: 762 - DNA, 729 bp, Artificial Sequence
  Synthetic Polynucloetide
gacattcagatgacacagagccctagcagcctgagcgcctctgtgggagacagagtgaccatcacatgcaagagcagccagagcgtgctgtactccagcaatcagaagaactacctggcctggttccagcagaagcctggcaaggctcctaagctgctgatctactgggccagcaccagagaaagcggcgtgccaagcagattttctggcagcggctctggcaccgacttcaccctgacaatatccagcctccagcctgaggacttcgccacctacttttgccaccagtacctgagcagctacacattcggacagggcaccaaggtggaaatcaagcggggcggaggcggaagtggaggcggaggatctggcggcggaggctctgaggtgcagctggttgaatctggcggaggactggttcagcctggcggatctctgagactgtcttgtgccgccagcggcttcaccttcaccacctattggatgcactgggtccgacaggcccctggcaaaggacttgagtgggtcggatatatcaggcccagcaccggctacacagagtacaaccagaagttcaaggaccgcttcaccatcagcgccgacaccagcaagaataccgcctacctccagatgaacagcctgagagccgaggacaccgccgtgtactactgtgccagatccagatggctgctggactattggggccagggcacactggttacagtttct

SEQ ID NO: 763 - DNA, 729 bp, Artificial Sequence
  Synthetic Polynucloetide
gaggtgcagctggttgaatctggcggaggactggttcagcctggcggatctctgagactgtcttgtgccgccagcggctacaccttcaccacctattggatgcactgggtccgacaggcccctggcaaaggacttgagtgggtcggatatatcaggcccagcaccggctacacagagtacaaccagaagttcaaggaccgcttcaccatcagcgccgacaccagcaagaataccgcctacctccagatgaacagcctgagagccgaggacaccgccgtgtactactgtgccagatccagatggctgctggactattggggccagggcacactggttacagtttctggcggaggcggaagtggaggcggaggatctggcggcggaggctctgacattcagatgacacagagccctagcagcctgagcgcctctgtgggagacagagtgaccatcacatgcaagagcagccagagcctgctgtactccagcaatcagaagaactacctggcctggttccagcagaagcctggcaaggctcctaagctgctgatctactgggccagcaccagagaaagcggcgtgccaagcagattttctggcagcggctctggcaccgacttcaccctgacaatatccagcctccagcctgaggacttcgccacctacttttgccaccagtacctgagcagctacacattcggacagggcaccaaggtggaaatcaagcgg

SEQ ID NO: 764 - DNA, 720 bp, Artificial Sequence
  Synthetic Polynucloetide
gacatccagatgacacagagccctagcagcctgtctgccagcgtgggagacagagtgaccatcacctgtagagccagccaggacatcagcaactacctgaactggtatcagcagaagcccggcaaggcccctaagctgctgatctactacaccagcagactgcacagcggcgtgcccagcagattttctggctctggcagcggcaccgacttcaccctgacaatatctagcctccagcctgaggacttcgccacctactattgccagcagggcaacaccctgccttacacatttggacagggcaccaaggtggaaatcaagagaggcggaggcggaagtggaggcggaggatctggcggcggaggctctgaagtgcagctggttgaatcaggtggcggcctggttcaacctggcggatctctgagactgagctgtgccgccagcggctacaccttcagcgactactttatgagctgggtccgacaggcccctggcaaaggacttgaatgggtcgccaccatcagcaatggcggcacctacacttactaccccgacagcgtgaagggcagattcaccatctccagagacaacagcaagaacaccctgtacctccagatgaactccctgagagccgaggacaccgccgtgtactactgcgccagattcgacggctacatcttcgactattggggccagggcaccctggtcacagtctcttct

SEQ ID NO: 765 - DNA, 720 bp, Artificial Sequence
  Synthetic Polynucloetide
gacatccagatgacacagagccctagcagcctgtctgccagcgtgggagacagagtgaccatcacctgtagagccagccaggacatcagcagctacctgaactggtatcagcagaagcccggcaaggcccctaagctgctgatctactacaccagcagactgcacagcggcgtgcccagcagattttctggctctggcagcggcaccgacttcaccctgacaatatctagcctccagcctgaggacttcgccacctactattgccagcagggcaacaccctgccttacacatttggacagggcaccaaggtggaaatcaagagaggcggaggcggaagtggaggcggaggatctggcggcggaggctctgaagtgcagctggttgaatcaggtggcggcctggttcaacctggcggatctctgagactgagctgtgccgccagcggcttcaccttcagcgactactttatgagctgggtccgacaggcccctggcaaaggacttgaatgggtcgccaccatcagcaatggcggcacctacacttactaccccgacagcgtgaagggcagattcaccatctccagagacaacagcaagaacaccctgtacctccagatgaactccctgagagccgaggacaccgccgtgtactactgcgccagattcgacggctacatcttcgactattggggccagggcaccctggtcacagtctcttct

SEQ ID NO: 766 - DNA, 720 bp, Artificial Sequence
  Synthetic Polynucloetide
gacatccagatgacacagagccctagcagcctgtctgccagcgtgggagacagagtgaccatcacctgtagagccagccaggacatcagcaactacctgaactggtatcagcagaagcccggcaaggcccctaagctgctgatctactacaccagcagactgcacagcggcgtgcccagcagattttctggctctggcagcggcaccgacttcaccctgacaatatctagcctccagcctgaggacttcgccacctactattgccagcagggcaacaccctgccttggacatttggacagggcaccaaggtggaaatcaagagaggcggaggcggaagtggaggcggaggatctggcggcggaggctctgaagtgcagctggttgaatcaggtggcggcctggttcaacctggcggatctctgagactgagctgtgccgccagcggcttcaccttcagcgactactttatgagctgggtccgacaggcccctggcaaaggacttgaatgggtcgccaccatcagcaatggcggcacctacacttactaccccgacagcgtgaagggcagattcaccatctccagagacaacagcaagaacaccctgtacctccagatgaactccctgagagccgaggacaccgccgtgtactactgcgccagattcgacggctacatcttcgactattggggccagggcaccctggtcacagtctcttct

SEQ ID NO: 767 - DNA, 735 bp, Artificial Sequence
  Synthetic Polynucloetide
agctacgtgctgacacagcctccatccgtgtctgtggctccaggacagaccgccagaatcacatgcggcggcaacaacatcggcagcaagaccgtgcactggtatcagcagccacctggacaggctccagtggtggtggtgtacgacgacagcgatagacctagcggcatccccgagagattcagcggcagcaattccggcaataccgccacactgaccatcagcagagtggaagctggcgacgaggccgtgtactactgccaagtgtgggacagcagcagcgatcacgtggtgtttggcggcggaacaaagctgacagtgcttggcggaggcggaagtggaggcggaggatctggcggcggaggctctcaactccagctgcaagagtctggccctggcctggtcaagcctagcgaaacactgagcctgacctgtaccgtgtctggcggctctatcagctccagcagctatttctggggctggatcagacaacctcctggcaaaggactggaatggatcggctccatctactacagcggcatcacctactacaaccccagcctgaagtccagagtgaccatctccgtggacaccagcaagaaccagttctccctgaagctgagcagcgtgacagccgccgataccgccgtgtattattgtgccagacatgacggcgctgtggccggcctgtttgattattggggacagggcaccctggtcaccgtgtcatctgct

SEQ ID NO: 768 - DNA, 735 bp, Artificial Sequence
  Synthetic Polynucloetide
agctacgtgctgacacagcctccatccgtgtctgtggctccaggacagaccgccagaatcacatgcggcggcaagaacatcggcagcaagagcgtgcactggtatcagcagccacctggacaggctccagtggtggtggtgtacgacgacagcgatagacctagcggcatccccgagagattcagcggcagcaattccggcaataccgccacactgaccatcagcagagtggaagctggcgacgaggccgtgtactactgccaagtgtgggacagcagcagcgatcacgtggtgtttggcggcggaacaaagctgacagtgcttggcggaggcggaagtggaggcggaggatctggcggcggaggctctcaactccagctgcaagagtctggccctggcctggtcaagcctagcgaaacactgagcctgacctgtaccgtgtctggcggctctatcagctccggcagctatatctggggctggatcagacaacctcctggcaaaggactggaatggatcggctccatctactacagcggcatcacctactacaaccccagcctgaagtccagagtgaccatctccgtggacaccagcaagaaccagttctccctgaagctgagcagcgtgacagccgccgataccgccgtgtattattgtgccagacatgacggcgctgtggccggcctgtttgattattggggacagggcaccctggtcaccgtgtcatctgct

SEQ ID NO: 769 - DNA, 735 bp, Artificial Sequence
  Synthetic Polynucloetide
agctacgtgctgacacagcctccatccgtgtctgtggctccaggacagaccgccagaatcacatgcggcggcaagaacatcggcagcaagagcgtgcactggtatcagcagccacctggacaggctccagtggtggtggtgtacgacgacagcgatagacctagcggcatccccgagagattcagcggcagcaattccggcaataccgccacactgaccatcagcagagtggaagctggcgacgaggccgtgtactactgccaagtgtgggacagcagcagcgatcacgtggtgtttggcggcggaacaaagctgacagtgcttggcggaggcggaagtggaggcggaggatctggcggcggaggctctcaactccagctgcaagagtctggccctggcctggtcaagcctagcgaaacactgagcctgacctgtaccgtgtctggcggctctatcagctccggcagctatttctggggctggatcagacaacctcctggcaaaggactggaatggatcggctccatctactacagcggcatcacctactacaaccccagcctgaagtccagagtgaccatctccgtggacaccagcaagaaccagttctccctgaagctgagcagcgtgacagccgccgataccgccgtgtattattgtgccagacatgacggcgctatggccggcctgtttgattattggggacagggcaccctggtcaccgtgtcatctgct

SEQ ID NO: 770 - DNA, 735 bp, Artificial Sequence
  Synthetic Polynucloetide
agctacgtgctgacacagcctccatccgtgtctgtggctccaggacagaccgccagaatcacatgcggcggcaagaacatcggcagcaagagcgtgcactggtatcagcagccacctggacaggctccagtggtggtggtgtacgacgacagcgatagacctagcggcatccccgagagattcagcggcagcaattccggcaataccgccacactgaccatcagcagagtggaagctggcgacgaggccgtgtactactgccaagtgtgggacagcagcagcgatcacgtggtgtttggcggcggaacaaagctgacagtgcttggcggaggcggaagtggaggcggaggatctggcggcggaggctctcaactccagctgcaagagtctggccctggcctggtcaagcctagcgaaacactgagcctgacctgtaccgtgtctggcggctctatcagctccggcagctatttctggggctggatcagacaacctcctggcaaaggactggaatggatcggctccatctactacagcggcagcacctactacaaccccagcctgaagtccagagtgaccatctccgtggacaccagcaagaaccagttctccctgaagctgagcagcgtgacagccgccgataccgccgtgtattattgtgccagacatgacggcgctgtggccggcctgtttgattattggggacagggcaccctggtcaccgtgtcatctgct

SEQ ID NO: 771 - DNA, 735 bp, Artificial Sequence
  Synthetic Polynucloetide
agctacgtgctgacacagcctccatccgtgtctgtggctccaggacagaccgccagaatcacatgcggcggcaagaacatcggcagcaagagcgtgcactggtatcagcagccacctggacaggctccagtggtggtggtgtacgacgacagcgatagacctagcggcatccccgagagattcagcggcagcaattccggcaataccgccacactgaccatcagcagagtggaagctggcgacgaggccgtgtactactgccaagtgtgggacagcagcagcgatcacgtggtgtttggcggcggaacaaagctgacagtgcttggcggaggcggaagtggaggcggaggatctggcggcggaggctctcaactccagctgcaagagtctggccctggcctggtcaagcctagcgaaacactgagcctgacctgtaccgtgtctggcggctctatcagctccggcagctatttctggggctggatcagacaacctcctggcaaaggactggaatggatcggctccatctactacagcggcatcagctactacaaccccagcctgaagtccagagtgaccatctccgtggacaccagcaagaaccagttctccctgaagctgagcagcgtgacagccgccgataccgccgtgtattattgtgccagacatgacggcgctgtggccggcctgtttgattattggggacagggcaccctggtcaccgtgtcatctgct

SEQ ID NO: 772 - DNA, 735 bp, Artificial Sequence
  Synthetic Polynucloetide
agctacgtgctgacacagcctccatccgtgtctgtggctccaggacagaccgccagaatcacatgcggcggcaagaacatcggcagcaagagcgtgcactggtatcagcagccacctggacaggctccagtggtggtggtgtacgacgacagcgatagacctagcggcatccccgagagattcagcggcagcaattccggcaataccgccacactgaccatcagcagagtggaagctggcgacgaggccgtgtactactgccaagtgtgggacagcagcagcgatcacgtggtgtttggcggcggaacaaagctgacagtgcttggcggaggcggaagtggaggcggaggatctggcggcggaggctctcaactccagctgcaagagtctggccctggcctggtcaagcctagcgaaacactgagcctgacctgtaccgtgtctggcggctctatcagctccggcagctatttctggggctggatcagacaacctcctggcaaaggactggaatggatcggctccatctactacagcggcatcacctactacaaccccggcctgaagtccagagtgaccatctccgtggacaccagcaagaaccagttctccctgaagctgagcagcgtgacagccgccgataccgccgtgtattattgtgccagacatgacggcgctgtggccggcctgtttgattattggggacagggcaccctggtcaccgtgtcatctgct

SEQ ID NO: 773 - DNA, 735 bp, Artificial Sequence
  Synthetic Polynucloetide
agctacgtgctgacacagcctccatccgtgtctgtggctccaggacagaccgccagaatcacatgcggcggcaagaacatcggcagcaagagcgtgcactggtatcagcagccacctggacaggctccagtggtggtggtgtacgacgacagcgatagacctagcggcatccccgagagattcagcggcagcaattccggcaataccgccacactgaccatcagcagagtggaagctggcgacgaggccgtgtactactgccaagtgtgggacagcagcagcgatcacgtggtgtttggcggcggaacaaagctgacagtgcttggcggaggcggaagtggaggcggaggatctggcggcggaggctctcaactccagctgcaagagtctggccctggcctggtcaagcctagcgaaacactgagcctgacctgtaccgtgtctggcggctctatcagctccggcagctatttctggggctggatcagacaacctcctggcaaaggactggaatggatcggctccatctactacagcggcatcacctactacaaccccaccctgaagtccagagtgaccatctccgtggacaccagcaagaaccagttctccctgaagctgagcagcgtgacagccgccgataccgccgtgtattattgtgccagacatgacggcgctgtggccggcctgtttgattattggggacagggcaccctggtcaccgtgtcatctgct

SEQ ID NO: 774 - DNA, 735 bp, Artificial Sequence; identical to SEQ ID NO: 731
  Synthetic Polynucloetide

SEQ ID NO: 775 - DNA, 735 bp, Artificial Sequence
  Synthetic Polynucloetide
agctacgtgctgacacagcctccatccgtgtctgtggctccaggacagaccgccagaatcacatgcggcggcaacaacctcggcagcaagagcgtgcactggtatcagcagccacctggacaggctccagtggtggtggtgtacgacgacagcgatagacctagcggcatccccgagagattcagcggcagcaattccggcaataccgccacactgaccatcagcagagtggaagctggcgacgaggccgtgtactactgccaagtgtgggacagcagcagcgatcacgtggtgtttggcggcggaacaaagctgacagtgcttggcggaggcggaagtggaggcggaggatctggcggcggaggctctcaactccagctgcaagagtctggccctggcctggtcaagcctagcgaaacactgagcctgacctgtaccgtgtctggcggctctatcagctccggcagctatatctggggctggatcagacaacctcctggcaaaggactggaatggatcggctccatctactacagcggcatcacctactacaaccccagcctgaagtccagagtgaccatctccgtggacaccagcaagaaccagttctccctgaagctgagcagcgtgacagccgccgataccgccgtgtattattgtgccagacatgacggcgctgtggccggcctgtttgattattggggacagggcaccctggtcaccgtgtcatctgct

SEQ ID NO: 776 - DNA, 735 bp, Artificial Sequence
  Synthetic Polynucloetide
agctacgtgctgacacagcctccatccgtgtctgtggctccaggacagaccgccagaatcacatgcggcggcaacaacctcggcagcaagagcgtgcactggtatcagcagccacctggacaggctccagtggtggtggtgtacgacgacagcgatagacctagcggcatccccgagagattcagcggcagcaattccggcaataccgccacactgaccatcagcagagtggaagctggcgacgaggccgtgtactactgccaagtgtgggacagcagcagcgatcacgtggtgtttggcggcggaacaaagctgacagtgcttggcggaggcggaagtggaggcggaggatctggcggcggaggctctcaactccagctgcaagagtctggccctggcctggtcaagcctagcgaaacactgagcctgacctgtaccgtgtctggcggctctatcagctccggcagctatttctggggctggatcagacaacctcctggcaaaggactggaatggatcggctccatctactacagcggcatcacctactacaaccccagcctgaagtccagagtgaccatctccgtggacaccagcaagaaccagttctccctgaagctgagcagcgtgacagccgccgataccgccgtgtattattgtgccagacatgacggcgctatggccggcctgtttgattattggggacagggcaccctggtcaccgtgtcatctgct

SEQ ID NO: 777 - DNA, 735 bp, Artificial Sequence
  Synthetic Polynucloetide
agctacgtgctgacacagcctccatccgtgtctgtggctccaggacagaccgccagaatcacatgcggcggcaacaacctcggcagcaagagcgtgcactggtatcagcagccacctggacaggctccagtggtggtggtgtacgacgacagcgatagacctagcggcatccccgagagattcagcggcagcaattccggcaataccgccacactgaccatcagcagagtggaagctggcgacgaggccgtgtactactgccaagtgtgggacagcagcagcgatcacgtggtgtttggcggcggaacaaagctgacagtgcttggcggaggcggaagtggaggcggaggatctggcggcggaggctctcaactccagctgcaagagtctggccctggcctggtcaagcctagcgaaacactgagcctgacctgtaccgtgtctggcggctctatcagctccggcagctatttctggggctggatcagacaacctcctggcaaaggactggaatggatcggctccatctactacagcggcagcacctactacaaccccagcctgaagtccagagtgaccatctccgtggacaccagcaagaaccagttctccctgaagctgagcagcgtgacagccgccgataccgccgtgtattattgtgccagacatgacggcgctgtggccggcctgtttgattattggggacagggcaccctggtcaccgtgtcatctgct

SEQ ID NO: 778 - DNA, 735 bp, Artificial Sequence
  Synthetic Polynucloetide
agctacgtgctgacacagcctccatccgtgtctgtggctccaggacagaccgccagaatcacatgcggcggcaacaacctcggcagcaagagcgtgcactggtatcagcagccacctggacaggctccagtggtggtggtgtacgacgacagcgatagacctagcggcatccccgagagattcagcggcagcaattccggcaataccgccacactgaccatcagcagagtggaagctggcgacgaggccgtgtactactgccaagtgtgggacagcagcagcgatcacgtggtgtttggcggcggaacaaagctgacagtgcttggcggaggcggaagtggaggcggaggatctggcggcggaggctctcaactccagctgcaagagtctggccctggcctggtcaagcctagcgaaacactgagcctgacctgtaccgtgtctggcggctctatcagctccggcagctatttctggggctggatcagacaacctcctggcaaaggactggaatggatcggctccatctactacagcggcatcagctactacaaccccagcctgaagtccagagtgaccatctccgtggacaccagcaagaaccagttctccctgaagctgagcagcgtgacagccgccgataccgccgtgtattattgtgccagacatgacggcgctgtggccggcctgtttgattattggggacagggcaccctggtcaccgtgtcatctgct

SEQ ID NO: 779 - DNA, 735 bp, Artificial Sequence
  Synthetic Polynucloetide
agctacgtgctgacacagcctccatccgtgtctgtggctccaggacagaccgccagaatcacatgcggcggcaacaacctcggcagcaagagcgtgcactggtatcagcagccacctggacaggctccagtggtggtggtgtacgacgacagcgatagacctagcggcatccccgagagattcagcggcagcaattccggcaataccgccacactgaccatcagcagagtggaagctggcgacgaggccgtgtactactgccaagtgtgggacagcagcagcgatcacgtggtgtttggcggcggaacaaagctgacagtgcttggcggaggcggaagtggaggcggaggatctggcggcggaggctctcaactccagctgcaagagtctggccctggcctggtcaagcctagcgaaacactgagcctgacctgtaccgtgtctggcggctctatcagctccggcagctatttctggggctggatcagacaacctcctggcaaaggactggaatggatcggctccatctactacagcggcatcacctactacaaccccggcctgaagtccagagtgaccatctccgtggacaccagcaagaaccagttctccctgaagctgagcagcgtgacagccgccgataccgccgtgtattattgtgccagacatgacggcgctgtggccggcctgtttgattattggggacagggcaccctggtcaccgtgtcatctgct

SEQ ID NO: 780 - DNA, 735 bp, Artificial Sequence
  Synthetic Polynucloetide
agctacgtgctgacacagcctccatccgtgtctgtggctccaggacagaccgccagaatcacatgcggcggcaacaacctcggcagcaagagcgtgcactggtatcagcagccacctggacaggctccagtggtggtggtgtacgacgacagcgatagacctagcggcatccccgagagattcagcggcagcaattccggcaataccgccacactgaccatcagcagagtggaagctggcgacgaggccgtgtactactgccaagtgtgggacagcagcagcgatcacgtggtgtttggcggcggaacaaagctgacagtgcttggcggaggcggaagtggaggcggaggatctggcggcggaggctctcaactccagctgcaagagtctggccctggcctggtcaagcctagcgaaacactgagcctgacctgtaccgtgtctggcggctctatcagctccggcagctatttctggggctggatcagacaacctcctggcaaaggactggaatggatcggctccatctactacagcggcatcacctactacaaccccaccctgaagtccagagtgaccatctccgtggacaccagcaagaaccagttctccctgaagctgagcagcgtgacagccgccgataccgccgtgtattattgtgccagacatgacggcgctgtggccggcctgtttgattattggggacagggcaccctggtcaccgtgtcatctgct

SEQ ID NO: 781 - DNA, 735 bp, Artificial Sequence; identical to SEQ ID NO: 732
  Synthetic Polynucloetide

SEQ ID NO: 782 - DNA, 735 bp, Artificial Sequence
  Synthetic Polynucloetide
agctacgtgctgacacagcctccatccgtgtctgtggctccaggacagaccgccagaatcacatgcggcggcaacaacatcggcggcaagagcgtgcactggtatcagcagccacctggacaggctccagtggtggtggtgtacgacgacagcgatagacctagcggcatccccgagagattcagcggcagcaattccggcaataccgccacactgaccatcagcagagtggaagctggcgacgaggccgtgtactactgccaagtgtgggacagcagcagcgatcacgtggtgtttggcggcggaacaaagctgacagtgcttggcggaggcggaagtggaggcggaggatctggcggcggaggctctcaactccagctgcaagagtctggccctggcctggtcaagcctagcgaaacactgagcctgacctgtaccgtgtctggcggctctatcagctccggcagctatatctggggctggatcagacaacctcctggcaaaggactggaatggatcggctccatctactacagcggcatcacctactacaaccccagcctgaagtccagagtgaccatctccgtggacaccagcaagaaccagttctccctgaagctgagcagcgtgacagccgccgataccgccgtgtattattgtgccagacatgacggcgctgtggccggcctgtttgattattggggacagggcaccctggtcaccgtgtcatctgct

SEQ ID NO: 783 - DNA, 735 bp, Artificial Sequence
  Synthetic Polynucloetide
agctacgtgctgacacagcctccatccgtgtctgtggctccaggacagaccgccagaatcacatgcggcggcaacaacatcggcggcaagagcgtgcactggtatcagcagccacctggacaggctccagtggtggtggtgtacgacgacagcgatagacctagcggcatccccgagagattcagcggcagcaattccggcaataccgccacactgaccatcagcagagtggaagctggcgacgaggccgtgtactactgccaagtgtgggacagcagcagcgatcacgtggtgtttggcggcggaacaaagctgacagtgcttggcggaggcggaagtggaggcggaggatctggcggcggaggctctcaactccagctgcaagagtctggccctggcctggtcaagcctagcgaaacactgagcctgacctgtaccgtgtctggcggctctatcagctccggcagctatttctggggctggatcagacaacctcctggcaaaggactggaatggatcggctccatctactacagcggcatcacctactacaaccccagcctgaagtccagagtgaccatctccgtggacaccagcaagaaccagttctccctgaagctgagcagcgtgacagccgccgataccgccgtgtattattgtgccagacatgacggcgctatggccggcctgtttgattattggggacagggcaccctggtcaccgtgtcatctgct

SEQ ID NO: 784 - DNA, 735 bp, Artificial Sequence
  Synthetic Polynucloetide
agctacgtgctgacacagcctccatccgtgtctgtggctccaggacagaccgccagaatcacatgcggcggcaacaacatcggcggcaagagcgtgcactggtatcagcagccacctggacaggctccagtggtggtggtgtacgacgacagcgatagacctagcggcatccccgagagattcagcggcagcaattccggcaataccgccacactgaccatcagcagagtggaagctggcgacgaggccgtgtactactgccaagtgtgggacagcagcagcgatcacgtggtgtttggcggcggaacaaagctgacagtgcttggcggaggcggaagtggaggcggaggatctggcggcggaggctctcaactccagctgcaagagtctggccctggcctggtcaagcctagcgaaacactgagcctgacctgtaccgtgtctggcggctctatcagctccggcagctatttctggggctggatcagacaacctcctggcaaaggactggaatggatcggctccatctactacagcggcagcacctactacaaccccagcctgaagtccagagtgaccatctccgtggacaccagcaagaaccagttctccctgaagctgagcagcgtgacagccgccgataccgccgtgtattattgtgccagacatgacggcgctgtggccggcctgtttgattattggggacagggcaccctggtcaccgtgtcatctgct

SEQ ID NO: 785 - DNA, 735 bp, Artificial Sequence
  Synthetic Polynucloetide
agctacgtgctgacacagcctccatccgtgtctgtggctccaggacagaccgccagaatcacatgcggcggcaacaacatcggcggcaagagcgtgcactggtatcagcagccacctggacaggctccagtggtggtggtgtacgacgacagcgatagacctagcggcatccccgagagattcagcggcagcaattccggcaataccgccacactgaccatcagcagagtggaagctggcgacgaggccgtgtactactgccaagtgtgggacagcagcagcgatcacgtggtgtttggcggcggaacaaagctgacagtgcttggcggaggcggaagtggaggcggaggatctggcggcggaggctctcaactccagctgcaagagtctggccctggcctggtcaagcctagcgaaacactgagcctgacctgtaccgtgtctggcggctctatcagctccggcagctatttctggggctggatcagacaacctcctggcaaaggactggaatggatcggctccatctactacagcggcatcagctactacaaccccagcctgaagtccagagtgaccatctccgtggacaccagcaagaaccagttctccctgaagctgagcagcgtgacagccgccgataccgccgtgtattattgtgccagacatgacggcgctgtggccggcctgtttgattattggggacagggcaccctggtcaccgtgtcatctgct

SEQ ID NO: 786 - DNA, 735 bp, Artificial Sequence
  Synthetic Polynucloetide
agctacgtgctgacacagcctccatccgtgtctgtggctccaggacagaccgccagaatcacatgcggcggcaacaacatcggcggcaagagcgtgcactggtatcagcagccacctggacaggctccagtggtggtggtgtacgacgacagcgatagacctagcggcatccccgagagattcagcggcagcaattccggcaataccgccacactgaccatcagcagagtggaagctggcgacgaggccgtgtactactgccaagtgtgggacagcagcagcgatcacgtggtgtttggcggcggaacaaagctgacagtgcttggcggaggcggaagtggaggcggaggatctggcggcggaggctctcaactccagctgcaagagtctggccctggcctggtcaagcctagcgaaacactgagcctgacctgtaccgtgtctggcggctctatcagctccggcagctatttctggggctggatcagacaacctcctggcaaaggactggaatggatcggctccatctactacagcggcatcacctactacaaccccggcctgaagtccagagtgaccatctccgtggacaccagcaagaaccagttctccctgaagctgagcagcgtgacagccgccgataccgccgtgtattattgtgccagacatgacggcgctgtggccggcctgtttgattattggggacagggcaccctggtcaccgtgtcatctgct

SEQ ID NO: 787 - DNA, 735 bp, Artificial Sequence
  Synthetic Polynucloetide
agctacgtgctgacacagcctccatccgtgtctgtggctccaggacagaccgccagaatcacatgcggcggcaacaacatcggcggcaagagcgtgcactggtatcagcagccacctggacaggctccagtggtggtggtgtacgacgacagcgatagacctagcggcatccccgagagattcagcggcagcaattccggcaataccgccacactgaccatcagcagagtggaagctggcgacgaggccgtgtactactgccaagtgtgggacagcagcagcgatcacgtggtgtttggcggcggaacaaagctgacagtgcttggcggaggcggaagtggaggcggaggatctggcggcggaggctctcaactccagctgcaagagtctggccctggcctggtcaagcctagcgaaacactgagcctgacctgtaccgtgtctggcggctctatcagctccggcagctatttctggggctggatcagacaacctcctggcaaaggactggaatggatcggctccatctactacagcggcatcacctactacaaccccaccctgaagtccagagtgaccatctccgtggacaccagcaagaaccagttctccctgaagctgagcagcgtgacagccgccgataccgccgtgtattattgtgccagacatgacggcgctgtggccggcctgtttgattattggggacagggcaccctggtcaccgtgtcatctgct

SEQ ID NO: 788 - DNA, 735 bp, Artificial Sequence; identical to SEQ ID NO: 767
  Synthetic Polynucloetide

SEQ ID NO: 789 - DNA, 735 bp, Artificial Sequence
  Synthetic Polynucloetide
agctacgtgctgacacagcctccatccgtgtctgtggctccaggacagaccgccagaatcacatgcggcggcaacaacatcggcagcaagaccgtgcactggtatcagcagccacctggacaggctccagtggtggtggtgtacgacgacagcgatagacctagcggcatccccgagagattcagcggcagcaattccggcaataccgccacactgaccatcagcagagtggaagctggcgacgaggccgtgtactactgccaagtgtgggacagcagcagcgatcacgtggtgtttggcggcggaacaaagctgacagtgcttggcggaggcggaagtggaggcggaggatctggcggcggaggctctcaactccagctgcaagagtctggccctggcctggtcaagcctagcgaaacactgagcctgacctgtaccgtgtctggcggctctatcagctccggcagctatatctggggctggatcagacaacctcctggcaaaggactggaatggatcggctccatctactacagcggcatcacctactacaaccccagcctgaagtccagagtgaccatctccgtggacaccagcaagaaccagttctccctgaagctgagcagcgtgacagccgccgataccgccgtgtattattgtgccagacatgacggcgctgtggccggcctgtttgattattggggacagggcaccctggtcaccgtgtcatctgct

SEQ ID NO: 790 - DNA, 735 bp, Artificial Sequence
  Synthetic Polynucloetide
agctacgtgctgacacagcctccatccgtgtctgtggctccaggacagaccgccagaatcacatgcggcggcaacaacatcggcagcaagaccgtgcactggtatcagcagccacctggacaggctccagtggtggtggtgtacgacgacagcgatagacctagcggcatccccgagagattcagcggcagcaattccggcaataccgccacactgaccatcagcagagtggaagctggcgacgaggccgtgtactactgccaagtgtgggacagcagcagcgatcacgtggtgtttggcggcggaacaaagctgacagtgcttggcggaggcggaagtggaggcggaggatctggcggcggaggctctcaactccagctgcaagagtctggccctggcctggtcaagcctagcgaaacactgagcctgacctgtaccgtgtctggcggctctatcagctccggcagctatttctggggctggatcagacaacctcctggcaaaggactggaatggatcggctccatctactacagcggcatcacctactacaaccccagcctgaagtccagagtgaccatctccgtggacaccagcaagaaccagttctccctgaagctgagcagcgtgacagccgccgataccgccgtgtattattgtgccagacatgacggcgctatggccggcctgtttgattattggggacagggcaccctggtcaccgtgtcatctgct

SEQ ID NO: 791 - DNA, 735 bp, Artificial Sequence
  Synthetic Polynucloetide
agctacgtgctgacacagcctccatccgtgtctgtggctccaggacagaccgccagaatcacatgcggcggcaacaacatcggcagcaagaccgtgcactggtatcagcagccacctggacaggctccagtggtggtggtgtacgacgacagcgatagacctagcggcatccccgagagattcagcggcagcaattccggcaataccgccacactgaccatcagcagagtggaagctggcgacgaggccgtgtactactgccaagtgtgggacagcagcagcgatcacgtggtgtttggcggcggaacaaagctgacagtgcttggcggaggcggaagtggaggcggaggatctggcggcggaggctctcaactccagctgcaagagtctggccctggcctggtcaagcctagcgaaacactgagcctgacctgtaccgtgtctggcggctctatcagctccggcagctatttctggggctggatcagacaacctcctggcaaaggactggaatggatcggctccatctactacagcggcagcacctactacaaccccagcctgaagtccagagtgaccatctccgtggacaccagcaagaaccagttctccctgaagctgagcagcgtgacagccgccgataccgccgtgtattattgtgccagacatgacggcgctgtggccggcctgtttgattattggggacagggcaccctggtcaccgtgtcatctgct

SEQ ID NO: 792 - DNA, 735 bp, Artificial Sequence
  Synthetic Polynucloetide
agctacgtgctgacacagcctccatccgtgtctgtggctccaggacagaccgccagaatcacatgcggcggcaacaacatcggcagcaagaccgtgcactggtatcagcagccacctggacaggctccagtggtggtggtgtacgacgacagcgatagacctagcggcatccccgagagattcagcggcagcaattccggcaataccgccacactgaccatcagcagagtggaagctggcgacgaggccgtgtactactgccaagtgtgggacagcagcagcgatcacgtggtgtttggcggcggaacaaagctgacagtgcttggcggaggcggaagtggaggcggaggatctggcggcggaggctctcaactccagctgcaagagtctggccctggcctggtcaagcctagcgaaacactgagcctgacctgtaccgtgtctggcggctctatcagctccggcagctatttctggggctggatcagacaacctcctggcaaaggactggaatggatcggctccatctactacagcggcatcagctactacaaccccagcctgaagtccagagtgaccatctccgtggacaccagcaagaaccagttctccctgaagctgagcagcgtgacagccgccgataccgccgtgtattattgtgccagacatgacggcgctgtggccggcctgtttgattattggggacagggcaccctggtcaccgtgtcatctgct

SEQ ID NO: 793 - DNA, 735 bp, Artificial Sequence
  Synthetic Polynucloetide
agctacgtgctgacacagcctccatccgtgtctgtggctccaggacagaccgccagaatcacatgcggcggcaacaacatcggcagcaagaccgtgcactggtatcagcagccacctggacaggctccagtggtggtggtgtacgacgacagcgatagacctagcggcatccccgagagattcagcggcagcaattccggcaataccgccacactgaccatcagcagagtggaagctggcgacgaggccgtgtactactgccaagtgtgggacagcagcagcgatcacgtggtgtttggcggcggaacaaagctgacagtgcttggcggaggcggaagtggaggcggaggatctggcggcggaggctctcaactccagctgcaagagtctggccctggcctggtcaagcctagcgaaacactgagcctgacctgtaccgtgtctggcggctctatcagctccggcagctatttctggggctggatcagacaacctcctggcaaaggactggaatggatcggctccatctactacagcggcatcacctactacaaccccggcctgaagtccagagtgaccatctccgtggacaccagcaagaaccagttctccctgaagctgagcagcgtgacagccgccgataccgccgtgtattattgtgccagacatgacggcgctgtggccggcctgtttgattattggggacagggcaccctggtcaccgtgtcatctgct

SEQ ID NO: 794 - DNA, 735 bp, Artificial Sequence
  Synthetic Polynucloetide
agctacgtgctgacacagcctccatccgtgtctgtggctccaggacagaccgccagaatcacatgcggcggcaacaacatcggcagcaagaccgtgcactggtatcagcagccacctggacaggctccagtggtggtggtgtacgacgacagcgatagacctagcggcatccccgagagattcagcggcagcaattccggcaataccgccacactgaccatcagcagagtggaagctggcgacgaggccgtgtactactgccaagtgtgggacagcagcagcgatcacgtggtgtttggcggcggaacaaagctgacagtgcttggcggaggcggaagtggaggcggaggatctggcggcggaggctctcaactccagctgcaagagtctggccctggcctggtcaagcctagcgaaacactgagcctgacctgtaccgtgtctggcggctctatcagctccggcagctatttctggggctggatcagacaacctcctggcaaaggactggaatggatcggctccatctactacagcggcatcacctactacaaccccaccctgaagtccagagtgaccatctccgtggacaccagcaagaaccagttctccctgaagctgagcagcgtgacagccgccgataccgccgtgtattattgtgccagacatgacggcgctgtggccggcctgtttgattattggggacagggcaccctggtcaccgtgtcatctgct

SEQ ID NO: 795 - DNA, 714 bp, Artificial Sequence; identical to SEQ ID NO: 753
  Synthetic Polynucloetide

SEQ ID NO: 796 - DNA, 714 bp, Artificial Sequence
  Synthetic Polynucloetide
gacatccagatgacacagagccctagcagcctgtctgccagcgtgggagacagagtgaccatcacatgcaaggccagccaggatgtgggcacagccgtggattggtatcagcagaagcctggcaaggcccctaagctgctgatctactgggccagcacaagacacacaggcgtgcccagcagattttctggcagcggctctggcaccgacttcaccctgacaatatccagcctccagcctgaggacttcgccacctactactgccagcagtacaacagctaccctctgaccttcggccagggcaccaaggtggaaatcaaaagaggcggaggcggaagtggaggcggaggatctggcggcggaggctctcaagttcagctggttcagagcggagccgaagtgaagaaacctggcgagagcgtgaaggtgtcctgcaaagccagcggctacacctttaccgagtacaccatccactgggtccgacaggctccaggacaaggactggaatggatgggcaacatcaaccccaacaacggcggcaccacctacaaccagaaattcgaggatcgcgtgacaatcaccgccgacaagagcaccagcaccgcctacatggaactgagcagcctgagaagcgaggacaccgccgtgtactattgtgccagaggctggaacttcgactactggggccagggaaccaccgtgacagtctcttct

SEQ ID NO: 797 - DNA, 714 bp, Artificial Sequence; identical to SEQ ID NO: 752
  Synthetic Polynucloetide

SEQ ID NO: 798 - DNA, 714 bp, Artificial Sequence
  Synthetic Polynucloetide
gacatcgtgatgacccagagccacaagttcatgagcaccagcgtgggcgacagagtgtccatcatctgcaaggccagccaggatgtgggcacagccgtggattggtatcagcagaagcctggacagagccccaagctgctgatctactgggccagcacaagacacaccggcgtgcccgatagattcacaggctctggcagcggcaccgatttcaccctggccatcacaaacgtgcagagcgaggacctggccgactacttctgccagcagtacaacagctaccctctgacctttggagccggcaccaagctggaaatcaagagaggcggaggcggaagtggaggcggaggatctggcggcggaggctctcaagttcagctggttcagagcggagccgaagtgaagaaacctggcgagagcgtgaaggtgtcctgcaaagccagcggctacacctttaccgagtacaccatccactgggtccgacaggctccaggacaaggactggaatggatgggcaacatcaaccccaacaacggcggcaccacctacaaccagaaattcgaggatcgcgtgacaatcaccgccgacaagagcaccagcaccgcctacatggaactgagcagcctgagaagcgaggacaccgccgtgtactattgtgccagaggctggaacttcgactactggggccagggaaccaccgtgacagtctcttct

SEQ ID NO: 799 - DNA, 720 bp, Artificial Sequence
  Synthetic Polynucloetide
gacatccagatgacacagagccctagcagcctgtctgccagcgtgggagacagagtgaccatcacatgcaaggccagccaggatgtgggcacagccgtggattggtatcagcagaagcctggcaaggcccctaagctgctgatctcttgggccagcacaagacacacaggcgtgcccagcagattttctggcagcggctctggcaccgacttcaccctgacaatatccagcctccagcctgaggacttcgccacctacttttgccagcagtacaacagctaccctctgaccttcggccagggcaccaaggtggaaatcaagagaacagttggcggaggcggaagtggaggcggaggatctggcggcggaggctctgaagtgcagctggttgaatcaggtggcggcctggttcaacctggcggatctctgagactgagctgtgccgccagcggctacacctttaccgagtacacaatccactgggtccgacaggcccctggcaaaggacttgagtgggtcgccaacatcaaccccaacaatggcggcaccacctacaaccagaagttcgaggacagattcaccatcagccgggacaacagcaagaacaccctgtacctccagatgaactccctgagagccgaggacaccgccgtgtactattgtgccagaggctggaacttcgactactggggccagggaacactggtcaccgttagctct

SEQ ID NO: 800 - DNA, 720 bp, Artificial Sequence
  Synthetic Polynucloetide
gacatccagatgacacagagccctagcagcctgtctgccagcgtgggagacagagtgaccatcacatgcaaggccagccaggatgtgggcacagccgtggattggtatcagcagaagcctggcaaggcccctaagctgctgatctcttgggccagcacaagacacacaggcgtgcccagcagattttctggcagcggctctggcaccgacttcaccctgacaatatccagcctccagcctgaggacttcgccacctacttttgccagcagtacaacagctaccctctgaccttcggccagggcaccaaggtggaaatcaagagaacagttggcggaggcggaagtggaggcggaggatctggcggcggaggctctgaagttcagctgcaacagtctggccccgagctggttaagcctggaacaagcgtgcggatctcctgcaagaccagcggctacaccttcaccgagtacaccatccactgggtcaagcagagccacggcaagagcctggaatggatcggcaacatcaaccccaacaacggcggcaccacctacaaccagaagttcgaggacaaggccacactgaccgtggacaagagcagcagcaccgcctacatggaactgagaagcctgaccagcgaggacagcgccgtgtactattgtgccgccggatggaacttcgactactggggccagggaacaaccctgaccgttagctct

SEQ ID NO: 801 - DNA, 720 bp, Artificial Sequence; identical to SEQ ID NO: 754
  Synthetic Polynucloetide

SEQ ID NO: 802 - DNA, 732 bp, Artificial Sequence; identical to SEQ ID NO: 761
  Synthetic Polynucloetide

SEQ ID NO: 803 - DNA, 729 bp, Artificial Sequence
  Synthetic Polynucloetide
gacattcagatgacacagagccctagcagcctgagcgcctctgtgggagacagagtgaccatcacatgcaagagcagccagagcctgctgtactccagcaatcagaagaactacctggcctggttccagcagaagcctggcaaggctcctaagctgctgatctactgggccagcaccagagaaagcggcgtgccaagcagattttctggcagcggctctggcaccgacttcaccctgacaatatccagcctccagcctgaggacttcgccacctacttttgccaccagtacctgagcagctacacattcggacagggcaccaaggtggaaatcaagcggggcggaggcggaagtggaggcggaggatctggcggcggaggctctgaggtgcagctggttgaatctggcggaggactggttcagcctggcggatctctgagactgtcttgtgccgccagcggcttcaccttcaccacctattggatgcactgggtccgacaggcccctggcaaaggacttgagtgggtcggatatatcaggcccagcaccggctacacagagtacaaccagaagttcaaggaccgcttcaccatcagcgccgacaccagcaagaataccgcctacctccagatgaacagcctgagagccgaggacaccgccgtgtactactgtgccagatccagatggctgctggactattggggccagggcacactggttacagtttct

SEQ ID NO: 804 - DNA, 723 bp, Artificial Sequence
  Synthetic Polynucloetide
gacattcagatgacacagagccctagcagcctgagcgcctctgtgggagacagagtgaccatcacatgcaagagcagccagagcctgctgtactccagcaatcagaagaactacctggcctggttccagcagaagcctggcaaggctcctaagctgctgatctactgggccagcaccagagaaagcggcgtgccaagcagattttctggcagcggctctggcaccgacttcaccctgacaatatccagcctccagcctgaggacttcgccacctacttttgccaccagtacctgagcagctacacattcggacagggcaccaaggtggaaatcaagcggggcggaggcggaagtggaggcggaggatctggcggcggaggctctgacattcagatgacacagagccctagcagcctgagcgcctctgtgggagacagagtgaccatcacatgcaagagcagccagagcctgctgtactccagcaatcagaagaactacctggcctggttccagcagaagcctggcaaggctcctaagctgctgatctactgggccagcaccagagaaagcggcgtgccaagcagattttctggcagcggctctggcaccgacttcaccctgacaatatccagcctccagcctgaggacttcgccacctacttttgccaccagtacctgagcagctacacattcggacagggcaccaaggtggaaatcaagcgg

SEQ ID NO: 805 - DNA, 720 bp, Artificial Sequence; identical to SEQ ID NO: 764
  Synthetic Polynucloetide

SEQ ID NO: 806 - DNA, 720 bp, Artificial Sequence; identical to SEQ ID NO: 678
  Synthetic Polynucloetide

SEQ ID NO: 807 - DNA, 720 bp, Artificial Sequence
  Synthetic Polynucloetide
gacatccagatgacacagagccctagcagcctgtctgccagcgtgggagacagagtgaccatcacctgtagagccagccaggacatcagcagctacctgaactggtatcagcagaagcccggcaaggcccctaagctgctgatctactacaccagcagactgcacagcggcgtgcccagcagattttctggctctggcagcggcaccgacttcaccctgacaatatctagcctccagcctgaggacttcgccacctactattgccagcagggcaacaccctgccttacacatttggacagggcaccaaggtggaaatcaagagaggcggaggcggaagtggaggcggaggatctggcggcggaggctctgaagtgcagctggttgaatcaggtggcggcctggttcaacctggcggatctctgagactgagctgtgccgccagcggctacaccttcagcgactactttatgagctgggtccgacaggcccctggcaaaggacttgaatgggtcgccaccatcagcaatggcggcacctacacttactaccccgacagcgtgaagggcagattcaccatctccagagacaacagcaagaacaccctgtacctccagatgaactccctgagagccgaggacaccgccgtgtactactgcgccagattcgacggctacatcttcgactattggggccagggcaccctggtcacagtctcttct

SEQ ID NO: 808 - DNA, 720 bp, Artificial Sequence; identical to SEQ ID NO: 765
  Synthetic Polynucloetide

SEQ ID NO: 809 - DNA, 720 bp, Artificial Sequence
  Synthetic Polynucloetide
gacatccagatgacacagagccctagcagcctgtctgccagcgtgggagacagagtgaccatcacctgtagagccagccaggacatcagcaactacctgaactggtatcagcagaagcccggcaaggcccctaagctgctgatctactacaccagcagactgcacagcggcgtgcccagcagattttctggctctggcagcggcaccgacttcaccctgacaatatctagcctccagcctgaggacttcgccacctactattgccagcagggcaacaccctgccttggacatttggacagggcaccaaggtggaaatcaagagaggcggaggcggaagtggaggcggaggatctggcggcggaggctctgaagtgcagctggttgaatcaggtggcggcctggttcaacctggcggatctctgagactgagctgtgccgccagcggctacaccttcagcgactactttatgagctgggtccgacaggcccctggcaaaggacttgaatgggtcgccaccatcagcaatggcggcacctacacttactaccccgacagcgtgaagggcagattcaccatctccagagacaacagcaagaacaccctgtacctccagatgaactccctgagagccgaggacaccgccgtgtactactgcgccagattcgacggctacatcttcgactattggggccagggcaccctggtcacagtctcttct

SEQ ID NO: 810 - DNA, 720 bp, Artificial Sequence; identical to SEQ ID NO: 766
  Synthetic Polynucloetide

SEQ ID NO: 811-815 - skipped (5 entries)

SEQ ID NO: 816 - DNA, 801 bp, Artificial Sequence
  Synthetic Polynucloetide
atggccttaccagtgaccgccttgctcctgccgctggccttgctgctccacgccgccaggccggaggtgcagctggttgaatctggcggaggactggttcagcctggcggatctctgagactgtcttgtgccgccagcggcttcaacatcaaggatacctgtatcggctgggttcgcagagcccctggcaaagaggaagaactggtcgccaaaatctgcaagtacagcggccacaccagatacgccgacagcgtgaagggcagattcaccatcagcgccgacaccagcaagaacaccgcctacctccagatgaacagcctgagagccgaggacaccgccgtgtactattgtgccgctgtgtccgtcagagatgggcactacaattactggggccagggcaccaccgtgaccgtttcttcaggcggaggaagcggcggaggatctgaagtgcaactggtggaaagcggaggcggacttgttcaaccaggcggaagcctgagactgagctgtgccgcttccggctttaatatcaaagacacatgcatcggatgggttcgccgcgctccagggaaagaagaggaactggttgccgacatctgtccctacaagggcagcacaagatatgccgactccgtgaaaggccggtttaccatctctgccgacacctctaagaatacggcctatctgcaaatgaactctctgcgggccgaagatacagccgtgtattactgcgccatcgtgtctgccagagatggctactataactattggggacagggaaccacagtcacagtgtcctct

SEQ ID NO: 817 - DNA, 420 bp, Artificial Sequence
  Synthetic Polynucloetide
atggccttaccagtgaccgccttgctcctgccgctggccttgctgctccacgccgccaggccggaggtgcagctggttgaatctggcggaggactggttcagcctggcggatctctgagactgtcttgtgccgccagcggcttcaacatcaaggatacctgtatcggctgggttcgcagagcccctggcaaagaggaagaactggtcgccaaaatctgcaagtacagcggccacaccagatacgccgacagcgtgaagggcagattcaccatcagcgccgacaccagcaagaacaccgcctacctccagatgaacagcctgagagccgaggacaccgccgtgtactattgtgccgctgtgtccgtcagagatgggcactacaattactggggccagggcaccaccgtgaccgtttcttca

SEQ ID NO: 818 - DNA, 801 bp, Artificial Sequence
  Synthetic Polynucloetide
atggccttaccagtgaccgccttgctcctgccgctggccttgctgctccacgccgccaggccggaggtgcagctggttgaatctggcggaggactggttcagcctggcggatctctgagactgtcctgcacattttccggcggcaccttcagcagctacacaatgggctggttcagacaggcccctggcaaagaacgggaatttgtggccgaagtccgatggggcggagtgaccacatacagcaacagcctgaaggacagattcagcatcagcgaggacagcgtgaagaacgccgtgtacctccagatgaactccctgaagcctgaggacacagccgtgtactattgtgccgctgtgcggcagatgtacatgaccgtggtgcctgattattggggccagggcacactggtcacagtgtctagcagcggcggaggcggatctttcgaacagctccagttgcaagagagcggccctggcttggtaaaaccttccgagacccttagcctcacatgcacggttagtgggggcagcatttcctcaggtgattactattggggatggattcggcaacccccgggtaaaggattggagtggattggtcatatttattatagtggagcgacgtactacaacccaagtctcaaatccagggttacaatatccgtcgatacgagcaggaaccaattcagcttgaaactttctagtgtcaccgcagcagacacagccgtctattactgtacgcgggatgactccagtaattggcggtcccgagggcaagggacactggtcacggtctcctca

SEQ ID NO: 819 - DNA, 423 bp, Artificial Sequence
  Synthetic Polynucloetide
atggccttaccagtgaccgccttgctcctgccgctggccttgctgctccacgccgccaggccggaggtgcagctggttgaatctggcggaggactggttcagcctggcggatctctgagactgtcctgcacattttccggcggcaccttcagcagctacacaatgggctggttcagacaggcccctggcaaagaacgggaatttgtggccgaagtccgatggggcggagtgaccacatacagcaacagcctgaaggacagattcagcatcagcgaggacagcgtgaagaacgccgtgtacctccagatgaactccctgaagcctgaggacacagccgtgtactattgtgccgctgtgcggcagatgtacatgaccgtggtgcctgattattggggccagggcacactggtcacagtgtctagc

SEQ ID NO: 820 - DNA, 837 bp, Artificial Sequence
  Synthetic Polynucloetide
atggccttaccagtgaccgccttgctcctgccgctggccttgctgctccacgccgccaggccggaggtgcagctggttgaatctggtggcggagttgtgcagcctggcagaagcctgagactgtcttgtgccgccagcggctttagcttcagcggctatggaatgcactgggtccgacaggcccctggcaaaggacttgagtgggtcgcctacatcagctacgacggcagcaacaagtattacgccgacagcgtgaagggcagattcaccatcagccgggacaacagcaagaacaccctgtacctccagatgaacagcctgagagccgaggacaccgccgtgtactactgcgccaaagatcctgcctggggactgagactgggcgagagcagcagctacgatttcgacatctggggccagggcacaatggtcacagtttctagcggatccggcggaggcggaagtggaggcggaggatctggcggcggaggctctttcgaagttcagctgctggaatctggcggaggactcgttcaacctggcggctctctgagactgagctgtgccgcttctggcttcagcttctctagctacgccctgagctgggttcgacaagctcccggaaagggccttgaatgggtgtccagcatcggcgagaatgacggcaccacagactatgccgatgccgtgaaaggccggtttaccatcagcagagacaattccaagaacacgctctatctgcaaatgaactccctgcgcgtggaagatacagccgtgtattattgcgtgaaggacggcgtgcactggggacagggaaccctggttacagtgtctagc

SEQ ID NO: 821 - DNA, 444 bp, Artificial Sequence
  Synthetic Polynucloetide
atggccttaccagtgaccgccttgctcctgccgctggccttgctgctccacgccgccaggccggaggtgcagctggttgaatctggtggcggagttgtgcagcctggcagaagcctgagactgtcttgtgccgccagcggctttagcttcagcggctatggaatgcactgggtccgacaggcccctggcaaaggacttgagtgggtcgcctacatcagctacgacggcagcaacaagtattacgccgacagcgtgaagggcagattcaccatcagccgggacaacagcaagaacaccctgtacctccagatgaacagcctgagagccgaggacaccgccgtgtactactgcgccaaagatcctgcctggggactgagactgggcgagagcagcagctacgatttcgacatctggggccagggcacaatggtcacagtttctagc

SEQ ID NO: 822 - DNA, 816 bp, Artificial Sequence
  Synthetic Polynucloetide
atggactggatttggcgcatccttttccttgtcggcgctgctaccggcgcccattccgaggttcagctgcttgagtctggcggaggactggttcaacctggcggaagcctgagactgtcttgtgccgcttccggcttcagcttcagcagctatgccctgagctgggtccgacaggctcctggcaaaggactggaatgggtgtccagcatcggcgagaatgacggcaccaccgattatgccgatgccgtgaagggcagattcaccatctctcgggacaacagcaagaacaccctgtacctccagatgaacagcctcagagtggaagataccgccgtgtactactgcgtgaaggacggcgttcactggggccagggaacactggttacagtgtctagcggatccggcggaggcggaagtggaggcggaggatctttcgaagttcagttggtagagtctggaggcggagtggtacaaccggggcggtctcttagacttagttgcgcagcaagcggtttctctttctctggctatgggatgcactgggtgagacaggcccctgggaaaggactggagtgggtggcctacatttcatacgacgggagtaataaatactatgcagactccgttaagggcaggttcacgatctctcgggacaattccaagaatacattgtatcttcagatgaatagtctccgagctgaagacacggcggtttactactgcgctaaagacccggcctggggacttcgacttggagagagttctagctacgattttgacatttggggacaagggacaatggtcactgtctcaagt

SEQ ID NO: 823 - DNA, 396 bp, Artificial Sequence
  Synthetic Polynucloetide
atggactggatttggcgcatccttttccttgtcggcgctgctaccggcgcccattccgaggttcagctgcttgagtctggcggaggactggttcaacctggcggaagcctgagactgtcttgtgccgcttccggcttcagcttcagcagctatgccctgagctgggtccgacaggctcctggcaaaggactggaatgggtgtccagcatcggcgagaatgacggcaccaccgattatgccgatgccgtgaagggcagattcaccatctctcgggacaacagcaagaacaccctgtacctccagatgaacagcctcagagtggaagataccgccgtgtactactgcgtgaaggacggcgttcactggggccagggaacactggttacagtgtctagc

SEQ ID NO: 824 - DNA, 435 bp, Artificial Sequence
  Synthetic Polynucloetide
atggccttaccagtgaccgccttgctcctgccgctggccttgctgctccacgccgccaggccgcagctgcaactgcaagagtctggccccggactggtcaagccttctgaaacactggccctgacctgcaatgtgtccggcggctctatcagcagcagctcctattactggggctggatcagacagcctccaggcaagagactggaatggatcggcagcatctactacagcggcagcacatacttcaaccccagcctgaagtccagagtgaccatcagcgtggacacctccaagaaccagttctccctgaagctgagcagcgtgacagccgccgatacagccgtgtattactgtgctggcggcgactactatggccccgttggacaatggcccagcgattacagaggacagggaacccttgtgaccgtgtcctct

SEQ ID NO: 825 - DNA, 825 bp, Artificial Sequence
  Synthetic Polynucloetide
atggactggatttggcgcatccttttccttgtcggcgctgctaccggcgcccattcccagctccagctgcaagagtctggacctggcctggtcaagcctagcgagacactgagcctgacctgtacagttagcggcggctctgtgtccagcagcagctattactggggctggatcagacagcctcctggcaagagactggaactgatcggcagcatctactacggcggctccacctacttcaaccccagcctgaaaagcagagtgaccatcagcgtggacaccagcaagaaccagttcagcctgaagctgagcagcgtgacagccgccgatacagccgtgtactattgtgccggcggagacacatacggccctgttggacaatggcccagcgactatagaggccagggcacactggtcacagtgtctagcggtggcggaggaagtggcggcggatctttcgaagttcagctgcttgaaagcggtggcggcctggttcaacctggcggatctctgagactgagctgtgccgccagcggcttcatcttctccatctacgccatgtcctgggtccgacaggcccctggaaaaggactggaatgggtgtccggcatctctggcagcggcgtgaacacctactacgccgattctgtgaagggccgcttcatcatcagccgggacaacagcagaaacaccgtgtacctccagatgaacagcctgagagccgatgacaccgccgtgtaccactgcgccaatggcaaaggctgggacggcaacacttggtacgaggattacagaggacagggaaccctcgtgaccgtgtctagt

SEQ ID NO: 826 - DNA, 429 bp, Artificial Sequence
  Synthetic Polynucloetide
atggactggatttggcgcatccttttccttgtcggcgctgctaccggcgcccattcccagctccagctgcaagagtctggacctggcctggtcaagcctagcgagacactgagcctgacctgtacagttagcggcggctctgtgtccagcagcagctattactggggctggatcagacagcctcctggcaagagactggaactgatcggcagcatctactacggcggctccacctacttcaaccccagcctgaaaagcagagtgaccatcagcgtggacaccagcaagaaccagttcagcctgaagctgagcagcgtgacagccgccgatacagccgtgtactattgtgccggcggagacacatacggccctgttggacaatggcccagcgactatagaggccagggcacactggtcacagtgtctagc

SEQ ID NO: 827 - DNA, 426 bp, Artificial Sequence
  Synthetic Polynucloetide
atggccttaccagtgaccgccttgctcctgccgctggccttgctgctccacgccgccaggccggaggttcagctgcttgagtctggcggaggactggttcaacctggcggaagcctgagactgtcttgtgccgccagcggcttcacctttagcagctacgccatgagctgggtccgacaggctcctggcaaaggactggaatgggtgtccagcatcagcggcagcggcgactacatctactacgccgatagcgtgaagggcagattcaccatcagccgggacatcagcaagaacaccctgtacctccagatgaacagcctgagagccgaggacaccgccgtgtactactgtgccaaagaaggcaccggcgctaacagcagcctggccgattatagaggccagggcacactggtcaccgtgtctagt

SEQ ID NO: 828 - DNA, 417 bp, Artificial Sequence
  Synthetic Polynucloetide
atggccttaccagtgaccgccttgctcctgccgctggccttgctgctccacgccgccaggccgcaggtgcagctggttgaatctggcggaggactggttcagcctggcggatctctgagactgtcttgtgccgccagcggcttcaccttcaccaatcacgccatgagctgggtccgacaggcccctggaaaaggactggaactggtgtctagcatcagcggcaacggcagaaccacctactacgccgatagcgtgaagggcagattcaccatcagccgggacatcagcaagaacaccctggacctccagatgaacagcctgagagccgaggataccgccgtgtactactgtgccaaggatggcggagagacactggtggatagcagaggccagggcacactggtcacagtgtcatct

SEQ ID NO: 829 - DNA, 801 bp, Artificial Sequence
  Synthetic Polynucloetide
atggccttaccagtgaccgccttgctcctgccgctggccttgctgctccacgccgccaggccgcagctccagctgcaagagtctggacctggcctggtcaagcctagcgagacactgagcctgacctgtaccgtgtccggcgatagcatcagcagcggcgattactactggggctggatcagacagcctcctggcaaaggactggaatggatcggccacatctactacagcggcgtgacctactacaaccccagcctgaagtccagagtgaccatcagcgtggacaccagccggaaccagttctccctgaagctgtctagcgtgacagccgccgataccgccgtgtactactgcaccagagaggacagcagcaactggcggagtagaggccagggaacactggtcacagttagctctctcgagagcggcggaggcggatctttcgaagtgcagctgcttgaaagtggcggcggactgattcagcctggcggatctctgagactgagctgtgccgccagcggcttcaccttttctagccacgccatgacctgggtccgacaggcacctggaaaagggcttgaatgggtgtccgccatcagcggctctggcgattacacacactacgccgacagcgtgaagggcagattcaccatcagcagagacaacagcaagaacaccgtgtacctccagatgaacagcctgagagccgaggacagcgccgtgtattattgcgccaaggatgaggatggcggcagcctgcttggacacagaggacaaggcaccctggtcaccgtttcttcc

SEQ ID NO: 830 - DNA, 381 bp, Artificial Sequence
  Synthetic Polynucloetide
gaggtgcagctggttgaatctggtggcggagttgtgcagcctggcagaagcctgagactgtcttgtgccgccagcggctttagcttcagcggctatggaatgcactgggtccgacaggcccctggcaaaggacttgagtgggtcgcctacatcagctacgacggcagcaacaagtattacgccgacagcgtgaagggcagattcaccatcagccgggacaacagcaagaacaccctgtacctccagatgaacagcctgagagccgaggacaccgccgtgtactactgcgccaaagatcctgcctggggactgagactgggcgagagcagcagctacgatttcgacatctggggccagggcacaatggtcacagtttctagc

SEQ ID NO: 831 - DNA, 339 bp, Artificial Sequence
  Synthetic Polynucloetide
gaagttcagctgctggaatctggcggaggactcgttcaacctggcggctctctgagactgagctgtgccgcttctggcttcagcttctctagctacgccctgagctgggttcgacaagctcccggaaagggccttgaatgggtgtccagcatcggcgagaatgacggcaccacagactatgccgatgccgtgaaaggccggtttaccatcagcagagacaattccaagaacacgctctatctgcaaatgaactccctgcgcgtggaagatacagccgtgtattattgcgtgaaggacggcgtgcactggggacagggaaccctggttacagtgtctagc

SEQ ID NO: 832 - DNA, 339 bp, Artificial Sequence
  Synthetic Polynucloetide
gaggttcagctgcttgagtctggcggaggactggttcaacctggcggaagcctgagactgtcttgtgccgcttccggcttcagcttcagcagctatgccctgagctgggtccgacaggctcctggcaaaggactggaatgggtgtccagcatcggcgagaatgacggcaccaccgattatgccgatgccgtgaagggcagattcaccatctctcgggacaacagcaagaacaccctgtacctccagatgaacagcctcagagtggaagataccgccgtgtactactgcgtgaaggacggcgttcactggggccagggaacactggttacagtgtctagc

SEQ ID NO: 833 - DNA, 381 bp, Artificial Sequence
  Synthetic Polynucloetide
gaagttcagttggtagagtctggaggcggagtggtacaaccggggcggtctcttagacttagttgcgcagcaagcggtttctctttctctggctatgggatgcactgggtgagacaggcccctgggaaaggactggagtgggtggcctacatttcatacgacgggagtaataaatactatgcagactccgttaagggcaggttcacgatctctcgggacaattccaagaatacattgtatcttcagatgaatagtctccgagctgaagacacggcggtttactactgcgctaaagacccggcctggggacttcgacttggagagagttctagctacgattttgacatttggggacaagggacaatggtcactgtctcaagt

SEQ ID NO: 834 - DNA, 369 bp, Artificial Sequence
  Synthetic Polynucloetide
caggtccagctcgtcgagtccggcggcggcctcgtccaggccggcgactccgtcaccctctcctgcaccgcctccggccgcaccttctcctcctacgccctcgcctggttccgccagcgccccggcaaggagcgcgagttcgtcgccggcctccgctggggcggccccaccaactacgccgactccgtcaaggaccgcttcaccatctccggcgactccgccaagcacaccatgtacctccagatgaactccctcaagcccgaggacaccgccgtctactactgcggctacaaccccggcggctgggccgtcccctcccagtacgagtacgactcctggggccagggcacccaggtcaccgtctcctcc

SEQ ID NO: 835 - DNA, 354 bp, Artificial Sequence
  Synthetic Polynucloetide
caggttcagctgcaagagtctggcggaggacttgctcaagctggcggaagcctgagactgtcttgtgccgcctctggcagaaccttcagcatgggctggtttagacaggcccctggcaaagagagagagttcgtcgccgccatcacatacagcggcggcagcccttactacgcctcttctgtcagaggccggttcaccatcagccgggacaacgccaagaacaccgtgtacctccagatgaacagcctgaagccagaggacaccgccgtgtactactgtgccgccaatccaacctacggcagcgactggaatgccgagaattggggccagggcacccaagtgacagtgtctagt

SEQ ID NO: 836 - DNA, 348 bp, Artificial Sequence
  Synthetic Polynucloetide
gaagtgcagctggttgaatctggcggaggactggttcagcctggcggatctctgagactgtcttgtgccgccagcggcttcagcttcagcgacttttggatgagctgggtccgacaggcccctggcaaaggacttgaatgggtcgccacaatcagccaggccggcagcgagaaggactacgtggactctgtgaagggcagattcaccatcagccgggacaacgccaagaagtccctgtacctccagatgaacagcctgagagccgaggacaccgccgtgtactattgtgcctctggcgtgtacagcttcgactacagaggccagggcaccctggtcacagtctcttct

SEQ ID NO: 837 - DNA, 348 bp, Artificial Sequence
  Synthetic Polynucloetide
gaagtgcagctggttgaatctggcggaggactggttcagcctggcggatctctgagactgtcttgtgccgccagcggcttcaccttcagcaactactggatgagctgggtccgacaggcccctggaaagggacaagaatgggtcgccaccatcaaccaggacggcagcgacaaggattacgtggacagcgtgaagggcagattcaccatcagccgggacaacgccaagaagtccctgtacctccagatgaacagcctgagagccgaggacaccgccgtgtactattgtgcctctggcgtgtacagcttcgactacagaggccagggcaccctggtcacagtctcttct

SEQ ID NO: 838 - DNA, 348 bp, Artificial Sequence
  Synthetic Polynucloetide
gaagtgcagctggttgaatctggcggaggactggttcagcctggcggatctctgagactgtcttgtgccgccagcggcatcgacttcagcagatactggatgagctgggtccgacaggcccctggcaaaggacttgaatgggtcgccacaatcagccaggccggcagcgagaaggactacgtggactctgtgaagggcagattcaccatcagccgggacaacgccaagaagtccctgtacctccagatgaacagcctgagagccgaggacaccgccgtgtactattgtgcctctggcgtgtacagcttcgactacagaggccagggcaccctggtcacagtctcttct

SEQ ID NO: 839 - DNA, 348 bp, Artificial Sequence
  Synthetic Polynucloetide
gaagtgcagctggttgaatctggcggaggactggttcagcctggcggatctctgagactgtcttgtgccgccagcggcatcgacttcagcagatactggatgagctgggtccgacaggcccctggaaagggacaagaatgggtcgccaccatcaaccaggacggcagcgacaaggattacgtggacagcgtgaagggcagattcaccatcagccgggacaacgccaagaagtccctgtacctccagatgaacagcctgagagccgaggacaccgccgtgtactattgtgcctctggcgtgtacagcttcgactacagaggccagggcaccctggtcacagtctcttct

SEQ ID NO: 840 - DNA, 360 bp, Artificial Sequence
  Synthetic Polynucloetide
gaggtgcagctggttgaatctggcggaggactggttcagcctggcggatctctgagactgtcctgcacattttccggcggcaccttcagcagctacacaatgggctggttcagacaggcccctggcaaagaacgggaatttgtggccgaagtccgatggggcggagtgaccacatacagcaacagcctgaaggacagattcagcatcagcgaggacagcgtgaagaacgccgtgtacctccagatgaactccctgaagcctgaggacacagccgtgtactattgtgccgctgtgcggcagatgtacatgaccgtggtgcctgattattggggccagggcacactggtcacagtgtctagc

SEQ ID NO: 841 - DNA, 354 bp, Artificial Sequence
  Synthetic Polynucloetide
gaagtgcagctggttgaatctggcggaggactggttcaggctggcggatctctgagactgtcttgtgccgccagcggcagaacctttagcatgggctggtttagacaggcccctggcaaagagagagagttcgtcgccgccatcacatactctggcggcagcccttactacgccgactctgtgaagggcagattcaccatcagccgggacaacgccaagaacaccgtgtacctccagatgaacagcctgaagcctgaggacaccgccgtgtactactgcgccgccaatccaacatacggcagcgactggaacgccgagaattggggccagggaacccaagtgacagtgtctagc

SEQ ID NO: 842 - DNA, 354 bp, Artificial Sequence
  Synthetic Polynucloetide
cagctccagttgcaagagagcggccctggcttggtaaaaccttccgagacccttagcctcacatgcacggttagtgggggcagcatttcctcaggtgattactattggggatggattcggcaacccccgggtaaaggattggagtggattggtcatatttattatagtggagcgacgtactacaacccaagtctcaaatccagggttacaatatccgtcgatacgagcaggaaccaattcagcttgaaactttctagtgtcaccgcagcagacacagccgtctattactgtacgcgggatgactccagtaattggcggtcccgagggcaagggacactggtcacggtctcctca

SEQ ID NO: 843 - DNA, 354 bp, Artificial Sequence
  Synthetic Polynucloetide
cagctccagctgcaagagtctggacctggcctggtcaagcctagcgagacactgagcctgacctgtaccgtgtccggcgatagcatcagcagcggcgattactactggggctggatcagacagcctcctggcaaaggactggaatggatcggccacatctactacagcggcgtgacctactacaaccccagcctgaagtccagagtgaccatcagcgtggacaccagccggaaccagttctccctgaagctgtctagcgtgacagccgccgataccgccgtgtactactgcaccagagaggacagcagcaactggcggagtagaggccagggaacactggtcacagttagctct

SEQ ID NO: 844 - DNA, 354 bp, Artificial Sequence
  Synthetic Polynucloetide
caactgcaactgcaagagtctggccctggcctggtcaagccttctgaaaccctgagcctgacctgtaccgtgtccggcggctctatcagcagcggcgattactactggggctggatcagacagcctccaggcaagggactcgaatggatcggcagcatcagctacagcggctccacctactacaacccaagcctgaagtccagagtgaccatcagcgtggacaccagcagaaaccagttctccctgaagctgagcagcgtgacagccgccgatacagccgtgtattattgcaccagagaggacagcagcaactggcggagtagaggacagggcacactggtcacagtgtcctct

SEQ ID NO: 845 - DNA, 372 bp, Artificial Sequence
  Synthetic Polynucloetide
cagctgcaactgcaagagtctggccccggactggtcaagccttctgaaacactggccctgacctgcaatgtgtccggcggctctatcagcagcagctcctattactggggctggatcagacagcctccaggcaagagactggaatggatcggcagcatctactacagcggcagcacatacttcaaccccagcctgaagtccagagtgaccatcagcgtggacacctccaagaaccagttctccctgaagctgagcagcgtgacagccgccgatacagccgtgtattactgtgctggcggcgactactatggccccgttggacaatggcccagcgattacagaggacagggaacccttgtgaccgtgtcctct

SEQ ID NO: 846 - DNA, 390 bp, Artificial Sequence
  Synthetic Polynucloetide
gaagttcagctgcttgagtctggcggaggactggttcaacctggcggaagcctgagactgtcttgtgccgccagcggcttcatcttcagcagctacgccatgagctgggtccgacaggctcctggaaagggccaagaatgggtttccggcgttagcggcacaggcgtgaacacctactacgccgatagcgtgaagggcagattcaccatcagccgggacaacagcaagaacaccctgtacctccagatgaacagcctgagagccgaggacaccgccgtgtactattgtgcctctggcaaaggctgggacagcggctcttggtacgaggactatagaggccagggcaccctggtcacagtttcttcaacgcgtcctcgactgtgccttcta

SEQ ID NO: 847 - DNA, 372 bp, Artificial Sequence
  Synthetic Polynucloetide
cagctccagctgcaagagtctggacctggcctggtcaagcctagcgagacactgagcctgacctgtacagttagcggcggctctgtgtccagcagcagctattactggggctggatcagacagcctcctggcaagagactggaactgatcggcagcatctactacggcggctccacctacttcaaccccagcctgaaaagcagagtgaccatcagcgtggacaccagcaagaaccagttcagcctgaagctgagcagcgtgacagccgccgatacagccgtgtactattgtgccggcggagacacatacggccctgttggacaatggcccagcgactatagaggccagggcacactggtcacagtgtctagc

SEQ ID NO: 848 - DNA, 366 bp, Artificial Sequence
  Synthetic Polynucloetide
gaagttcagctgcttgaaagcggtggcggcctggttcaacctggcggatctctgagactgagctgtgccgccagcggcttcatcttctccatctacgccatgtcctgggtccgacaggcccctggaaaaggactggaatgggtgtccggcatctctggcagcggcgtgaacacctactacgccgattctgtgaagggccgcttcatcatcagccgggacaacagcagaaacaccgtgtacctccagatgaacagcctgagagccgatgacaccgccgtgtaccactgcgccaatggcaaaggctgggacggcaacacttggtacgaggattacagaggacagggaaccctcgtgaccgtgtctagt

SEQ ID NO: 849 - DNA, 351 bp, Artificial Sequence
  Synthetic Polynucloetide
gaagtgcaggttttggagtctggcggaggactggttcagcctggcggatctctgagactgtcttgtgccgccagcggcttcaccttcagcaactttgccatgagctgggtccgacaggcccctggcaaaggacttgaatgggtgtccacaatcagcggcagcgccggcacaacagattacgccgattctgtgaagggcagattcaccatcagccgggacaacagcaagaaaaccctgtacctccagatgaacagcctgcgcgtggaagataccgccgtgtactactgtgccgatggcagaggccccttcttcgattatcgcggccagggcacactggtcaccgtttcttct

SEQ ID NO: 850 - DNA, 357 bp, Artificial Sequence
  Synthetic Polynucloetide
gaggtgcagctggttgaatctggcggaggactggttcagcctggcggatctctgagactgtcttgtgccgccagcggcttcaacatcaaggatacctgtatcggctgggttcgcagagcccctggcaaagaggaagaactggtcgccaaaatctgcaagtacagcggccacaccagatacgccgacagcgtgaagggcagattcaccatcagcgccgacaccagcaagaacaccgcctacctccagatgaacagcctgagagccgaggacaccgccgtgtactattgtgccgctgtgtccgtcagagatgggcactacaattactggggccagggcaccaccgtgaccgtttcttca

SEQ ID NO: 851 - DNA, 357 bp, Artificial Sequence
  Synthetic Polynucloetide
gaagtgcaactggtggaaagcggaggcggacttgttcaaccaggcggaagcctgagactgagctgtgccgcttccggctttaatatcaaagacacatgcatcggatgggttcgccgcgctccagggaaagaagaggaactggttgccgacatctgtccctacaagggcagcacaagatatgccgactccgtgaaaggccggtttaccatctctgccgacacctctaagaatacggcctatctgcaaatgaactctctgcgggccgaagatacagccgtgtattactgcgccatcgtgtctgccagagatggctactataactattggggacagggaaccacagtcacagtgtcctct

SEQ ID NO: 852 - DNA, 357 bp, Artificial Sequence
  Synthetic Polynucloetide
gaagtgcagctgcttgagtctggcggaggactggttcaacctggcggaagcctgagactgtcttgtgccgccagcggcttcacctttagcagctacgccatgagctgggtccgacaggctcctggcaaaggactggaatgggtgtccgccatcacaggctctggcggcagcacatattacgccgactctgtgaagggcagattcaccatcagccgggacaacagcaagaacaccctgtacctccagatgaacagcctgagagccgaggacaccgccgtgtactactgtgccaaggatgaggatggcggctctctgctgggacacagaggacagggaacactggtcaccgtgtctagc

SEQ ID NO: 853 - DNA, 357 bp, Artificial Sequence
  Synthetic Polynucloetide
gaagtgcagctgcttgagtctggcggcggactgattcaacctggcggaagcctgagactgagctgtgccgcttccggcttcacctttagcagccacgccatgacctgggtccgacaggctcctggaaaaggactggaatgggtgtccgccatcagcagcggcggcagctacacatattacgccgacagcgtgaagggcagattcaccatctccagagacaacagcaagaacaccctgtacctccagatgaacagcctgagagccgaggacaccgccgtgtactactgtgccaaggatgaggatggcggctctctgctgggacacagaggacagggaacactggtcaccgtgtctagc

SEQ ID NO: 854 - DNA, 357 bp, Artificial Sequence
  Synthetic Polynucloetide
gaagtgcagctggttgaatctggcggaggactggttcagcctggcggatctctgagactgtcttgtgccgccagcggcttcagcttcagcgacttttggatgagctgggtccgacaggcccctggcaaaggacttgaatgggtgtccgccatcagcggcagcggcgattatacacactacgccgacagcgtgaagggcagattcaccatcagccgggacaacagcaagaacaccgtgtacctccagatgaacagcctgagagccgaggacagcgccgtgtactactgtgccaaggatgaggatggcggctctctgctgggacacagaggacagggaacactggtcaccgtgtctagc

SEQ ID NO: 855 - DNA, 363 bp, Artificial Sequence
  Synthetic Polynucloetide
gaagtgcagctgcttgagtctggcggaggactggttcaacctggcggaagcctgagactgtcttgtgccgcctctggcttcgccttcagcatctacgatatgagctgggtccgacaggcccctggcaaaggacttgaatgggtgtccagcatcagcggcagcggcgactacatctactacgccgatagcgtgaagggcagattcaccatcagccgggacatcagcaagaacaccctgtacctccagatgaacagcctgagagccgaggacaccgccgtgtactactgtgccaaagaaggcaccggcgctaacagcagcctggccgattatagaggccagggcacactggtcaccgtgtctagt

SEQ ID NO: 856 - DNA, 363 bp, Artificial Sequence
  Synthetic Polynucloetide
gaggttcagctgcttgagtctggcggaggactggttcaacctggcggaagcctgagactgtcttgtgccgccagcggcttcacctttagcagctacgccatgagctgggtccgacaggctcctggcaaaggactggaatgggtgtccagcatcagcggcagcggcgactacatctactacgccgatagcgtgaagggcagattcaccatcagccgggacatcagcaagaacaccctgtacctccagatgaacagcctgagagccgaggacaccgccgtgtactactgtgccaaagaaggcaccggcgctaacagcagcctggccgattatagaggccagggcacactggtcaccgtgtctagt

SEQ ID NO: 857 - DNA, 354 bp, Artificial Sequence
  Synthetic Polynucloetide
caggtgcagctggttgaatctggcggaggactggttcagcctggcggatctctgagactgtcttgtgccgccagcggcttcaccttcaccaatcacgccatgagctgggtccgacaggcccctggaaaaggactggaactggtgtctagcatcagcggcaacggcagaaccacctactacgccgatagcgtgaagggcagattcaccatcagccgggacatcagcaagaacaccctggacctccagatgaacagcctgagagccgaggataccgccgtgtactactgtgccaaggatggcggagagacactggtggatagcagaggccagggcacactggtcacagtgtcatct

SEQ ID NO: 858 - DNA, 357 bp, Artificial Sequence
  Synthetic Polynucloetide
gaagtgcagctgcttgaaagtggcggcggactgattcagcctggcggatctctgagactgagctgtgccgccagcggcttcaccttttctagccacgccatgacctgggtccgacaggcacctggaaaagggcttgaatgggtgtccgccatcagcggctctggcgattacacacactacgccgacagcgtgaagggcagattcaccatcagcagagacaacagcaagaacaccgtgtacctccagatgaacagcctgagagccgaggacagcgccgtgtattattgcgccaaggatgaggatggcggcagcctgcttggacacagaggacaaggcaccctggtcaccgtttcttcc

SEQ ID NO: 859 - DNA, 360 bp, Artificial Sequence
  Synthetic Polynucloetide
caggttcagctgcaagagtctggcggaggactggttcaggctggcgatagcctgagactgtcttgtgccgcttctggcagagccgtgtccagcctgtttatgggctggtttcggagagcccctggcaaagagagagaactggttgccgccatcagccggtacagcctgtacacctactacgccgacagcgtgaagggcagattcaccatcagcgccgacaacgccaagaacgccgtgtacctccagatgaacagcctgaagcctgaggacacagccgtgtactactgcgccagcaaacttgagtacaccagcaacgactacgacagctggggccagggaacccaagtgacagtctcttct

SEQ ID NO: 860 - DNA, 360 bp, Artificial Sequence
  Synthetic Polynucloetide
gaagttcagctgcaagagtctggcggaggactggttcaacctggcggaagcctgagactgtcttgtgccgcctctggcagaaccttcagcagcctgttcatgggctggttcagacaggcccctggcaaagagagagaactggtcgccgccatcagccggtacagcctgtacacctactacgccgacagcgtgaagggcagattcaccatcagcgccgacaacgccaagaacgccgtgtacctccagatgaacagcctgaagccagaggacacagccgtgtactactgcgccagcaaacttgagtacaccagcaacgactacgacagctggggccagggaacccaagtgacagtctcttct

SEQ ID NO: 861 - DNA, 360 bp, Artificial Sequence
  Synthetic Polynucloetide
gaagttcagctgcaagagtctggcggaggactggttcaacctggcggaagcctgagactgtcttgtgccgcctctggcagaaccttcagcagcctgtttatgggctgggtccgacaggcccctggcaaaggactggaactggtgtctgccatcagccggtacagcctgtacacctactacgccgacagcgtgaagggcagattcaccatcagcagagacaacgccaagaacaccctgtacctccagatgaacagcctgcggcctgaggataccgccgtgtactactgcgccagcaaacttgagtacaccagcaacgactacgacagctggggccagggaacactggtcacagtctcttct

SEQ ID NO: 862 - DNA, 384 bp, Artificial Sequence
  Synthetic Polynucloetide
gaagtgcagctggttgaatctggcggaggactggttcagcctggcggatctctgagactgagctgtgaagccagcggcttcgccagcgacgattacatcatcggctggttcagacaggcccctggcaaagagagagagggcgtcagctgcatcagctctaagtacgccaacaccgtgtacaccgacagcgtgaagggcagattcagactgagcagaggcaccgccaagaataccgtgtacctccagatgagcgccctgaagcctgaggataccgccgtgtactactgcgctatggacagccgcagagtgacatgccctgagatcagcaccatgcaccggaacttcgattcttggggccagggcacactggtcacagtgtcatct

SEQ ID NO: 863 - DNA, 384 bp, Artificial Sequence
  Synthetic Polynucloetide
gaagtgcagctggttgaatctggcggaggactggttcagcctggcggatctctgagactgtcttgtgccgcctctggcttcgccagcgactactatatcatcggctggttcagacaggcccctggcaaagagagagagggcgtcagctgtatcagcagcagatacgccaacaccaactacgccgacagcgtgaagggcagattcaccatcagccgggacaacgccaagaacaccgtgtacctccagatgaacagcctgaagcctgaggacaccgccgtgtactactgtgccgccgacaccagaagatacacctgtcctgacattgccaccatgcaccggaacttcgattcttggggccagggcacactggtcaccgtttcttct

SEQ ID NO: 864 - DNA, 372 bp, Artificial Sequence
  Synthetic Polynucloetide
gaagtgcaactggtggaatctggaggctctctggtgcagccagggggaagcctgagactgtcttgtgccgcttccggcttcaccttcgacgactacgccatgagctgggtgcgccaggtgccaggcaaaggcctggaatgggtgtccagcatcaactggagcggcacccacaccgattacgccgactccgtgaaaggcagattcacaatcagcagaaacaacgccaacaataccctgtacctgcagatgaactccctgaagtctgaggatacagcagtgtattattgcgccaagaactggcgggacgccggcaccacttggtttgagaaaagcggctctgccggacagggaacccaagtgacagtgtcctcc

SEQ ID NO: 865 - DNA, 354 bp, Artificial Sequence
  Synthetic Polynucloetide
gaggtgcaactggtggaaagcggcggaggcctggtgcaggctggcggatctctgagactgagctgtgccgccagcggcatcaccttcagcatcaacacaatgggctggtacagacaggcccctggcaagcagagggaactggtggccctgatctccagcatcggcgacacctactacgccgacagcgtgaagggccggttcaccatcagccgggacaacgccaagaacaccgtgtacctccagatgaacagcctgaagcccgaggacaccgccgtgtactactgcaagcggttcagaacagccgcccagggcaccgattattggggccagggaacacaagtgaccgtgtcctct

SEQ ID NO: 866 - DNA, 357 bp, Artificial Sequence
  Synthetic Polynucloetide
gaagtgcaactggtggaatctgggggcggactggtgcagccaggcggaagtctgaggctgtcttgtgccgcctccggcagcatcttcggcttcaacgacatggcctggtatcggcaggctcccggaaaacagcgcgagctggtggctctgattagcagagtgggcgtgaccagcagcgccgactctgtgaagggcagattcacaatctccagagtgaacgccaaggatacagtgtacctccagatgaactctctgaaacctgaggatacagcagtgtactattgctacatggaccagcggctggacggcagcacactggcctactggggacagggaactcaagtgacagtgtctagc

SEQ ID NO: 867 - DNA, 360 bp, Artificial Sequence
  Synthetic Polynucloetide
gacgtgcaactcgtggaatccggcggaggcctggtgcagcctggcggatctctgagactgagctgtgccgccagcggctctatcggcggactgaatgccatggcctggtacagacaggcccctggcaaagaacgggaactggtggccggcatctttggcgtgggcagcaccagatacgccgacagcgtgaagggccggttcaccatcagccgggacaacagcaagaacaccgtgtacctgcagatgaacagcctgcggcccgaggataccgccgtgtactactgcagaatgtccagcgtgaccagaggctccagcgactactggggccagggaacacttgtgaccgtgtccagtctcgag

SEQ ID NO: 868 - DNA, 375 bp, Artificial Sequence
  Synthetic Polynucloetide
gaagtgcaactggtggagtccggcggtggactggtacagcctgggggttcactgcgcctgtcctgcgccgccagcggaagaacctattacctcaatgctatgggttggttccgccaggccccaggaaaggagcgcgagttcgtggcggctattgactggtccgaggggaacaaggactatgctgattccgtgaagggcaggtttaccatcagccgggataattcaaaaaatactgtttatttgcagatgaactctcttagaccagaagacactgctgtctattactgcgccgctgacacccctccttggggaccactgatttatatcgaaagctatgattcctgggggcagggcacactcgtcaccgtgagtagc

SEQ ID NO: 869 - DNA, 369 bp, Artificial Sequence
  Synthetic Polynucloetide
gaggtgcaactggtggaatccgggggaggcagcgtgcaggctgggggatcactgagactgtcttgtgctgcctccggcgacacctacggcagctattggatgggatggtttcggcaggctcccggaaaagaacgggaaggcgtggccgccatcaacagaggcggcggatacaccgtgtacgccgactctgtgaagggcagattcacaatctccagagacacagccaagaatactgtgtacctgcagatgaactccctgcgccccgacgataccgccgactattattgcgccgcttccggcgtgctgggcggcctgcatgaggactggttcaattattggggacagggaacacttgtgacagtgtccagc

SEQ ID NO: 870 - DNA, 366 bp, Artificial Sequence
  Synthetic Polynucloetide
gttcagctcgtggaaagcggtggcggaagtgtgcaggccggaggcagtttgcgcctgagctgcgctgcttccggcgatacatacgggtcttactggatgggctggtttaggcaggcacctggacaagaaagagaagctgtggccgctattaacaggggaggtggctataccgtttatgctgattccgtgaagggccgattcacaatctcccgggataacgccaaaaacactctgtacctgcagatgaactcccttaggcccgatgacacagccgattactattgtgcggcctccggcgtgctgggtggtctgcatgaggattggttcaactactgggggcaaggcaccctcgtaaccgtgagtagc

SEQ ID NO: 871 - DNA, 372 bp, Artificial Sequence
  Synthetic Polynucloetide
gaggtgcaactggtggaaagcggcggaggctctgtgcagacaggcggctctctgagactgacctgtgccgccagcggcagaaccagcagatcctatggcatgggctggttcagacaggcccctggcaaagaacgcgagttcgtgtccggcatctcttggagaggcgacagcaccggctacgccgatagcgtgaagggccggttcaccatcagccgggacaacgccaagaacaccgtggacctgcagatgaacagcctgaagcccgaggacaccgccatctactactgtgccgctgccgccggatctgcttggtacggcacactgtacgagtacgactactggggccagggcacccttgtgaccgtgtcatct

SEQ ID NO: 872 - DNA, 372 bp, Artificial Sequence
  Synthetic Polynucloetide
gaggtgcagctcgtagaatctggaggtggttccgtgcaagccggaggatcattgcgactgacctgcgcagcgagcggatctacttctcgctcttacggtatgggatggttcagacaggctcctgggaaagagcgcgagttcgtttcaggcatctcctggaggggggacagcaccggctacgcagatagcgtgaagggcaggttcacgatcagccgagacaacgccaaaaacaccgtcgatctgcaaatgaatagtctgaagcccgaagatactgcgatctactactgtgccgccgcagcagggtccacctggtacggcacactctacgagtacgactactgggggcagggaaccctggtaaccgtgtcctct

SEQ ID NO: 873 - DNA, 375 bp, Artificial Sequence
  Synthetic Polynucloetide
gatgttcagttggtggagtctggtggcggtttggtgcagccaggtggctccctgcgactcagttgtgcagcctccgggttcattctggattactacgctattggttggtttcgacaggcccccggaaaggagagagagggcgtgctctgcattgatgccagcgacgacattacctactacgccgattctgtgaagggccgcttcaccatcagtagagacaatagcaagaatacagtctacctgcagatgaactccctgcgcccagaagacactgccgtctactactgtgctacccctatcgggctttcttcctcttgccttctcgaatatgactacgattactgggggcaggggacgctggtcaccgtgtctagc

SEQ ID NO: 874 - DNA, 378 bp, Artificial Sequence
  Synthetic Polynucloetide
gaggtgcaactggtggaaagcggcggaggactggtgcaggctggcgatagcctgagactgagctgtgccgcctccggcagagccttcagcagatatgccatgggctggttcagacaggcccctggcaaagaacgcgagttcgtggccgccatcggctggggacctagcaagaccaactacgccgacagcgtgaagggccggttcaccatcagccgggacaacgccaagaacaccgtgtacctgcagatgaacaccctgaagcccgaggacaccgccgtgtactcttgcgccgccaagttcgtgaacaccgacagcacctggtcccgcagcgagatgtacacctattggggccagggcaccctcgtgaccgtgtctagt

SEQ ID NO: 875 - DNA, 366 bp, Artificial Sequence
  Synthetic Polynucloetide
gaggtgcagctggtagaatccggcgggggacttgtacaggctggtggtagtctgagactgagctgtgtggcctccggcatcagcagcagcaagcggaacatgggatggtataggcaagcccctggtaagcagagggaatccgtggctacaatcagcagcggcggcaacaaggactacaccgacgccgtgaaggacaggttcaccatctccagggacaccaccaagaacaccgtgtacctgcagatgaactccctcaagcccgaggacaccgccgtgtactactgcaagatcgaggccggcacaggctgggccaccagaagaggctacacatactgggggcagggaacactggtgaccgtgagctcc

SEQ ID NO: 876 - DNA, 336 bp, Artificial Sequence
  Synthetic Polynucloetide
caggtgcaactggtgcagtctggcggagggctggtgcagccagggggatctctgagactgagctgtgccgccagcgacttcgacttcgccgcctacgagatgagctgggtgcgccaggctcctggacagggactggaatgggtggccatcatcagccacgacggcatcgacaagtattacaccgacagcgtgaagggccggttcaccatcagccgggacaacagcaagaacaccctgtacctgcagatgaataccctgcgggccgaggacaccgccacctactattgcctgagactgggagccgtgggccagggcacacttgtgacagtgtctagc

SEQ ID NO: 877 - DNA, 360 bp, Artificial Sequence
  Synthetic Polynucloetide
caggtgcaactggtgcagagcggaggcggactggtgcagcctgggggcagtctgaggctgtcttgtgccgcctccgatttcgccttcgatgattacgagatgtcttgggtgcggcaggccccaggcaaagccctggaatggatcggcgacatcaaccacagcggcaccaccatctacaaccccagcctgaagtccagagtgaccatctccagagacaactccaagaatactctgtacctgcagatgaacacactgagagccgaagatacagccatctactactgcgccagaccccactacggcgactacagcgacgccttcgacatctggggccagggaaccatggtcaccgtgtcctct

SEQ ID NO: 878 - DNA, 345 bp, Artificial Sequence
  Synthetic Polynucloetide
gaggtgcagctcgtggaatcaggcggaggtcttgtacagccaggaaattctcttcggctgtcttgcgccgcgagcgggttcaccttcagcagcttcggaatgagctgggtaagacaggcaccggggaaaggcctggagtgggtgagctcaatcagtgggagcgggtcagataccctgtacgcggattccgtgaagggcagattcacaatctctcgggacaatgctaagacaacactttaccttcagatgaactctctgcgacccgaggataccgctgtctactactgtacaataggaggttctctgtccagaagttctcaagggacactggtgaccgtctccagc

SEQ ID NO: 879 - DNA, 348 bp, Artificial Sequence
  Synthetic Polynucloetide
gaagttcaactggtggaatccggtggaggactggtgcaagcgggcggctcactgcgccttagctgtgctgccagcggcagtatcttcagcggcaatgtaatgggttggtacaggcgacaagccccaggcaaggagcgagagtgggtagccgcgattgcaagtgggggcagcatctactacagagattctgtgaaaggccgcttcactattagtcgggacaacgcaaaaaacacggtgtatctccaaatgaacagcttgaagccagaggacactgctgtctactattgtaacagtcatcccccaactctcccctattgggggctgggcactcaggtcaccgtgagttcc

SEQ ID NO: 880 - DNA, 378 bp, Artificial Sequence
  Synthetic Polynucloetide
gaagtgcaactggtggaatctggagggggaagcgtgcaggcaggcggatctctgagactgtcctgcaccacatctggcagagccctgaatatgtacgtgatgggatggtttcggcaggctcccggcaacgagcgggaatttgtggccgctacaagcagcagcggcggcagcacaagctaccccgattctgtgaagggcagattcacaatctcccgcgataatgccaagaatactgtgtacctgcagatgaatagtctgaagcctgaagatacagccgcctacagatgtgccgccagcccctacgtgtccacccccaccatgaacatcctggaagagtacagatactggggcctgggaacacaagtgacagtgtccagc

SEQ ID NO: 881 - DNA, 363 bp, Artificial Sequence
  Synthetic Polynucloetide
gaggttcagttggtcgaatcaggcgggggcctcgtccaacccggcggaagcctgcggctgtcttgcgcagcaagtggtagtgtgttcaagatcaacgttatggcctggtatcgccaggctccgggaaaagggagagagctggttgcggggatcattagcggtggctccaccagctacgctgacagtgtgaagggaaggttcactatatcacgcgacaacgcaaagaatacattgtacctccagatgaatagcttgcggcccgaagacacggcagtctactattgtgcctttatcacaacagagagcgactatgacctgggccgccggtattgggggcagggaacccttgtgaccgtttcatcc

SEQ ID NO: 882 - DNA, 798 bp, Artificial Sequence
  Synthetic Polynucloetide
gaggtgcaactggtggaaagcggcggaggctctgtgcagacaggcggctctctgagactgacctgtgccgccagcggcagaaccagcagatcctatggcatgggctggttcagacaggcccctggcaaagaacgcgagttcgtgtccggcatctcttggagaggcgacagcaccggctacgccgatagcgtgaagggccggttcaccatcagccgggacaacgccaagaacaccgtggacctgcagatgaacagcctgaagcccgaggacaccgccatctactactgtgccgctgccgccggatctgcttggtacggcacactgtacgagtacgactactggggccagggcacccttgtgaccgtgtcatctctcgagggcggaggcggaagtggaggcggaggatctggcggcggaggctctttcgaagaggtgcaactggtggaatccgggggaggcagcgtgcaggctgggggatcactgagactgtcttgtgctgcctccggcgacacctacggcagctattggatgggatggtttcggcaggctcccggaaaagaacgggaaggcgtggccgccatcaacagaggcggcggatacaccgtgtacgccgactctgtgaagggcagattcacaatctccagagacacagccaagaatactgtgtacctgcagatgaactccctgcgccccgacgataccgccgactattattgcgccgcttccggcgtgctgggcggcctgcatgaggactggttcaattattggggacagggaacacttgtgacagtgtccagc

SEQ ID NO: 883 - DNA, 855 bp, Artificial Sequence
  Synthetic Polynucloetide
gaggtgcagctcgtagaatctggaggtggttccgtgcaagccggaggatcattgcgactgacctgcgcagcgagcggatctacttctcgctcttacggtatgggatggttcagacaggctcctgggaaagagcgcgagttcgtttcaggcatctcctggaggggggacagcaccggctacgcagatagcgtgaagggcaggttcacgatcagccgagacaacgccaaaaacaccgtcgatctgcaaatgaatagtctgaagcccgaagatactgcgatctactactgtgccgccgcagcagggtccacctggtacggcacactctacgagtacgactactgggggcagggaaccctggtaaccgtgtcctctctcgagggaggaggcggctccgggggaggcggaagtggaggcggaggatctgggtctggaggaagcggatctggaggctcagggtcagggggctcaggcagtggaggctctttcgaagttcagctcgtggaaagcggtggcggaagtgtgcaggccggaggcagtttgcgcctgagctgcgctgcttccggcgatacatacgggtcttactggatgggctggtttaggcaggcacctggacaagaaagagaagctgtggccgctattaacaggggaggtggctataccgtttatgctgattccgtgaagggccgattcacaatctcccgggataacgccaaaaacactctgtacctgcagatgaactcccttaggcccgatgacacagccgattactattgtgcggcctccggcgtgctgggtggtctgcatgaggattggttcaactactgggggcaaggcaccctcgtaaccgtgagtagc

SEQ ID NO: 884 - DNA, 825 bp, Artificial Sequence
  Synthetic Polynucloetide
gaggtgcaactggtggaaagcggcggaggcctggtgcaggctggcggatctctgagactgagctgtgccgccagcggcatcaccttcagcatcaacacaatgggctggtacagacaggcccctggcaagcagagggaactggtggccctgatctccagcatcggcgacacctactacgccgacagcgtgaagggccggttcaccatcagccgggacaacgccaagaacaccgtgtacctccagatgaacagcctgaagcccgaggacaccgccgtgtactactgcaagcggttcagaacagccgcccagggcaccgattattggggccagggaacacaagtgaccgtgtcctctctcgagggaggaggcggctccgggggaggcggaagtggaggcggaggatctgggtctggaggaagcggatctggaggctcagggtcagggggctcaggcagtggaggctctttcgaagtgcaactggtggaatctgggggcggactggtgcagccaggcggaagtctgaggctgtcttgtgccgcctccggcagcatcttcggcttcaacgacatggcctggtatcggcaggctcccggaaaacagcgcgagctggtggctctgattagcagagtgggcgtgaccagcagcgccgactctgtgaagggcagattcacaatctccagagtgaacgccaaggatacagtgtacctccagatgaactctctgaaacctgaggatacagcagtgtactattgctacatggaccagcggctggacggcagcacactggcctactggggacagggaactcaagtgacagtgtctagc

SEQ ID NO: 885 - DNA, 726 bp, Artificial Sequence; identical to SEQ ID NO: 585
  Synthetic Polynucloetide

SEQ ID NO: 886 - DNA, 840 bp, Artificial Sequence
  Synthetic Polynucloetide
gacgtgcaactcgtggaatccggcggaggcctggtgcagcctggcggatctctgagactgagctgtgccgccagcggctctatcggcggactgaatgccatggcctggtacagacaggcccctggcaaagaacgggaactggtggccggcatctttggcgtgggcagcaccagatacgccgacagcgtgaagggccggttcaccatcagccgggacaacagcaagaacaccgtgtacctgcagatgaacagcctgcggcccgaggataccgccgtgtactactgcagaatgtccagcgtgaccagaggctccagcgactactggggccagggaacacttgtgaccgtgtccagtctcgagggaggaggcggctccgggggaggcggaagtggaggcggaggatctgggtctggaggaagcggatctggaggctcagggtcagggggctcaggcagtggaggctctttcgaagtgcaactggtggaatctggaggctctctggtgcagccagggggaagcctgagactgtcttgtgccgcttccggcttcaccttcgacgactacgccatgagctgggtgcgccaggtgccaggcaaaggcctggaatgggtgtccagcatcaactggagcggcacccacaccgattacgccgactccgtgaaaggcagattcacaatcagcagaaacaacgccaacaataccctgtacctgcagatgaactccctgaagtctgaggatacagcagtgtattattgcgccaagaactggcgggacgccggcaccacttggtttgagaaaagcggctctgccggacagggaacccaagtgacagtgtcctcc

SEQ ID NO: 887 - DNA, 864 bp, Artificial Sequence
  Synthetic Polynucloetide
gatgttcagttggtggagtctggtggcggtttggtgcagccaggtggctccctgcgactcagttgtgcagcctccgggttcattctggattactacgctattggttggtttcgacaggcccccggaaaggagagagagggcgtgctctgcattgatgccagcgacgacattacctactacgccgattctgtgaagggccgcttcaccatcagtagagacaatagcaagaatacagtctacctgcagatgaactccctgcgcccagaagacactgccgtctactactgtgctacccctatcgggctttcttcctcttgccttctcgaatatgactacgattactgggggcaggggacgctggtcaccgtgtctagcctcgagggaggtagcggctccgggggaggcggaagtggaggcggaggatctgggtctggaggaagcggatctggaggctcagggtcagggggctcaggcagtggaggctctttcgaagtgcaactggtggagtccggcggtggactggtacagcctgggggttcactgcgcctgtcctgcgccgccagcggaagaacctattacctcaatgctatgggttggttccgccaggccccaggaaaggagcgcgagttcgtggcggctattgactggtccgaggggaacaaggactatgctgattccgtgaagggcaggtttaccatcagccgggataattcaaaaaatactgtttatttgcagatgaactctcttagaccagaagacactgctgtctattactgcgccgctgacacccctccttggggaccactgatttatatcgaaagctatgattcctgggggcagggcacactcgtcaccgtgagtagc

SEQ ID NO: 888 - DNA, 813 bp, Artificial Sequence
  Synthetic Polynucloetide
caggtgcaactggtgcagtctggcggagggctggtgcagccagggggatctctgagactgagctgtgccgccagcgacttcgacttcgccgcctacgagatgagctgggtgcgccaggctcctggacagggactggaatgggtggccatcatcagccacgacggcatcgacaagtattacaccgacagcgtgaagggccggttcaccatcagccgggacaacagcaagaacaccctgtacctgcagatgaataccctgcgggccgaggacaccgccacctactattgcctgagactgggagccgtgggccagggcacacttgtgacagtgtctagcctcgagggaggaggcggctccgggggaggcggaagtggaggcggaggatctgggtctggaggaagcggatctggaggctcagggtcagggggctcaggcagtggaggcagcttcgaacaggtgcaactggtgcagagcggaggcggactggtgcagcctgggggcagtctgaggctgtcttgtgccgcctccgatttcgccttcgatgattacgagatgtcttgggtgcggcaggccccaggcaaagccctggaatggatcggcgacatcaaccacagcggcaccaccatctacaaccccagcctgaagtccagagtgaccatctccagagacaactccaagaatactctgtacctgcagatgaacacactgagagccgaagatacagccatctactactgcgccagaccccactacggcgactacagcgacgccttcgacatctggggccagggaaccatggtcaccgtgtcctct

SEQ ID NO: 889 - DNA, 357 bp, Artificial Sequence
  Synthetic Polynucloetide
caagtgaagctggaagagtctggcggaggactggtgcaggctggaagaagcctgagactgtcttgtgccgccagcgagcacacctttagctctcacgtgatgggctggttcagacaggcccctggcaaagaaagggaaagcgtggccgttatcggctggcgggatattagcaccagctacgccgatagcgtgaagggcagattcaccatcagccgggacaacgccaagaaaaccctgtacctccagatgaacagcctgaagccagaggacaccgccgtgtactactgcgccgccagaagaattgacgccgccgactttgattcttggggccagggaacccaagtgaccgtttctagc

SEQ ID NO: 890 - DNA, 354 bp, Artificial Sequence
  Synthetic Polynucloetide
gaagtgcaactggttgaatccggtggcggcctggtgcaagcaggcggatctctcagacttagctgtgccgcctccggcagaaccttcacaatgggatggtttaggcaggctccagggaaagagagagagttcgtcgccgccatctctctgtctcccacactggcctactacgccgagtctgtgaaaggccggttcaccatctccagagataatgccaagaacaccgtggtgctgcaaatgaactctctgaaacccgaggatacagccctgtactattgtgccgctgaccggaagtccgtgatgagcatcagacccgattactggggacagggcacacaagtcacagtgtcctct

SEQ ID NO: 891 - DNA, 756 bp, Artificial Sequence
  Synthetic Polynucloetide
caagtgaagctggaagagtctggcggaggactggtgcaggctggaagaagcctgagactgtcttgtgccgccagcgagcacacctttagctctcacgtgatgggctggttcagacaggcccctggcaaagaaagggaaagcgtggccgttatcggctggcgggatattagcaccagctacgccgatagcgtgaagggcagattcaccatcagccgggacaacgccaagaaaaccctgtacctccagatgaacagcctgaagccagaggacaccgccgtgtactactgcgccgccagaagaattgacgccgccgactttgattcttggggccagggaacccaagtgaccgtttctagcggaggcggtggaagtggcggcggtggttcaggcggcggaggatctgaagtgcaactggttgaatccggtggcggcctggtgcaagcaggcggatctctcagacttagctgtgccgcctccggcagaaccttcacaatgggatggtttaggcaggctccagggaaagagagagagttcgtcgccgccatctctctgtctcccacactggcctactacgccgagtctgtgaaaggccggttcaccatctccagagataatgccaagaacaccgtggtgctgcaaatgaactctctgaaacccgaggatacagccctgtactattgtgccgctgaccggaagtccgtgatgagcatcagacccgattactggggacagggcacacaagtcacagtgtcctct

SEQ ID NO: 892 - DNA, 348 bp, Artificial Sequence
  Synthetic Polynucloetide
gaggtgcaactggttgagtctggcggaggactggttcaggcaggcggatctctgagactgagctgtatcgccaccggcaaggtgttcagcatctacgacatgggctggtacagacaggcccctggcaagcagagagagctggttgccgagatcacaagcagcggcaccacacactacgacgacttcgtgtccggcagattcaccatcagccgggacaacgccaagaacaccgtgtacctccagatgaacaccctgaaggccgaggacaccgccgtgtactactgtagagccaaccacgtgttcggcggcagctattggggacagggaacccaagtgacagtgtctagt

SEQ ID NO: 893 - DNA, 366 bp, Artificial Sequence
  Synthetic Polynucloetide
caggtgcagcttgttgaaagcggaggtggcctggttcaacctggcggaagcctgagactgtcctgtgaagccagcggctttaccctggactactacgccatcggctggtttagacaagctcccggcaaagagagagagggcgtcatctgcatcagcagatccgacggcagcacctactatgccgacagcgtgaagggacgcttcaccatctccagagacaatgccaaaaagacggtctacctgcaaatgatctccctcaagcctgaggataccgccgcctactattgtgccgctggcgctgattgcagcggctacctgagagactacgagttcagaggccagggcacacaagtgaccgtcagctct

SEQ ID NO: 894 - DNA, 735 bp, Artificial Sequence
  Synthetic Polynucloetide
gaggtgcaactggttgagtctggcggaggactggttcaggcaggcggatctctgagactgagctgtatcgccaccggcaaggtgttcagcatctacgacatgggctggtacagacaggcccctggcaagcagagagagctggttgccgagatcacaagcagcggcaccacacactacgacgacttcgtgtccggcagattcaccatcagccgggacaacgccaagaacaccgtgtacctccagatgaacaccctgaaggccgaggacaccgccgtgtactactgtagagccaaccacgtgttcggcggcagctattggggacagggaacccaagtgacagtgtctagtgaggtggccgctttggagaaacaggtgcagcttgttgaaagcggaggtggcctggttcaacctggcggaagcctgagactgtcctgtgaagccagcggctttaccctggactactacgccatcggctggtttagacaagctcccggcaaagagagagagggcgtcatctgcatcagcagatccgacggcagcacctactatgccgacagcgtgaagggacgcttcaccatctccagagacaatgccaaaaagacggtctacctgcaaatgatctccctcaagcctgaggataccgccgcctactattgtgccgctggcgctgattgcagcggctacctgagagactacgagttcagaggccagggcacacaagtgaccgtcagctct

SEQ ID NO: 895 - DNA, 384 bp, Artificial Sequence
  Synthetic Polynucloetide
caagtgaagctggaagagtctggcggcagactggtgcagcctagaggaagcctgagactgtcttgtgccggcagcggcagaacctttagcacatacggcatggcctggttcagacaggcccctggaaaagagagagagttcgtcgccagcaaggccagcatgaactactccggcaggacctactacgccgacagcgtgaagggcagattcacaatcgccagagacaacgccaagaacatggtgttcctccagatgaacaatctgaagcccgaggacaccgccgtgtactattgtgccgctggcacaggctgtagcacctacggctgtttcgacgcccagatcatcgactactggggcaagggcacactggtcacagtttctagc

SEQ ID NO: 896 - DNA, 357 bp, Artificial Sequence
  Synthetic Polynucloetide
caagtcaaactggaagaaagcggtggcggcctggtgcaacctggcgaatctctgagactgagctgtagcgccagcggctccatcttcaaggtgttcagagtgttcgccatgagctggtacaggcaaggccctggcaagcagagagagctggtcgcctctatcagcagcggcgagacaaccacatacgccgactctgtgaaaggccggttcaccatcagccgggataatgccaagaataccgcctatctccagatggactccctgaagcctgaagatacagctgtgtactactgcaacgccgaccataccttcaccggcgatttttggggccagggaacccaagtgaccgtgtctagt

SEQ ID NO: 897 - DNA, 762 bp, Artificial Sequence
  Synthetic Polynucloetide
caagtgaagctggaagagtctggcggcagactggtgcagcctagaggaagcctgagactgtcttgtgccggcagcggcagaacctttagcacatacggcatggcctggttcagacaggcccctggaaaagagagagagttcgtcgccagcaaggccagcatgaactactccggcaggacctactacgccgacagcgtgaagggcagattcacaatcgccagagacaacgccaagaacatggtgttcctccagatgaacaatctgaagcccgaggacaccgccgtgtactattgtgccgctggcacaggctgtagcacctacggctgtttcgacgcccagatcatcgactactggggcaagggcacactggtcacagtttctagcgaggtggccgctttggagaaacaagtcaaactggaagaaagcggtggcggcctggtgcaacctggcgaatctctgagactgagctgtagcgccagcggctccatcttcaaggtgttcagagtgttcgccatgagctggtacaggcaaggccctggcaagcagagagagctggtcgcctctatcagcagcggcgagacaaccacatacgccgactctgtgaaaggccggttcaccatcagccgggataatgccaagaataccgcctatctccagatggactccctgaagcctgaagatacagctgtgtactactgcaacgccgaccataccttcaccggcgatttttggggccagggaacccaagtgaccgtgtctagt

SEQ ID NO: 898 - DNA, 351 bp, Artificial Sequence
  Synthetic Polynucloetide
caagtgaagctggaagagtctggcggagagctggttcaacctggcggacctctgagactgtcttgtgccgccagcggcaacatcttcagcatcaaccggatgggctggtacagacaggcccctggaaaacagagagccttcgtcgcctctatcaccgtgcggggcatcaccaattacgccgactctgtgaagggcagattcaccatcagcgtggacaagagcaagaacaccatctacctccagatgaacgccctgaagcctgaggacaccgccgtgtactactgcaatgccgtgtccagcaacagggaccccgattattggggccagggcacccaagtgacagtgtctagt

SEQ ID NO: 899 - DNA, 387 bp, Artificial Sequence
  Synthetic Polynucloetide
cctgttcaactggttgaatctggcggcggactggtgcaggctggcgatagtctcagactgagctgtgccgcctccggcagaacatttggcatcggcacaatgggatggttccggcagcctcctggaaaagaacgcgaatttgtggccgccatcagatggtctacaggcggcaccagatacgccgacagcgtgaaaggccggtttaccatcagcagagacaacgccaagctgaccgtggatctccagatggatagcctgaaaccagaggatacagccgtctattactgcgccgctgacaggctgagcctggatctgtctggcagataccactacaaccctgccgtgtacgactactggggacagggaacacaagtcaccgtgtcctct

SEQ ID NO: 900 - DNA, 783 bp, Artificial Sequence
  Synthetic Polynucloetide
caagtgaagctggaagagtctggcggagagctggttcaacctggcggacctctgagactgtcttgtgccgccagcggcaacatcttcagcatcaaccggatgggctggtacagacaggcccctggaaaacagagagccttcgtcgcctctatcaccgtgcggggcatcaccaattacgccgactctgtgaagggcagattcaccatcagcgtggacaagagcaagaacaccatctacctccagatgaacgccctgaagcctgaggacaccgccgtgtactactgcaatgccgtgtccagcaacagggaccccgattattggggccagggcacccaagtgacagtgtctagtggaggcggtggaagtggcggcggtggttcaggcggcggaggatctcctgttcaactggttgaatctggcggcggactggtgcaggctggcgatagtctcagactgagctgtgccgcctccggcagaacatttggcatcggcacaatgggatggttccggcagcctcctggaaaagaacgcgaatttgtggccgccatcagatggtctacaggcggcaccagatacgccgacagcgtgaaaggccggtttaccatcagcagagacaacgccaagctgaccgtggatctccagatggatagcctgaaaccagaggatacagccgtctattactgcgccgctgacaggctgagcctggatctgtctggcagataccactacaaccctgccgtgtacgactactggggacagggaacacaagtcaccgtgtcctct

SEQ ID NO: 901 - DNA, 357 bp, Artificial Sequence
  Synthetic Polynucloetide
gccgtgcaactggttgaatctggcggaggactggtgcaggctggcgattctctgagactgacctgtacagccagcggcagagccttcagcacctacttcatggcctggttcagacaggcccctggcaaagagagagagttcgtcgccggaatcgcttggagcggaggctctacagcctacgccgattctgtgaagggcagattcaccatcagccgggacaacgccaagaacaccgtgtacctccagatgaacagcctgaagtccgaggacaccgccgtgtactactgtgccagcagaggcatcgaggtggaagagtttggagcctggggccagggaacccaagtgacagtttcttct

SEQ ID NO: 902 - DNA, 360 bp, Artificial Sequence
  Synthetic Polynucloetide
caggttcaactggtggaaagtggcggtggcttggtgcaagcaggcggctctcttagactgtcttgtgctgcctctggcggcaccctgagcaagaataccgtggcatggtttaggcaggctcccggaaaagagcggggctttgtcgccagcatcacctgggatggcagaaccacctactacgccgacagcgtgaaaggccggttcaccatctccagagataatgccaagaatacggtctacttgcaaatgaactccctgaagcctgaagatacagccgtgtacgtgtgcgccgatctcggcaaatggcctgctggacctgccgattattggggacagggcacacaagtcaccgtgtcctct

SEQ ID NO: 903-942 - skipped (40 entries)

SEQ ID NO: 943 - DNA, 426 bp, Artificial Sequence
  Synthetic Polynucloetide
atggccttaccagtgaccgccttgctcctgccgctggccttgctgctccacgccgccaggccggaagtgcaactggttgaatctggcggcggactggttaagcctggcggatctctgaagctgagctgtgccgccagcggctacacctttaccagctactgtatgggctgggtccgacgagcccctggcaaagaagaggagctgatcggctacatctgcccctacaacgatggcaccaagtacaacgagaagttccagggcagagtgaccatcagctccgacaagagcatcagcaccgcctacatggaactgagcagcctgagaagcgaggataccgccatgtactattgcgccagaggcacctactactacggcaccagagtgttcgactacagaggccagggaaccctggtcacagtctcttct

SEQ ID NO: 944-947 - skipped (4 entries)

SEQ ID NO: 948 - DNA, 372 bp, Artificial Sequence
  Synthetic Polynucloetide
gaggtgcaactggttgagtctggcggaggactggtgcagcctggaagaagcctgagactgtcttgtgccgccagcggcttcaccttcgacgattatgccatgggctgggtccgaagagcccctggcaaagaagaggaactggtgtccggcatctcctggaacagcggctctatcggctacgccgattccgtgaagggcagattcaccatcagccgggacaacgccaagaacagcctgtacctccagatgaactccctgagagccgaggacacagccctgtactactgcgccaaagacaaaggcggaggctactacgacttttggagcggcagcgattatagaggccagggcacactggtcacagtgtctagc

SEQ ID NO: 949-950 - skipped (2 entries)

SEQ ID NO: 951 - DNA, 363 bp, Artificial Sequence
  Synthetic Polynucloetide
gaagtgcaactggttgaatctggcggcggactggttaagcctggcggatctctgaagctgagctgtgccgccagcggctacacctttaccagctactgtatgggctgggtccgacgagcccctggcaaagaagaggagctgatcggctacatctgcccctacaacgatggcaccaagtacaacgagaagttccagggcagagtgaccatcagctccgacaagagcatcagcaccgcctacatggaactgagcagcctgagaagcgaggataccgccatgtactattgcgccagaggcacctactactacggcaccagagtgttcgactacagaggccagggaaccctggtcacagtctcttct

SEQ ID NO: 952-953 - skipped (2 entries)

SEQ ID NO: 954 - DNA, 357 bp, Artificial Sequence; identical to SEQ ID NO: 850
  Synthetic Polynucloetide

SEQ ID NO: 955 - DNA, 357 bp, Artificial Sequence; identical to SEQ ID NO: 851
  Synthetic Polynucloetide

SEQ ID NO: 956-959 - skipped (4 entries)

SEQ ID NO: 960 - DNA, 29 bp, Artificial Sequence
  Synthetic Polynucloetide
ggggggggggggggggggggggggggggg

SEQ ID NO: 961 - DNA, 405 bp, Artificial Sequence
  Synthetic Polynucloetide
atggcctgtcctggcttcctgtgggctcttgtgatctccacctgtcttgagttcagcatggcccagaccgtgacacagagccagcctgagatgtctgtgcaagaggccgagacagtgaccctgagctgcacctacgataccagcgagagcgactactacctgttctggtacaagcagcctcctagccggcagatgatcctggtcatccggcaagaagcctataagcagcagaacgccaccgagaacagattcagcgtgaacttccagaaggccgccaagagcttcagcctgaagatcagcgatagccagctgggcgacgccgccatgtacttttgcgcttatagaagcgccgtgaacgcccggctgatgtttggagatggcacacagctggtggtcaagcccaac

SEQ ID NO: 962 - DNA, 411 bp, Artificial Sequence
  Synthetic Polynucloetide
atgaccatccggctgctgtgctatatgggcttctacttcctcggagccggcctgatggaagccgacatctaccagacacctagatacctggtcatcggcaccggcaagaaaatcaccctggaatgcagccagacaatgggccacgacaagatgtactggtatcagcaggaccccggcatggaactgcacctgatccactacagctacggcgtgaacagcaccgagaagggcgatctgtctagcgagagcaccgtgtccagaatcagaaccgagcacttcccactgacactggaaagcgccagacctagccacaccagccagtacctgtgtgcctcttctgaggccagaggactggccgagttcaccgacacacagtatttcggccctggcaccagactgaccgttctcgag

SEQ ID NO: 963 - DNA, 345 bp, Artificial Sequence
  Synthetic Polynucloetide
gcccagaccgtgacacagagccagcctgagatgtctgtgcaagaggccgagacagtgaccctgagctgcacctacgataccagcgagagcgactactacctgttctggtacaagcagcctcctagccggcagatgatcctggtcatccggcaagaagcctataagcagcagaacgccaccgagaacagattcagcgtgaacttccagaaggccgccaagagcttcagcctgaagatcagcgatagccagctgggcgacgccgccatgtacttttgcgcttatagaagcgccgtgaacgcccggctgatgtttggagatggcacacagctggtggtcaagcccaac

SEQ ID NO: 964 - DNA, 354 bp, Artificial Sequence
  Synthetic Polynucloetide
gaagccgacatctaccagacacctagatacctggtcatcggcaccggcaagaaaatcaccctggaatgcagccagacaatgggccacgacaagatgtactggtatcagcaggaccccggcatggaactgcacctgatccactacagctacggcgtgaacagcaccgagaagggcgatctgtctagcgagagcaccgtgtccagaatcagaaccgagcacttcccactgacactggaaagcgccagacctagccacaccagccagtacctgtgtgcctcttctgaggccagaggactggccgagttcaccgacacacagtatttcggccctggcaccagactgaccgttctcgag

SEQ ID NO: 965 - DNA, 342 bp, Artificial Sequence
  Synthetic Polynucloetide
caagaagtgacacagatccctgccgctctgtctgtgcctgagggcgaaaacctggtgctgaactgctccttcaccgacagcgccatctacaacctccagtggttcaggcaggaccctggaaagggactgacaagcctgctgctgatccagagcagccagagagagcagacctccggcagactgaatgccagcctggataagagcagcggcaggtctaccctgtatatcgccgcttctcagcctggcgatagcgccacatatctgtgtgctgtgcggcctacaagcggcggcagctacatccctacatttggcagaggcaccagcctgatcgtgcacccttat

SEQ ID NO: 966 - DNA, 342 bp, Artificial Sequence
  Synthetic Polynucloetide
aatgctggcgtgacccagacacctaagttccaggtgctgaaaaccggccagagcatgaccctgcaatgcgcccaggacatgaaccatgagtacatgagctggtacagacaggaccccggcatgggcctgagactgatccactactctgtggctatccagaccaccgaccagggcgaagtgcccaatggctacaacgtgtccagaagcaccatcgaggacttcccactgagactgctgtctgccgctcctagccagaccagcgtgtacttttgtgccagcagctacctgggcaacaccggcgagctgttttttggcgagggcagcagactgaccgtgctcgag

SEQ ID NO: 967 - DNA, 332 bp, Artificial Sequence
  Synthetic Polynucloetide
atcctgaacgtggaacagagccctcagagcctgcatgtgcaagagggcgacagcaccaacttcacctgtagcttccccagcagcaacttctacgccctgcactggtacagatgggagacagccaagtctcccgaggcactgttcgtgatgaccctgaacggcgacgagaagaagaagggcagaatcagcgccacactgaacaccaaagagggctactcctacctgtacatcaagggcagccagcctgaggacagcgccacttatctgtgcgccagaaacaccggcaaccagttctactttggcaccggcacaagcctgacagtgatccccaa

SEQ ID NO: 968 - DNA, 339 bp, Artificial Sequence
  Synthetic Polynucloetide
ggcgtgacccagacacctaagttccaggtgctgaaaaccggccagagcatgaccctgcaatgcgcccaggacatgaaccatgagtacatgagctggtacaggcaggaccctggcatgggcctgagactgatccactattctgtcggagccggcatcaccgaccagggcgaagttcctaatggctacaacgtgtccagaagcaccaccgaggacttcccactgagactgctgtctgccgctcctagccagaccagcgtgtacttttgcgccagcagctttcagaccggcgcttcctacggctacacattcggctctggcaccagactgaccgtgctcgag

SEQ ID NO: 969 - DNA, 360 bp, Artificial Sequence
  Synthetic Polynucloetide
gccattgagctggtgcctgagcaccagaccgtgcctgtgtctattggagtgcccgccacactgcggtgtagcatgaagggcgaagccatcggcaactactacatcaactggtacagaaagacccagggcaacaccatgaccttcatctacagagagaaggacatctacggccctggcttcaaggacaacttccagggcgacatcgacattgccaagaacctggccgtgctgaagattctggcccctagcgagagagatgagggcagctactactgcgcctgtgacacacttggaatgggcggcgagtacaccgacaagctgatcttcggcaagggcaccagagtgaccgtggaacctaga

SEQ ID NO: 970 - DNA, 378 bp, Artificial Sequence
  Synthetic Polynucloetide
gctggacatctggaacagccccagatcagcagcaccaagacactgagcaagaccgccagactggaatgcgtggtgtccggcatcacaatcagcgccacaagcgtgtactggtacagagaaagacccggcgaagtgatccagttcctggtgtccatcagctacgatggcaccgtgcggaaagagagcggcatcccttctggcaagttcgaggtggacagaatccccgagacaagcaccagcacactgaccatccacaacgtggaaaagcaggacattgccacctactactgcgccctgtgggaagcccaacaagagctgggcaagaaaatcaaggtgttcggccctggcaccaagctgattatcaccgacaagcagctg

SEQ ID NO: 971 - skipped

SEQ ID NO: 972 - DNA, 372 bp, Artificial Sequence
  Synthetic Polynucloetide
ggctctgacctgggcatcaagctgctgttcgccgctgccaagggccaggacgacgaagtgcggattctgctggctgctggggccgacgtgaacgccaaggatttcgagggctacacccccctgcacgtggccgcctatgatggacacctggaaatcgtggaagtgctgctgaaggctggcgctgatgtgaatgccaaagacagccagggccggacccctctgcatgaagccgcctacagcggccatctggaaattgtggaagtgctgctgaaagccggggcagacgtgaacgctcaggacgacgctggcgagacaccagccgatctggctgcagcttggggccacgaagatatcgccgaggtgctgcagaag

SEQ ID NO: 973 - DNA, 378 bp, Artificial Sequence
  Synthetic Polynucloetide
agaagcgatctgggaaagaagctgctggaagctgccagagccggacaggatgatgaagtgcgcatcctgatggcaaacggcgcagatgtgaacgcaaaggacgagtacggcctgacccccctgtacctggctacagcccacgggcacctggaaattgtggaagtgctgctgaagaacggcgctgacgtgaacgccgtggacgccatcggctttaccccactgcatctggccgctttcatcgggcatctcgaaatcgcagaggtgctgctgaaacacggggccgatgtgaatgcccaggacaagttcggcaagaccgccttcgacatcagcatcggcaacggcaacgaggacctggccgagatcctgcagaaactgaac

SEQ ID NO: 974 - DNA, 174 bp, Artificial Sequence
  Synthetic Polynucloetide
gtggacaacaagttcaacaaagagcggtacagcgcctactacgagatttggcaactgcccaacctgaacgtgcggcagaaggccgccttcatcggatctctgcaggacgaccctagccagagcgccaatctgctggccgaggccaagaagctgaacgacgcccaggcccctaaa

SEQ ID NO: 975 - DNA, 153 bp, Artificial Sequence
  Synthetic Polynucloetide
tacgccaaagagatgcggaacgcctactgggagatcgccctgctgcccaatctgaccaaccagcagaagagagcccccatcagaaagctgtacgacgacccctcccagagcagcgagctgctgtctgaggctaaaaaactgaacgatagccag

SEQ ID NO: 976 - DNA, 153 bp, Artificial Sequence
  Synthetic Polynucloetide
tatgccaaagaaatgtggattgcctgggaggaaatccgcaacctgcctaatctgaatggctggcagatgaccgcctttatcgctaagctgctggatgaccccagccagtcctctgagctgctgagcgaagcaaagaaactgaatgactcccag

SEQ ID NO: 977 - DNA, 267 bp, Artificial Sequence
  Synthetic Polynucloetide
ctgccagccccgaagaatttggtcgtttcccgtgtcactgaggactctgcacgtctgagctggaccgcaccggacgcggcgttcgacagctttgcaatcggctactgggagtgggatgatgacggcgaggccattgtgctgaccgttccgggtagcgagcgcagctacgatctgaccggtctgaagccgggtacggaatatccggtgtatattgcgggcgtgaagggtggccagtggagcttcccgctgagcgcgatctttaccacc

SEQ ID NO: 978 - DNA, 273 bp, Artificial Sequence
  Synthetic Polynucloetide
ctgccggctccgaaaaacctggtcgtttcccgtgtcactgaagattctgcacgcttgagctgggcgatcgacgagcagcgtgactggtttgagagcttcctgattcagtatcaagaatcggaaaaagttggcgaggccatcgtgctgaccgttccgggtagcgagcgcagctatgatctgacgggtctgaagccaggcaccgagtatacggtgagcatttacggtgtctaccatgtgtaccgtagcaatccgctgagcgcgatcttcaccacc

SEQ ID NO: 979 - DNA, 267 bp, Artificial Sequence
  Synthetic Polynucloetide
ctgccagccccgaaaaacttagttgtctcccgcgtgaccgaagattctgctcgtctgagctggactgcaccggacgcggcgttcgacagctttccgattggctactgggagtgggatgatgacggtgaagcgatcgtgctgaccgttccgggtagcgagcgtagctatgacctgacgggtttgaaacctggtaccgagtatcacgtttacattgcgggcgtcaagggtggccagtggtcgttcccgctgagcgcaatctttacgacc

SEQ ID NO: 980 - DNA, 282 bp, Artificial Sequence
  Synthetic Polynucloetide
ctgcccgctcctaagaatctggtggtgtccgaagtgaccgaggacagcgctagactgagctgggatgatccctgggccttctacgagagcttcctgatccagtaccaagagagcgagaaagtcggcgaggccatcgtgcttacagtgcctggaagcgagagaagctacgacctgacaggcctgaagcctggcaccgagtacaccgtgtctatctacggcgtgcacaacgtgtacaaggacaccaacatgcggggcctgcctctgagcgccatctttacaaca

SEQ ID NO: 981 - DNA, 267 bp, Artificial Sequence
  Synthetic Polynucloetide
ttgcctgctccaaaaaacctggtcgtcagcagagtgacagaggactccgccagactgtcttggacagcccctgatgccgccttcgacagcttctggatcagatacttcgagttcctcggcagcggagaagccattgtgctgaccgttccaggcagcgagagatcctatgatctgaccggactgaagcccggaacagagtatgtggtcaacatcatgggcgtgaaaggcggcaagatcagccctcctctgtccgccattttcaccacc

SEQ ID NO: 982 - DNA, 579 bp, Artificial Sequence
  Synthetic Polynucloetide
ctgcccgctcctaagaatctggtggtgtccgaagtgaccgaggacagcgctagactgagctgggatgatccctgggccttctacgagagcttcctgatccagtaccaagagagcgagaaagtcggcgaggccatcgtgcttacagtgcctggaagcgagagaagctacgacctgacaggcctgaagcctggcaccgagtacaccgtgtctatctacggcgtgcacaacgtgtacaaggacaccaacatgcggggcctgcctctgagcgccatctttacaacagctcccgctcctgctccagcaccagctccattgcctgctccaaaaaacctggtcgtcagcagagtgacagaggactccgccagactgtcttggacagcccctgatgccgccttcgacagcttctggatcagatacttcgagttcctcggcagcggagaagccattgtgctgaccgttccaggcagcgagagatcctatgatctgaccggactgaagcccggaacagagtatgtggtcaacatcatgggcgtgaaaggcggcaagatcagccctcctctgtccgccattttcaccacc

SEQ ID NO: 983 - DNA, 270 bp, Artificial Sequence
  Synthetic Polynucloetide
atgctgcccgctcctaagaatctggtggtgtccagaatcaccgaggacagcgccagactgtcttggacagctcctgatgccgccttcgacagcttccccatccggtacatcgagacactgatctggggcgaagccatctggctggatgtgcctggaagcgagagaagctacgacctgaccggactgaagcctggcacagagtatgccgtggtcatcaccggcgtgaaaggcggcagattctctagccctctggtggcctctttcaccacc

SEQ ID NO: 984 - DNA, 1791 bp, Artificial Sequence
  Synthetic Polynucloetide
agtactatcgaggaacaggcgaaaacattcctggataagtttaaccatgaagccgaagacttgttttatcaaagcagccttgcatcctggaactacaacactaatataacagaagagaacgtacaaaacatgaataatgcaggcgataagtggagtgcgtttcttaaagaacagtctacactcgcccaaatgtaccccttgcaagagattcagaatctgactgtcaaacttcagctgcaggcacttcaacaaaacggctcctctgtattgagtgaggataaaagtaaaagactcaacactatcctgaacacaatgtctacgatctacagcaccgggaaggtctgtaatcctgataaccctcaagagtgtctcctcctggagcctggtcttaatgaaataatggccaatagtttggattataacgagaggttgtgggcttgggagtcatggaggagcgaagtaggcaaacagttgcgacccctctacgaggagtacgttgttttgaagaacgaaatggctcgggccaaccattacgaggactatggtgattattggcggggggattacgaggtcaacggtgttgacggttacgattacagtcgggggcaactgattgaagatgtcgaacatacgttcgaggaaatcaagccattgtatgaacatcttcacgcctacgtccgcgcgaagctgatgaatgcatacccatcctatattagcccgataggatgcttgcccgcccatctgctgggcgacatgtgggggcgattttggactaacctgtatagtctgactgttcccttcggacagaaacctaacattgatgtgacagatgcaatggtggatcaagcatgggacgcacaaaggatctttaaagaggctgaaaagtttttcgtcagcgtggggttgccgaacatgacccaggggttctgggagaactcaatgttgaccgaccccgggaacgtccagaaggctgtatgccatccaactgcctgggacttgggtaagggtgatttccgcatactcatgtgtactaaagtcactatggacgattttctcactgcgcatcacgagatgggccacattcagtatgacatggcatacgcagcgcaaccttttctccttcggaacggggctaatgaagggttccatgaagcagtaggggaaatcatgtctctcagcgctgccacccccaagcacctgaagagtattggactcttgagtccggacttccaagaggataatgaaaccgaaatcaattttcttctcaaacaagccctgactatcgttggaacactgccctttacttatatgctggagaaatggcgatggatggtgttcaagggggaaatacccaaagatcaatggatgaagaaatggtgggaaatgaagcgagaaatagtaggagtagttgagccggttccgcatgatgagacgtattgtgatcccgcttcactctttcacgtctccaatgattactcattcataagatattacacgcggacactttatcagtttcagttccaagaggctctctgccaggcagctaaacatgaggggcctctccataagtgcgatatctccaacagtactgaggccggtcagaagcttttcaacatgctgaggctcggaaagtctgagccgtggacgctggctctcgaaaacgtggtaggtgcaaagaacatgaatgtgcggcccctcttgaactactttgagcctctctttacctggctcaaagatcaaaacaagaactcattcgtaggatggagtacagattggagtccgtacgcagac

SEQ ID NO: 985 - DNA, 807 bp, Artificial Sequence
  Synthetic Polynucloetide
gaacctctagtggtgaaggtggaagagggagataacgctgtgctgcagtgcctcaaggggacctcagatggccccactcagcagctgacctggtctcgggagtccccgcttaaacccttcttaaaactcagcctggggctgccaggcctgggaatccacatgaggcccctggccatctggcttttcatcttcaacgtctctcaacagatggggggcttctacctgtgccagccggggcccccctctgagaaggcctggcagcctggctggacagtcaatgtggagggcagcggggagctgttccggtggaatgtttcggacctaggtggcctgggctgtggcctgaagaacaggtcctcagagggccccagctccccttccgggaagctcatgagccccaagctgtatgtgtgggccaaagaccgccctgaaatctgggagggagagcctccgtgtctcccaccgagggacagcctgaaccagagcctcagccaggacctcaccatggcccctggctccacactctggctgtcctgtggggtaccccctgactctgtgtccaggggccccctctcctggacccatgtgcaccccaaggggcctaagtcattgctgagcctagagctgaaggacgatcgcccggccagagatatgtgggtaatggagacgggtctgttgttgccccgggccacagctcaagacgctggaaagtattattgtcaccgtggcaacctgaccatgtcattccacctcgagatcactgctcggccagtactatggcactggctgctgaggactggtggctgg

SEQ ID NO: 986 - DNA, 1470 bp, Artificial Sequence
  Synthetic Polynucloetide
atgccctcctgggccctcttcatggtcacctcctgcctcctcctggcccctcaaaacctggcccaagtcagcagccaagatgtctccttgctggcatcagactcagagcccctgaagtgtttctcccgaacatttgaggacctcacttgcttctgggatgaggaagaggcagcgcccagtgggacataccagctgctgtatgcctacccgcgggagaagccccgtgcttgccccctgagttcccagagcatgccccactttggaacccgatacgtgtgccagtttccagaccaggaggaagtgcgtctcttctttccgctgcacctctgggtgaagaatgtgttcctaaaccagactcggactcagcgagtcctctttgtggacagtgtaggcctgccggctccccccagtatcatcaaggccatgggtgggagccagccaggggaacttcagatcagctgggaggagccagctccagaaatcagtgatttcctgaggtacgaactccgctatggccccagagatcccaagaactccactggtcccacggtcatacagctgattgccacagaaacctgctgccctgctctgcagaggcctcactcagcctctgctctggaccagtctccatgtgctcagcccacaatgccctggcaagatggaccaaagcagacctccccaagtagagaagcttcagctctgacagcagagggtggaagctgcctcatctcaggactccagcctggcaactcctactggctgcagctgcgcagcgaacctgatgggatctccctcggtggctcctggggatcctggtccctccctgtgactgtggacctgcctggagatgcagtggcacttggactgcaatgctttaccttggacctgaagaatgttacctgtcaatggcagcaacaggaccatgctagctcccaaggcttcttctaccacagcagggcacggtgctgccccagagacaggtaccccatctgggagaactgcgaagaggaagagaaaacaaatccaggactacagaccccacagttctctcgctgccacttcaagtcacgaaatgacagcattattcacatccttgtggaggtgaccacagccccgggtactgttcacagctacctgggctcccctttctggatccaccaggctgtgcgcctccccaccccaaacttgcactggagggagatctccagtgggcatctggaattggagtggcagcacccatcgtcctgggcagcccaagagacctgttatcaactccgatacacaggagaaggccatcaggactggaaggtgctggagccgcctctcggggcccgaggagggaccctggagctgcgcccgcgatctcgctaccgtttacagctgcgcgccaggctcaacggccccacctaccaaggtccctggagctcgtggtcggacccaactagggtggagaccgccaccgagaccgcc

SEQ ID NO: 987 - DNA, 501 bp, Artificial Sequence
  Synthetic Polynucloetide
atggccttaccagtgaccgccttgctcctgccgctggccttgctgctccacgccgccaggccgggctggtttctggacagccctgacagaccctggaatcctccaacattcagccccgctctgctggtggttaccgagggcgataatgccaccttcacctgtagcttcagcaacaccagcgagagcttcgtgctgaactggtacagaatgagccccagcaaccagaccgacaagctggccgcctttcctgaggatagaagccagcctggacaggactgccggttcagagttacccagctgcctaacggcagagacttccacatgagcgttgtgcgggccagaagaaacgacagcggcacatatctgtgcggagccatctctctggcccctaaggctcagatcaaagagagcctgagagccgagctgagagtgacagaaagacgggccgaagtgcccacagctcacccttcaccttctccaagacctgccggccagttccag

SEQ ID NO: 988 - DNA, 438 bp, Artificial Sequence
  Synthetic Polynucloetide
ggctggtttctggacagccctgacagaccctggaatcctccaacattcagccccgctctgctggtggttaccgagggcgataatgccaccttcacctgtagcttcagcaacaccagcgagagcttcgtgctgaactggtacagaatgagccccagcaaccagaccgacaagctggccgcctttcctgaggatagaagccagcctggacaggactgccggttcagagttacccagctgcctaacggcagagacttccacatgagcgttgtgcgggccagaagaaacgacagcggcacatatctgtgcggagccatctctctggcccctaaggctcagatcaaagagagcctgagagccgagctgagagtgacagaaagacgggccgaagtgcccacagctcacccttcaccttctccaagacctgccggccagttccag

SEQ ID NO: 989 - DNA, 501 bp, Artificial Sequence
  Synthetic Polynucloetide
atgcagatcccacaggcgccctggccagtcgtctgggcggtgctacaactgggctggcggccaggatggttcttagactccccagacaggccctggaacccccccaccttctccccagccctgctcgtggtgaccgaaggggacaacgccaccttcacctgcagcttctccaacacatcggagagcttcgtgctaaactggtaccgcatgagccccagcaaccagacggacaagctggccgccttccccgaggaccgcagccagcccggccaggactgccgcttccgtgtcacacaactgcccaacgggcgtgacttccacatgagcgtggtcagggcccggcgcaatgacagcggcacctacctctgtggggccatctccctggcccccaaggcgcagatcaaagagagcctgcgggcagagctcagggtgacagagagaagggcagaagtgcccacagcccaccccagcccctcacccaggccagccggccagttccaa

SEQ ID NO: 990 - DNA, 486 bp, Artificial Sequence
  Synthetic Polynucloetide
atggcctgtctgggcttccagagacacaaggcccagctcaacctggctaccagaacctggccttgtactctgctgttcttcctgctgttcatccccgtgttctgcaaggccatgcatgtggctcagcctgctgtggtgctggcctctagtagaggaatcgccagcttcgtgtgcgagtacgcctctcctggaaaggccactgaagtgcgcgtgaccgttctgagacaggccgatagccaagtgaccgaagtgtgcgccgccacctacatgatgggcaacgagctgaccttcctggacgacagcatctgtaccggcaccagcagcggcaatcaagtgaacctgaccatccagggcctgagagctatggacaccggcctgtacatctgcaaggtggaactgatgtaccctcctccttactacctcggcatcggcaacggcacccaaatctacgtgatcgaccccgagccttgtcctgacagcgatttc

SEQ ID NO: 991 - DNA, 405 bp, Artificial Sequence
  Synthetic Polynucloetide
ctgttcaaccaggaagtgcagatccccctgaccgagagctactgcggcccctgccccaagaactggatctgctacaagaacaactgctaccagttcttcgacgagagcaagaattggtacgagagccaggcttcctgcatgagccagaacgccagcctgctgaaggtgtacagcaaagaggaccaggatctgctgaagctggtcaagagctaccactggatgggcctggtgcacatccccaccaacggctcttggcagtgggaggacggcagcatcctgagccccaacctgctgaccatcatcgagatgcagaagggcgactgcgccctgtacgccagcagcttcaagggctacatcgagaactgctccacccccaacacctacatctgtatgcagcggaccgtg

SEQ ID NO: 992 - DNA, 624 bp, Artificial Sequence
  Synthetic Polynucloetide
atggttaggggcgttccattcagacatctgcttctggtcttgcagcttgcactcttgcccgctgccacccagggcaaaaaagtggtgctgggcaagaaaggcgacaccgtggaactgacctgcaccgccagccagaagaagtccatccagttccactggaagaacagcaaccagatcaagatcctgggcaaccagggcagcttcctgaccaagggacccagcaagctgaacgacagagccgacagcagacggtccctgtgggaccagggcaatttcccactgattatcaagaacctgaagatcgaggacagcgacacctacatctgcgaggtggaagatcagaaagaagaggtgcaactgctggtgttcggcctgaccgccaactccgacacccatctgctccagggccagagcctgaccctgacactggaaagccctccaggcagctcccccagcgtgcagtgtagaagcccacgaggcaagaacatccagggaggcaaaacattgtcagtgtcccaactggaactccaggactccggcacctggacctgtaccgtgctccagaaccagaaaaaggtggagttcaagatcgacatcgtggtgctggccttccagaaagcctct

SEQ ID NO: 993 - DNA, 501 bp, Artificial Sequence
  Synthetic Polynucloetide
atctaccaggaactgacacaactgaaggccgccgtggaacggctgtgccacccttgtccttgggagtggaccttctttcagggcaactgctacttcatgagcaacagccagcggaactggcacgacagcatcaccgcctgcaaagaagtgggagcccaactggtcgtgattaagagcgccgaggaacagaacttcctccaactccagagcagcagaagcaacagattcacctggatgggcctgagcgacctgaaccaggaaggcacctggcagtgggtggacggatctcctctgctgcccagcttcaagcagtattggaaccggggcgagcccaacaacgtgggcgaagaggattgcgccgagttcagcggcaacggctggaacgacgacaagtgcaacctggctaagttctggatctgcaagaagtccgccgcctcctgtagccgggatgaggaacagttcctgagccctgcccctgccacccctaatcctccaccagct

SEQ ID NO: 994 - DNA, 576 bp, Artificial Sequence
  Synthetic Polynucloetide
ggcatgcggactgaagacctcccaaaggctgtggtgttcctggagcctcaatggtacagggtgctggagaaggacagtgtgactctgaagtgccagggagcctactcccctgaggacaattccacacagtggtttcacaatgagagcctcatctcaagccaggcctccagctacttcattgacgctgccacagtggacgacagtggagagtacaggtgccagacaaacctctccaccctcagtgacccggtgcagctagaagtccatatcggctggctgttgctccaggcccctcggtgggtgttcaaggaggaagaccctattcacctgaggtgtcacagctggaagaacactgctctgcataaggtcacatatttacagaatggcaaaggcaggaagtattttcatcataattctgacttctacattccaaaagccacactcaaagacagcggctcctacttctgcagggggcttgttgggagtaaaaatgtgtcttcagagactgtgaacatcaccatcactcaaggtttggcagtgtcaaccatctcatcattctttccacctggctaccaa

SEQ ID NO: 995 - DNA, 576 bp, Artificial Sequence
  Synthetic Polynucloetide
ggcatgagaaccgaggacctgcctaaggccgtggtgttcctggaaccccagtggtacagagtgctggaaaaggacagcgtgaccctgaagtgccagggcgcctacagccccgaggacaatagcacccagtggttccacaacgagagcctgatctccagccaggccagcagctacttcatcgacgccgccaccgtggacgacagcggcgagtatagatgccagaccaacctgagcaccctgagcgaccccgtgcagctggaagtgcacatcggatggctgctgctgcaggcccccagatgggtgttcaaagaagaggaccccatccacctgagatgccactcttggaagaacaccgccctgcacaaagtgacctacctgcagaacggcaagggcagaaagtacttccaccacaacagcgacttctacatccccaaggccaccctgaaggactccggctcctacttctgcagaggcctcgtgggcagcaagaacgtgtccagcgagacagtgaacatcaccatcacccagggcctggccgtgtctaccatcagcagctttttcccacccggctaccag

SEQ ID NO: 996 - DNA, 822 bp, Artificial Sequence
  Synthetic Polynucloetide
gccagaaagagaacccagcccaccttcggcttcaccgtgaactggaagttcagcgagagcaccaccgtgttcaccggccagtgcttcatcgaccggaacggcaaagaggtgctgaaaaccatgtggctgctgcggagcagcgtgaacgacatcggcgacgactggaaggccaccagagtgggcatcaacatcttcacccggctgcggacacagaaagagggcggctctggcggaagcgccagaaagtgtagcctgaccggcaagtggaccaacgacctgggcagcaacatgaccatcggagccgtgaacagcagaggcgagtttaccggcacctacatcaccgccgtgaccgccaccagcaacgagatcaaagagagccccctgcacggcacccagaacaccatcaacaagagcggcggcagcacaacagtgtttacaggacagtgctttattgaccgcaatgggaaagaagtgctgaaaacaatgtggctgctgaggtcctccgtgaatgacattggagatgattggaaagctacaagagtggggattaacatttttaccagactgaggacccagaaagaagggggcagcggaggctccgccagaaaatgctctctgacagggaagtggacaaatgatctggggtccaatatgacaatcggcgctgtgaactctcggggcgagttcactggaacatatattacagccgtgacagctacctctaacgaaatcaaagagtctcctctgcacgggacacagaataccattaacaaacggacccagcctacatttgggtttacagtgaattggaaattctccgag

SEQ ID NO: 997 - DNA, 1698 bp, Artificial Sequence
  Synthetic Polynucloetide
gagtgggtcaagttcgccaagccttgcagagaaggcgaggacaacagcaagcggaaccctatcgccaagatcaccagcgactaccaggccacacagaagatcacctaccggatctctggcgtgggcatcgaccagcctccattcggcatcttcgtggtggacaagaacaccggcgacatcaacatcaccgccatcgtggacagagaggaaacccctagcttcctgattacctgtagagccctgaacgcccagggcctcgatgtggaaaagcctctgatcctgaccgtgaagatcctggacatcaacgacaaccctccagtgttcagccagcagattttcatgggcgagatcgaggaaaacagcgccagcaacagcctggtcatgatcctgaatgccaccgacgccgacgagcccaaccacctgaatagcaagatcgccttcaagatcgtgtcccaagagcctgccggcacacccatgtttctgctgtccagaaataccggcgaagtgcggaccctgaccaatagcctggatagagagcaggccagcagctacagactggtggtgtctggcgctgacaaggatggcgagggactgagcacccagtgcgagtgcaacatcaaagtgaaggacgtgaacgacaacttccccatgttccgggacagccagtatagcgcccggatcgaagagaacatcctgagcagcgagctgctgcggttccaagtgaccgacctggacgaagagtacaccgacaactggctggccgtgtacttcttcaccagcggcaacgaaggcaactggttcgagatccagacagaccccaggaccaacgagggcatcctgaaggttgtgaaggccctggactacgagcagctccagagcgtgaagctgtctatcgccgtgaagaacaaggccgagttccaccagtccgtgatctcccggtacagagtgcagagcacccctgtgaccatccaagtgattaacgtgcgcgagggcattgccttcagacccgccagcaagaccttcaccgtgcagaagggcatcagcagcaagaaactggtggactacatcctgggcacctatcaggccatcgacgaggacacaaacaaagccgcctccaacgtgaaatacgtgatgggcagaaacgacggcggctacctgatgatcgactccaagaccgccgagatcaagttcgtgaagaatatgaaccgggactccaccttcatcgtgaacaagaccatcacagccgaggtgctggctatcgacgagtataccggcaagaccagcaccggcacagtgtatgtgcgggtgcccgacttcaacgataactgccctacagccgtgctggaaaaggacgccgtgtgtagctctagccctagcgtggtcgtgtccgccagaacactgaacaacagatacacaggcccctacacattcgccctggaagatcagcctgtgaagctgcctgccgtgtggtccatcaccacactgaatgctacaagcgccctgctgagagcccaagagcaaattcctcctggcgtgtaccacatcagcctggtgctgacagacagccagaacaatagatgcgagatgcctcggagcctgacactggaagtgtgccagtgcgacaacagaggcatctgcggcacaagctaccccacaacaagccccggcacaagatacggcagacctcactctggaaga

SEQ ID NO: 998 - DNA, 468 bp, Artificial Sequence
  Synthetic Polynucloetide
atggccttaccagtgaccgccttgctcctgccgctggccttgctgctccacgccgccaggccgctgttcaatcaagaggtgcagatccctctgaccgagagctactgtggcccctgtcctaagaactggatctgctacaagaacaactgctaccagttcttcgacgagagcaagaattggtacgagagccaggccagctgcatgagccagaatgccagcctgctgaaggtgtacagcaaagaggaccaggacctgctgaaactggtcaagagctaccactggatgggccttgtgcacatccccaccaatggctcttggcagtgggaggacggcagcattctgagccctaacctgctgaccatcatcgagatgcagaagggcgactgcgccctgtacgccagcagctttaagggctacatcgagaattgcagcaccccgaacacctacatctgtatgcagagaaccgtt

SEQ ID NO: 999 - DNA, 921 bp, Artificial Sequence
  Synthetic Polynucloetide
atggccttaccagtgaccgccttgctcctgccgctggccttgctgctccacgccgccaggccgctgttcaatcaagaggtgcagatccctctgaccgagagctactgtggcccctgtcctaagaactggatctgctacaagaacaactgctaccagttcttcgacgagagcaagaattggtacgagagccaggccagctgcatgagccagaatgccagcctgctgaaggtgtacagcaaagaggaccaggacctgctgaaactggtcaagagctaccactggatgggccttgtgcacatccccaccaatggctcttggcagtgggaggacggcagcattctgagccctaacctgctgaccatcatcgagatgcagaagggcgactgcgccctgtacgccagcagctttaagggctacatcgagaattgcagcaccccgaacacctacatctgtatgcagagaaccgttggcggaggcggaagtggaggcggaggatctggcggcggaggctctgacctctttaatcaagaagtccagattccactcaccgaatcctactgcggaccttgtccaaaaaattggatttgttataagaacaactgttatcaattctttgatgagtctaaaaattggtatgagtcccaggcttcctgcatgtctcagaacgcttctctgctgaaagtctactctaaagaagatcaggatctcctgaagctcgtcaagtcttatcattggatggggctcgtccacattcctaccaacggaagctggcaatgggaagatggctccatcctgtctccaaatctgctcacgattattgaaatgcagaaaggggattgtgctctctacgccagctccttcaagggatatattgagaactgtagcacgcccaatacttatatctgtatgcaacggaccgtg

SEQ ID NO: 1000 - DNA, 405 bp, Artificial Sequence
  Synthetic Polynucloetide
ctgttcaatcaagaggtgcagatccctctgaccgagagctactgtggcccctgtcctaagaactggatctgctacaagaacaactgctaccagttcttcgacgagagcaagaattggtacgagagccaggccagctgcatgagccagaatgccagcctgctgaaggtgtacagcaaagaggaccaggacctgctgaaactggtcaagagctaccactggatgggccttgtgcacatccccaccaatggctcttggcagtgggaggacggcagcattctgagccctaacctgctgaccatcatcgagatgcagaagggcgactgcgccctgtacgccagcagctttaagggctacatcgagaattgcagcaccccgaacacctacatctgtatgcagagaaccgtt

SEQ ID NO: 1001 - DNA, 669 bp, Artificial Sequence
  Synthetic Polynucloetide
agagtgcagcctaccgagagcatcgtgcggttccccaacatcaccaatctgtgccctttcggcgaggtgttcaacgccaccagattcgcctctgtgtacgcctggaaccggaagcggatcagcaactgcgtggccgattacagcgtgctgtacaacagcgccagcttcagcaccttcaagtgctacggcgtgtcccctaccaagctgaacgacctgtgcttcaccaacgtgtacgccgacagcttcgtgatcagaggcgacgaagtgcggcagattgcccctggacagacaggcaagatcgccgactacaactacaagctgcccgacgacttcaccggctgtgtgattgcctggaacagcaacaacctggacagcaaagtcggcggcaactacaattacctgtaccggctgtttcggaagtccaacctgaagcctttcgagcgggacatcagcaccgaaatctaccaggccggcagcaccccttgcaatggcgtggaaggcttcaactgctacttcccactgcaaagctacggcttccagcctacaaacggcgtgggctaccagccttacagagtggtggtgctgagcttcgagctgctgcacgctcctgctacagtgtgcggccctaagaaaagcaccaacctggtcaagaacaaatgcgtgaacttc

SEQ ID NO: 1002 - DNA, 561 bp, Artificial Sequence
  Synthetic Polynucloetide
atggagctgactgaattgctcctcgtggtcatgcttctcctaactgcaaggctaacgctgtccagcccggctcctcctgcttgtgacctccgagtcctcagtaaactgcttcgtgactcccatgtccttcacagcagactgagccagtgcccagaggttcaccctttgcctacacctgtcctgctgcctgctgtggactttagcttgggagaatggaaaacccagatggaggagaccaaggcacaggacattctgggagcagtgacccttctgctggagggagtgatggcagcacggggacaactgggacccacttgcctctcatccctcctggggcagctttctggacaggtccgtctcctccttggggccctgcagagcctccttggaacccagcttcctccacagggcaggaccacagctcacaaggaccctaatgccatcttcctgagcttccaacacctgctccgaggaaaggtgcgtttcctgatgcttgtaggagggtccaccctctgcgtcaggcgggccccacccaccacagctgtccccagcagaacctct

SEQ ID NO: 1003 - DNA, 561 bp, Artificial Sequence
  Synthetic Polynucloetide
atggagctgactgatttgctcctggcggccatgcttcttgcagtggcaagactaactctgtccagccccgtagctcctgcctgtgaccccagactcctaaataaactgctgcgtgactcccacctccttcacagccgactgagtcagtgtcccgacgtggaccctttgtctatccctgttctgctgcctgctgtggactttagcctgggagaatggaaaacccagacggaacagagcaaggcacaggacattctaggggcagtgtcccttctactggagggagtgatggcagcacgaggacagttggaaccctcctgcctctcatccctcctgggacagctttctgggcaggttcgcctcctcttgggggccctgcagggcctcctaggaacccagcttcctctacagggcaggaccacagctcacaaggaccccaatgccctcttcttgagcttgcaacaactgcttcggggaaaggtgcgcttcctgcttctggtagaaggtcccaccctctgtgtcagacggaccctgccaaccacagctgtcccaagcagtacttct

SEQ ID NO: 1004 - DNA, 276 bp, Artificial Sequence
  Synthetic Polynucloetide
gctcctgatgtgcaggattgccctgagtgcaccctgcaagagaaccccttcttctcccaacctggcgctcctatcctccagtgcatgggctgctgcttcagccgggcttatcccacacctctgcggagcaagaaaaccatgctggtccagaaaaacgtgaccagcgagagcacctgttgtgtggctaagagctacaacagagtgaccgtgatgggcggcttcaaggtggaaaatcacaccgcctgccactgctccacctgttactaccacaagagc

SEQ ID NO: 1005 - DNA, 495 bp, Artificial Sequence
  Synthetic Polynucloetide
atggaaatgttccagggcctgctgctgctcctgctgctttctatgggaggcacatgggccagcagagagatgctgaggcccagatgcagacccatcaatgccacactggccgtggaaaaagagggctgccctgtctgcatcaccgtgaacaccacaatctgcgccggctactgccccaccatgacaagagttctgcaaggcgtgctgcccgctctgcctcaggtcgtgtgcaactatcgggacgtccgcttcgagagcatcagactgcctggatgtcccagaggcgtgaaccctgtggtgtcttatgccgtggctctgagctgtcagtgcgccctgtgtagaagaagcaccaccgattgcggcggacccaaggatcaccctctgacctgtgacgaccctagattccaggccagcagcagctctaaagcccctccaccttctctgccatctccaagcagactgcccggacctagcgacacacctattctgcctcaa

SEQ ID NO: 1006 - DNA, 333 bp, Artificial Sequence
  Synthetic Polynucloetide
aacagctgcgagctgaccaacatcacaatcgccatcgagaaagaggaatgccggttctgcatcagcatcaacaccacttggtgcgccggctactgctacacccgcgatctggtgtataaggaccccgccagacctaagatccagaaaacctgcaccttcaaagagctggtctacgagacagtcagagtgcctggatgtgcccaccacgccgatagcctgtacacataccctgtggctacccagtgccactgcggcaagtgtgatagcgacagcaccgattgcaccgtcagaggactgggacccagctactgtagcttcggcgagatgaaggaa

SEQ ID NO: 1007 - DNA, 423 bp, Artificial Sequence
  Synthetic Polynucloetide
atggaaatgctccagggcctgctgctgctcctgctgctttctatgggcggagcttgggccagcagagagcctcttagaccttggtgtcaccccatcaacgccatcctggccgtggaaaaagagggctgccctgtctgcatcaccgtgaacaccacaatctgcgccggctactgccccaccatgatgagagtgctgcaagccgttctgcctcctctgcctcaggtcgtgtgcacctatcgggacgtccgcttcgagagcatcagactgcctggatgtcctagaggcgtggaccccgtggtgtcttttcctgtggctctgtcctgtagatgcggcccctgtagaagaagcaccagcgattgcggcggacccaaggatcaccctctgacatgcgatcacccacagctgagcggcctgttgtttctt

SEQ ID NO: 1008 - DNA, 414 bp, Artificial Sequence
  Synthetic Polynucloetide
atgacagccctgttcctgatgtccatgctgttcggcctggcctgcggacaggccatgtctttctgtatccccaccgagtacaccatgcacatcgagagaagagagtgcgcctactgcctgaccatcaacaccacaatctgcgccggctactgcatgacacgggatattaacggcaagctgttcctgcctaagtacgccctgagccaggacgtgtgcacctaccgggacttcatctaccggaccgtggaaatccctggctgccctctgcatgtggccccttactttagctaccccgtggctctgagctgcaagtgcggcaagtgcaacaccgactacagcgactgtatccacgaggccatcaagaccaactactgcaccaagcctcagaaaagctacctcgtgggcttctctgtt

SEQ ID NO: 1009 - DNA, 816 bp, Artificial Sequence
  Synthetic Polynucloetide
atggaaatgttccagggcctgctgctgctcctgctgctttctatgggaggcacatgggccagcagagagatgctgaggcccagatgcagacccatcaatgccacactggccgtggaaaaagagggctgccctgtctgcatcaccgtgaacaccacaatctgcgccggctactgccccaccatgacaagagttctgcaaggcgtgctgcccgctctgcctcaggtcgtgtgcaactatcgggacgtccgcttcgagagcatcagactgcctggatgtcccagaggcgtgaaccctgtggtgtcttatgccgtggctctgagctgtcagtgcgccctgtgtagaagaagcaccaccgattgcggcggacccaaggatcaccctctgacctgtgacgaccctagattccaggccagcagcagctctaaagcccctccaccttctctgccatctccaagcagactgcccggacctagcgacacacctattctgcctcaaggcggaggcggaagtggaggcggaggatctggcggcggaggctctgctcctgatgtgcaggattgccctgagtgcaccctgcaagagaaccccttcttctcccaacctggcgctcctatcctccagtgcatgggctgctgcttcagccgggcttatcccacacctctgcggagcaagaaaaccatgctggtccagaaaaacgtgaccagcgagagcacctgttgtgtggctaagagctacaacagagtgaccgtgatgggcggcttcaaggtggaaaatcacaccgcctgccactgctccacctgttactaccacaagagc

SEQ ID NO: 1010 - DNA, 717 bp, Artificial Sequence
  Synthetic Polynucloetide
atggccttaccagtgaccgccttgctcctgccgctggccttgctgctccacgccgccaggccgaacagctgcgagctgaccaacatcacaatcgccatcgagaaagaggaatgccggttctgcatcagcatcaacaccacttggtgcgccggctactgctacacccgcgatctggtgtataaggaccccgccagacctaagatccagaaaacctgcaccttcaaagagctggtctacgagacagtcagagtgcctggatgtgcccaccacgccgatagcctgtacacataccctgtggctacccagtgccactgcggcaagtgtgatagcgacagcaccgattgcaccgtcagaggactgggacccagctactgtagcttcggcgagatgaaggaaggcggaggcggaagtggaggcggaggatctggcggcggaggctctgctcctgatgtgcaggattgccctgagtgcaccctgcaagagaaccccttcttctcccaacctggcgctcctatcctccagtgcatgggctgctgcttcagccgggcttatcccacacctctgcggagcaagaaaaccatgctggtccagaaaaacgtgaccagcgagagcacctgttgtgtggctaagagctacaacagagtgaccgtgatgggcggcttcaaggtggaaaatcacaccgcctgccactgctccacctgttactaccacaagagc

SEQ ID NO: 1011 - DNA, 744 bp, Artificial Sequence
  Synthetic Polynucloetide
atggaaatgctccagggcctgctgctgctcctgctgctttctatgggcggagcttgggccagcagagagcctcttagaccttggtgtcaccccatcaacgccatcctggccgtggaaaaagagggctgccctgtctgcatcaccgtgaacaccacaatctgcgccggctactgccccaccatgatgagagtgctgcaagccgttctgcctcctctgcctcaggtcgtgtgcacctatcgggacgtccgcttcgagagcatcagactgcctggatgtcctagaggcgtggaccccgtggtgtcttttcctgtggctctgtcctgtagatgcggcccctgtagaagaagcaccagcgattgcggcggacccaaggatcaccctctgacatgcgatcacccacagctgagcggcctgttgtttcttggcggaggcggaagtggaggcggaggatctggcggcggaggctctgctcctgatgtgcaggattgccctgagtgcaccctgcaagagaaccccttcttctcccaacctggcgctcctatcctccagtgcatgggctgctgcttcagccgggcttatcccacacctctgcggagcaagaaaaccatgctggtccagaaaaacgtgaccagcgagagcacctgttgtgtggctaagagctacaacagagtgaccgtgatgggcggcttcaaggtggaaaatcacaccgcctgccactgctccacctgttactaccacaagagc

SEQ ID NO: 1012 - DNA, 735 bp, Artificial Sequence
  Synthetic Polynucloetide
atgacagccctgttcctgatgtccatgctgttcggcctggcctgcggacaggccatgtctttctgtatccccaccgagtacaccatgcacatcgagagaagagagtgcgcctactgcctgaccatcaacaccacaatctgcgccggctactgcatgacacgggatattaacggcaagctgttcctgcctaagtacgccctgagccaggacgtgtgcacctaccgggacttcatctaccggaccgtggaaatccctggctgccctctgcatgtggccccttactttagctaccccgtggctctgagctgcaagtgcggcaagtgcaacaccgactacagcgactgtatccacgaggccatcaagaccaactactgcaccaagcctcagaaaagctacctcgtgggcttctctgttggcggaggcggaagtggaggcggaggatctggcggcggaggctctgctcctgatgtgcaggattgccctgagtgcaccctgcaagagaaccccttcttctcccaacctggcgctcctatcctccagtgcatgggctgctgcttcagccgggcttatcccacacctctgcggagcaagaaaaccatgctggtccagaaaaacgtgaccagcgagagcacctgttgtgtggctaagagctacaacagagtgaccgtgatgggcggcttcaaggtggaaaatcacaccgcctgccactgctccacctgttactaccacaagagc

SEQ ID NO: 1013 - skipped

SEQ ID NO: 1014 - DNA, 159 bp, Artificial Sequence
  Synthetic Polynucloetide
atggaccccgacctggaaatcagagccgccttcctgcggcagagaaacacagccctgagaacagaggtggccgagctggaacaagaggtgcagcggctggaaaacgaggtgtcccagtacgagacaagatacggccctctcggaggcggaaaaacgcgt

SEQ ID NO: 1015 - DNA, 159 bp, Artificial Sequence
  Synthetic Polynucloetide
acgcgtatggaccctgatctcgaaattgaggccgcctttctggaacgcgagaacactgccctggaaaccagggtcgcagagctgagacagagagtgcagagactgcggaacagagtgtctcagtaccgcaccagatatggcccactcggcggaggtaaa

SEQ ID NO: 1016 - DNA, 84 bp, Artificial Sequence
  Synthetic Polynucloetide
gaagttgctgccctcgagaaggaggtagcagctttggaaaaagaagtcgcagcccttgagaaagaagttgcggctctggagaag

SEQ ID NO: 1017 - DNA, 84 bp, Artificial Sequence
  Synthetic Polynucloetide
aaagttgctgctcttaaagaaaaggtcgcggctctgaaagaaaaagtggcggcgctcaaggagaaagttgcagctctcaaagaa

SEQ ID NO: 1018 - DNA, 405 bp, Artificial Sequence
  Synthetic Polynucloetide
ctgttcaatcaagaggtgcagatccctctgaccgagagctactgtggcccctgtcctaagaactggatctgctacaagaacaactgctaccagttcttcgacgagagcaagaattggtacgagagccaggccagctgcatgagccagaatgccagcctgctgaaggtgtacagcaaagaggaccaggacctgctgaaactggtcaagagcgcccactggatgggccttgtgcacatccccaccaatggctcttggcagtgggaggacggcagcattctgagccctaacctgctgaccatcatcgagatgcagaagggcgactgcgccctgtacgccagcagctttaagggcttcatcgagaattgcagcaccccgaacacctacatctgtatgcagagaaccgtt

SEQ ID NO: 1019 - DNA, 405 bp, Artificial Sequence
  Synthetic Polynucloetide
ctgttcaatcaagaggtgcagatccctctgaccgagagctactgtggcccctgtcctaagaactggatctgctacaagaacaactgctaccagttcttcgacgagagcaagaattggtacgagagccaggccagctgcatgagccagaatgccagcctgctgaaggtgtacagcaaagaggaccaggacctgctgaaactggtcaagagcgcccactggatgggccttgtgcacatccccaccaatggctcttggcagtgggaggacggcagcattctgagccctaacctgctgaccatcatcgagatgcagaagggcgactgcgccctgtacgccagcagctttaagggctacatcgagaattgcagcaccccgaacacctacatctgtatgcagagaaccgtt

SEQ ID NO: 1020 - DNA, 858 bp, Artificial Sequence
  Synthetic Polynucloetide
ctgttcaatcaagaggtgcagatccctctgaccgagagctactgtggcccctgtcctaagaactggatctgctacaagaacaactgctaccagttcttcgacgagagcaagaattggtacgagagccaggccagctgcatgagccagaatgccagcctgctgaaggtgtacagcaaagaggaccaggacctgctgaaactggtcaagagcgcccactggatgggccttgtgcacatccccaccaatggctcttggcagtgggaggacggcagcattctgagccctaacctgctgaccatcatcgagatgcagaagggcgactgcgccctgtacgccagcagctttaagggcttcatcgagaattgcagcaccccgaacacctacatctgtatgcagagaaccgttggcggaggcggaagtggaggcggaggatctggcggcggaggctctgacctctttaatcaagaagtccagattccactcaccgaatcctactgcggaccttgtccaaaaaattggatttgttataagaacaactgttatcaattctttgatgagtctaaaaattggtatgagtcccaggcttcctgcatgtctcagaacgcttctctgctgaaagtctactctaaagaagatcaggatctcctgaagctcgtcaagtctgcccattggatggggctcgtccacattcctaccaacggaagctggcaatgggaagatggctccatcctgtctccaaatctgctcacgattattgaaatgcagaaaggggattgtgctctctacgccagctccttcaagggatttattgagaactgtagcacgcccaatacttatatctgtatgcaacggaccgtg

SEQ ID NO: 1021 - DNA, 858 bp, Artificial Sequence
  Synthetic Polynucloetide
ctgttcaatcaagaggtgcagatccctctgaccgagagctactgtggcccctgtcctaagaactggatctgctacaagaacaactgctaccagttcttcgacgagagcaagaattggtacgagagccaggccagctgcatgagccagaatgccagcctgctgaaggtgtacagcaaagaggaccaggacctgctgaaactggtcaagagcgcccactggatgggccttgtgcacatccccaccaatggctcttggcagtgggaggacggcagcattctgagccctaacctgctgaccatcatcgagatgcagaagggcgactgcgccctgtacgccagcagctttaagggctacatcgagaattgcagcaccccgaacacctacatctgtatgcagagaaccgtttctggcggaggcggctctggaggaggcggaagtggcggcggaggcgacctctttaatcaagaagtccagattccactcaccgaatcctactgcggaccttgtccaaaaaattggatttgttataagaacaactgttatcaattctttgatgagtctaaaaattggtatgagtcccaggcttcctgcatgtctcagaacgcttctctgctgaaagtctactctaaagaagatcaggatctcctgaagctcgtcaagtctgcccattggatggggctcgtccacattcctaccaacggaagctggcaatgggaagatggctccatcctgtctccaaatctgctcacgattattgaaatgcagaaaggggattgtgctctctacgccagctccttcaagggatatattgagaactgtagcacgcccaatacttatatctgtatgcaacggaccgtg

SEQ ID NO: 1022 - DNA, 540 bp, Artificial Sequence
  Synthetic Polynucloetide
gagcctcacagcctgagctacgacatcacagtgatccccaagttcagacccggaccacgttggtgcgctgtgcagggacaagtggacgagaaaaccttcctgcactacgactgcggcaacaagaccgtgacacccgtgtctccactgggcaagaaactgaacgtgaccaccgcctggaaggcccagaatcctgtgctgagagaagtggtggacatcctgaccgagcagctgtgggacattcagctggaaaactacacccctaaagagcccctgacactccaggccagaatgagctgtgaacagaaggccgagggccacagctctggctcttggcagttcagcttcgacggccagattttcctgctgttcgacagcgagaagcggatgtggaccacagtgcatcccggcgctcgcaagatgaaggaaaagtgggagaacgacaaggtggtggctaccctgctgtggggctggtctatgggagattgcatcggctggctggaagatttcctgatgggcatggacagcaccctggaaccttct

SEQ ID NO: 1023 - DNA, 540 bp, Artificial Sequence
  Synthetic Polynucloetide
gagcctcacagcctgagctacgacatcacagtgatccccaagttcagacccggaccacgttggtgcgctgtgcagggacaagtggacgagaaaaccttcctgcactacgactgcggcaacaagaccgtgacacccgtgtctccactgggcaagaaactgaacgtgaccaccgcctggaaggcccagaatcctgtgctgagagaagtggtggacatcctgaccgagcagctgtgggacattcagctggaaaactacacccctaaagagcccctgacactccaggccagaatgagctgtgaacagaaggccgagggccacagctctggctcttggcagttcagcttcgacggccagattttcctgctgttcgacagcgagaagcggatgtggaccacagtgcatcccggcgctcgcaagatgaaggaaaagtgggagaacgacaaggtggtggctaccaagctgtacctgtggtctatgggcgactgcatcggctggctggaagatttcctgatgggcatggacagcaccctggaaccttct

SEQ ID NO: 1024 - skipped

SEQ ID NO: 1025 - DNA, 18 bp, Artificial Sequence
  Synthetic Polynucloetide
agcggcggaggcggatct

SEQ ID NO: 1026 - DNA, 24 bp, Artificial Sequence
  Synthetic Polynucloetide
ggcggaggaagcggcggaggatct

SEQ ID NO: 1027 - DNA, 30 bp, Artificial Sequence
  Synthetic Polynucloetide
ggcggaggcggaagtggaggcggaggatct

SEQ ID NO: 1028 - DNA, 45 bp, Artificial Sequence; identical to SEQ ID NO: 37
  Synthetic Polynucloetide

SEQ ID NO: 1029 - DNA, 36 bp, Artificial Sequence
  Synthetic Polynucloetide
gagcagaaactgatctcggaagaggatgggagcggc

SEQ ID NO: 1030 - DNA, 39 bp, Artificial Sequence
  Synthetic Polynucloetide
gaacagaaattgataagtgaggaagacttgggcagcggc

SEQ ID NO: 1031 - DNA, 39 bp, Artificial Sequence
  Synthetic Polynucloetide
gagcagaaactgatctcggaagaggatctggggagcggc

SEQ ID NO: 1032 - DNA, 51 bp, Artificial Sequence
  Synthetic Polynucloetide
gggaaaccaattcccaaccctcttctgggactggattcaaccggcagcggc

SEQ ID NO: 1033 - DNA, 36 bp, Artificial Sequence
  Synthetic Polynucloetide
tacccctacgatgtgcccgattacgctggcagcggc

SEQ ID NO: 1034 - DNA, 27 bp, Artificial Sequence
  Synthetic Polynucloetide
caccatcatcaccatcacggcagcggc

SEQ ID NO: 1035 - DNA, 45 bp, Artificial Sequence
  Synthetic Polynucloetide
ggcctgaacgacatcttcgaggctcagaagatcgaatggcacgag

SEQ ID NO: 1036 - DNA, 39 bp, Artificial Sequence
  Synthetic Polynucloetide
gggtctggaggcggaggcagcggcggaggcgggagcggc

SEQ ID NO: 1037 - DNA, 39 bp, Artificial Sequence
  Synthetic Polynucloetide
ggcagcggcggaggcggaagtggaggcggaggcagcggc

SEQ ID NO: 1038 - DNA, 33 bp, Artificial Sequence
  Synthetic Polynucloetide
tggtctcatccccagtttgaaaagggcagcggc

SEQ ID NO: 1039 - DNA, 33 bp, Artificial Sequence
  Synthetic Polynucloetide
tggtcccatccccagttcgagaaaggcagcggc

SEQ ID NO: 1040 - DNA, 34 bp, Artificial Sequence
  Synthetic Polynucloetide
gattataaagatgatgacgataaagggcagcggc

SEQ ID NO: 1041 - DNA, 981 bp, Artificial Sequence
  Synthetic Polynucloetide
atggccttaccagtgaccgccttgctcctgccgctggccttgctgctccacgccgccaggccggaagtgcagctgcttgaaagtggcggcggactgattcagcctggcggatctctgagactgagctgtgccgccagcggcttcaccttttctagccacgccatgacctgggtccgacaggcacctggaaaagggcttgaatgggtgtccgccatcagcggctctggcgattacacacactacgccgacagcgtgaagggcagattcaccatcagcagagacaacagcaagaacaccgtgtacctccagatgaacagcctgagagccgaggacagcgccgtgtattattgcgccaaggatgaggatggcggcagcctgcttggacacagaggacaaggcaccctggtcaccgtttcttccacgcgtggaggtggtggctccgagcctcacagcctgagctacgacatcacagtgatccccaagttcagacccggaccacgttggtgcgctgtgcagggacaagtggacgagaaaaccttcctgcactacgactgcggcaacaagaccgtgacacccgtgtctccactgggcaagaaactgaacgtgaccaccgcctggaaggcccagaatcctgtgctgagagaagtggtggacatcctgaccgagcagctgtgggacattcagctggaaaactacacccctaaagagcccctgacactccaggccagaatgagctgtgaacagaaggccgagggccacagctctggctcttggcagttcagcttcgacggccagattttcctgctgttcgacagcgagaagcggatgtggaccacagtgcatcccggcgctcgcaagatgaaggaaaagtgggagaacgacaaggtggtggctaccaagctgtacctgtggtctatgggcgactgcatcggctggctggaagatttcctgatgggcatggacagcaccctggaaccttct

SEQ ID NO: 1042 - DNA, 423 bp, Artificial Sequence
  Synthetic Polynucloetide
gatatccagaaccctgaccctgccgtgtaccagctgagagactctaaatccagtgacaagtctgtctgcctattcaccgattttgattctcaaacaaatgtgtcacaaagtaaggattctgatgtgtatatcacagacaaaactgtgctagacatgaggtctatggacttcaagagcaacagtgctgtggcctggagcaacaaatctgactttgcatgtgcaaacgccttcaacaacagcattattccagaagacaccttcttccccagcccagaaagttcctgtgatgtcaagctggtcgagaaaagctttgaaacagatacgaacctaaactttcaaaacctgtcagtgattgggttccgaatcctcctcctgaaagtggccgggtttaatctgctcatgacgctgcggctgtggtccagc

SEQ ID NO: 1043 - DNA, 420 bp, Artificial Sequence
  Synthetic Polynucloetide
atccagaaccctgaccctgccgtgtaccagctgagagactctaaatccagtgacaagtctgtctgcctattcaccgattttgattctcaaacaaatgtgtcacaaagtaaggattctgatgtgtatatcacagacaaaactgtgctagacatgaggtctatggacttcaagagcaacagtgctgtggcctggagcaacaaatctgactttgcatgtgcaaacgccttcaacaacagcattattccagaagacaccttcttccccagcccagaaagttcctgtgatgtcaagctggtcgagaaaagctttgaaacagatacgaacctaaactttcaaaacctgtcagtgattgggttccgaatcctcctcctgaaagtggccgggtttaatctgctcatgacgctgcggctgtggtccagc

SEQ ID NO: 1044 - DNA, 420 bp, Artificial Sequence
  Synthetic Polynucloetide
atccagaaccctgatcctgccgtgtaccagctgcgggatagcaagagcagcgacaagagcgtgtgtctgttcaccgacttcgacagccagaccaacgtgtcccagagcaaggactccgacgtgtacatcaccgataagtgcgtgctggacatgcggagcatggacttcaagagcaactccgccgtggcctggtccaacaagtccgatttcgcctgcgccaacgccttcaacaacagcattatccccgaggacacattcttcccaagcagcgacgtgccctgcgacgtgaagctggtggaaaagagcttcgagacagacaccaacctgaacttccagaacctgagcgtgatcggcttcagaatcctgctgctgaaagtggccggctttaacctgctgatgaccctgcggctgtggtccagc

SEQ ID NO: 1045 - DNA, 420 bp, Artificial Sequence
  Synthetic Polynucloetide
atccagaaccctgatcctgccgtgtaccagctgcgggatagcaagagcagcgacaagagcgtgtgtctgttcaccgacttcgacagccagaccaacgtgtcccagagcaaggactccgacgtgtacatcaccgataagaccgtgctggacatgcggagcatggacttcaagagcaactccgccgtggcctggtccaacaagtccgatttcgcctgcgccaacgccttcaacaacagcattatccccgaggacacattcttcccaagccccgagagcagctgcgacgtgaagctggtggaaaagagcttcgagacagacaccaacctgaacttccagaacctgagcgtgatcggcttcagaatcctgctgctgaaagtggccggctttaacctgctgatgaccctgcggctgtggtccagc

SEQ ID NO: 1046 - DNA, 411 bp, Artificial Sequence
  Synthetic Polynucloetide
cctgatcctgccgtgtaccagctgcgggatagcaagagcagcgacaagagcgtgtgcctgttcaccgacttcgacagccagaccaacgtgtctcagtctaaggatagtgatgtgtatatcaccgacaagaccgtgctggacatgcggagcatggacttcaagagcaacagcgccgtggcctggtccaacaagagcgacttcgcctgcgccaacgccttcaacaacagcatcatccccgaggacaccttcttccccagccccgagagcagctgcgacgtgaaactggtggagaagagcttcgagacagacaccaacctgaacttccagaacctgagcgtgatcggcttcagaatcctgctgctgaaggtggccggcttcaacctgctgatgaccctgcggctgtggagcagc

SEQ ID NO: 1047 - DNA, 420 bp, Artificial Sequence
  Synthetic Polynucloetide
atccagaaccctgatcctgccgtgtaccagctgcgggatagcaagagcagcgacaagagcgtgtgtctgttcaccgacttcgacagccagaccaacgtgtcccagagcaaggactccgacgtgtacatcaccgataagtgcgtgctggacatgcggagcatggacttcaagagcaactccgccgtggcctggtccaacaagtccgatttcgcctgcgccaacgccttcaacaacagcattatccccgaggacacattcttcccaagccccgagagcagctgcgacgtgaagctggtggaaaagagcttcgagacagacaccaacctgaacttccagaacctgagcgtgatcggcttcagaatcctgctgctgaaagtggccggctttaacctgctgatgaccctgcggctgtggtccagc

SEQ ID NO: 1048 - DNA, 411 bp, Artificial Sequence
  Synthetic Polynucloetide
cctgatcctgccgtgtaccagctgcgggatagcaagagcagcgacaagagcgtgtgtctgttcaccgacttcgacagccagaccaacgtgtcccagagcaaggactccgacgtgtacatcaccgataagtgcgtgctggacatgcggagcatggacttcaagagcaactccgccgtggcctggtccaacaagtccgatttcgcctgcgccaacgccttcaacaacagcattatccccgaggacacattcttcccaagccccgagagcagctgcgacgtgaagctggtggaaaagagcttcgagacagacaccaacctgaacttccagaacctgagcgtgatcggcttcagaatcctgctgctgaaagtggccggctttaacctgctgatgaccctgcggctgtggtccagc

SEQ ID NO: 1049 - DNA, 420 bp, Artificial Sequence
  Synthetic Polynucloetide
atccagaaccctgatcctgccgtgtaccagctgcgggatagcaagagcagcgacaagagcgtgtgtctgttcaccgacttcgacagccagaccaacgtgtcccagagcaaggactccgacgtgtacatcaccgataagaccgtgctggacatgcggagcatggacttcaagagcaactccgccgtggcctggtccaacaagtccgatttcgcctgcgccaacgccttcaacaacagcattatccccgaggacacattcttcccaagcagcgacgtgccctgcgacgtgaagctggtggaaaagagcttcgagacagacaccaacctgaacttccagaacctgagcgtgatcggcttcagaatcctgctgctgaaagtggccggctttaacctgctgatgaccctgcggctgtggtccagc

SEQ ID NO: 1050 - DNA, 420 bp, Artificial Sequence
  Synthetic Polynucloetide
atccagaaccctgatcctgccgtgtaccagctgcgggatagcaagagcagcgacaagagcgtgtgtctgttcaccgacttcgacagccagaccaacgtgtcccagagcaaggactccgacgtgtacatcaccgataagaccgtgctggacatgcggagcatggacttcaagagcaaccgcgccgtggcctggtccaacaagtccgatttcgcctgcgccaacgccttcaacaacagcattatccccgaggacacattcttcccaagccccgagagcagctgcgacgtgaagctggtggaaaagagcttcgagacagacaccaacctgaacttccagaacctgagcgtgatcggcttcagaatcctgctgctgaaagtggccggctttaacctgctgatgaccctgcggctgtggtccagc

SEQ ID NO: 1051 - DNA, 420 bp, Artificial Sequence
  Synthetic Polynucloetide
atccagaaccctgatcctgccgtgtaccagctgcgggatagcaagagcagcgacaagagcgtgtgtctgttcaccgacttcgacagccagaccaacgtgtcccagagcaaggactccgacgtgtacatcaccgataagaccgtgctggacatgcggagcatggacttcaagagcaaccgcgccgtggcctggtccaacaagtccgatttcgcctgcgccaacgccttcaacaacagcattatccccgaggacacattcttcccaagcagcgacgtgccctgcgacgtgaagctggtggaaaagagcttcgagacagacaccaacctgaacttccagaacctgagcgtgatcggcttcagaatcctgctgctgaaagtggccggctttaacctgctgatgaccctgcggctgtggtccagc

SEQ ID NO: 1052 - DNA, 420 bp, Artificial Sequence
  Synthetic Polynucloetide
atccagaaccctgatcctgccgtgtaccagctgcgggatagcaagagcagcgacaagagcgtgtgtctgttcaccgacttcgacagccagaccaacgtgtcccagagcaaggactccgacgtgtacatcaccgataagaccgtgctggacatgcggagcatggacttcaagagcaactccgccgtggcctggtccaacaagtccgatttcgcctgcgccaacgccttcaacaacagcattatccccgaggacacattcttcccaagcagcgacagcagctgcgacgtgaagctggtggaaaagagcttcgagacagacaccaacctgaacttccagaacctgagcgtgatcggcttcagaatcctgctgctgaaagtggccggctttaacctgctgatgaccctgcggctgtggtccagc

SEQ ID NO: 1053 - DNA, 717 bp, Artificial Sequence
  Synthetic Polynucloetide
atccagaaccctgatcctgccgtgtaccagctgcgggatagcaagagcagcgacaagagcgtgtgtctgttcaccgacttcgacagccagaccaacgtgtcccagagcaaggactccgacgtgtacatcaccgataagaccgtgctggacatgcggagcatggacttcaagagcaactccgccgtggcctggtccaacaagtccgatttcgcctgcgccaacgccttcaacaacagcattatccccgaggacacattcttcccaagccccgagagcagctgcggtacccagagttttgggttgttggaccctaaattgtgctatctgttggacggaatcctgttcatttacggagtgatcctgaccgcattgttcctgcgggttaagttttccagatccgcagacgcacccgcttaccaacaagggcagaaccaactctacaatgaacttaatttggggcggagggaagagtacgacgttctggacaaaaggaggggacgagatcccgagatgggcggaaagcctcagcgaaggaagaatccgcaagaggggctttataacgaactccagaaagataaaatggcagaagcctatagtgagattgggatgaagggagaaaggaggaggggtaaaggtcacgatgggttgtaccaaggattgagcacagccactaaagatacctatgatgcgctccacatgcaggccctgccgccaaga

SEQ ID NO: 1054 - DNA, 408 bp, Artificial Sequence
  Synthetic Polynucloetide
atccagaaccctgaacctgccgtgtaccagctgaaggaccccagaagccaggacagcaccctgtgcctgttcaccgacttcgacagccagatcaacgtgcccaagacaatggaaagcggcaccttcatcaccgacaagaccgtgctggacatgaaggctatggacagcaagagcaacggcgccattgcctggtccaaccagaccagcttcacatgccaggacatcttcaaagagacaaacgccacctacccctccagcgacgtgccctgtgacgccaccctgaccgagaagtccttcgagacagacatgaacctcaacttccagaacctgagcgtgatgggcctgcgaatcctgctgctgaaagtggccggcttcaacctgctgatgaccctgcggctgtggtccagc

SEQ ID NO: 1055 - DNA, 399 bp, Artificial Sequence
  Synthetic Polynucloetide
gtgcaggaccctgaccctagcgtgtaccagatgagaagccccaagaccggcaggaccgtgtgcctgttcaccgacttcgacagccaggccgacttccagaagcctgagggggccaccgtgatctccctgaacagcaccgtgctggacatgaaagtgatggacagcaagagcaacggcgctctgacctggaacagcgagacaaacatcgagtgcaaagagaacttccagcagcccttctaccccagcagcaactactcctgcgacgccaagctgatcgagaagtccttcgagacagacatggacctgaacttctacaacctgctggtcatcggcctgagaatcctgctgctgaaagtgatcggcttcaacctgttcatgaccctgaggctgtggtcctgc

SEQ ID NO: 1056 - DNA, 531 bp, Artificial Sequence
  Synthetic Polynucloetide
gaggacctgaacaaggtgttcccacccgaggtcgctgtgtttgagccatcagaagcagagatctcccacacccaaaaggccacactggtgtgcctggccacaggcttcttccccgaccacgtggagctgagctggtgggtgaatgggaaggaggtgcacagtggggtcagcacagacccgcagcccctcaaggagcagcccgccctcaatgactccagatactgcctgagcagccgcctgagggtctcggccaccttctggcagaacccccgcaaccacttccgctgtcaagtccagttctacgggctctcggagaatgacgagtggacccaggatagggccaaacccgtcacccagatcgtcagcgccgaggcctggggtagagcagactgtggctttacctcggtgtcctaccagcaaggggtcctgtctgccaccatcctctatgagatcctgctagggaaggccaccctgtatgctgtgctggtcagcgcccttgtgttgatggccatggtcaagagaaaggatttc

SEQ ID NO: 1057 - DNA, 537 bp, Artificial Sequence
  Synthetic Polynucloetide
gaggacctgaaaaacgtgttcccacccgaggtcgctgtgtttgagccatcagaagcagagatctcccacacccaaaaggccacactggtatgcctggccacaggcttctaccccgaccacgtggagctgagctggtgggtgaatgggaaggaggtgcacagtggggtcagcacagacccgcagcccctcaaggagcagcccgccctcaatgactccagatactgcctgagcagccgcctgagggtctcggccaccttctggcagaacccccgcaaccacttccgctgtcaagtccagttctacgggctctcggagaatgacgagtggacccaggatagggccaaacccgtcacccagatcgtcagcgccgaggcctggggtagagcagactgtggcttcacctccgagtcttaccagcaaggggtcctgtctgccaccatcctctatgagatcttgctagggaaggccaccttgtatgccgtgctggtcagtgccctcgtgctgatggccatggtcaagagaaaggattccagaggc

SEQ ID NO: 1058 - DNA, 537 bp, Artificial Sequence; identical to SEQ ID NO: 1057
  Synthetic Polynucloetide

SEQ ID NO: 1059 - DNA, 537 bp, Artificial Sequence
  Synthetic Polynucloetide
gaggacctgaagaacgtgttcccacctgaggtggccgtgttcgagcctagcgaggccgagatcagccacacccagaaagccaccctcgtgtgcctggctaccggcttctaccccgaccatgtggaactgtcttggtgggtcaacggcaaagaggtgcacagcggcgtgtgtaccgacccccagccactgaaagaacagcccgccctgaacgacagccggtactgcctgagcagcagactgagagtgtccgccaccttctggcagaacccccggaaccacttcagatgccaggtgcagttctacggcctgagcgagaacgacgagtggacccaggacagagccaagcccgtgacccagatcgtgtctgccgaagcctggggcagagccgattgcggctttaccagcgagagctaccagcagggcgtgctgagcgccaccatcctgtacgagatcctgctgggcaaggccaccctgtacgccgtgctggtgtctgccctggtgctgatggctatggtcaagcggaaggacagccgggga

SEQ ID NO: 1060 - DNA, 537 bp, Artificial Sequence
  Synthetic Polynucloetide
gaggacctgaagaacgtgttcccacctgaggtggccgtgttcgagcctagcaaggccgagatcgcccacacccagaaagccaccctcgtgtgcctggctaccggcttctaccccgaccatgtggaactgtcttggtgggtcaacggcaaagaggtgcacagcggcgtgtgtaccgacccccagccactgaaagaacagcccgccctgaacgacagccggtactgcctgagcagcagactgagagtgtccgccaccttctggcagaacccccggaaccacttcagatgccaggtgcagttctacggcctgagcgagaacgacgagtggacccaggacagagccaagcccgtgacccagatcgtgtctgccgaagcctggggcagagccgattgcggcatcaccagcgccagctaccaccagggcgtgctgagcgccaccatcctgtacgagatcctgctgggcaaggccaccctgtacgccgtgctggtgtctgccctggtgctgatggctatggtcaagcggaaggacagccgggga

SEQ ID NO: 1061 - DNA, 537 bp, Artificial Sequence
  Synthetic Polynucloetide
gaggacctgaagaacgtgttcccacctgaggtggccgtgttcgagcctagcgaggccgagatcagccacacccagaaagccaccctcgtgtgcctggctaccggcttctaccccgaccatgtggaactgtcttggtgggtcaacggcaaagaggtgcacagcggcgtgtctaccgacccccagccactgaaagaacagcccgccctgaacgacagccggtactgcctgagcagcagactgagagtgtccgccaccttctggcagaacccccggaaccacttcagatgccaggtgcagttctacggcctgagcgagaacgacgagtggacccaggacagagccaagcccgtgacccagatcgtgtctgccgaagcctggggcagagccgattgcggctttaccagcgagagctaccagcagggcgtgctgagcgccaccatcctgtacgagatcctgctgggcaaggccaccctgtacgccgtgctggtgtctgccctggtgctgatggctatggtcaagcggaaggacagccgggga

SEQ ID NO: 1062 - DNA, 534 bp, Artificial Sequence
  Synthetic Polynucloetide
gacctgaagaacgtgttcccacctgaggtggccgtgttcgagcctagcgaggccgagatcagccacacccagaaagccaccctcgtgtgcctggctaccggcttctaccccgaccatgtggaactgtcttggtgggtcaacggcaaagaggtgcacagcggcgtgtctaccgacccccagccactgaaagaacagcccgccctgaacgacagccggtactgcctgagcagcagactgagagtgtccgccaccttctggcagaacccccggaaccacttcagatgccaggtgcagttctacggcctgagcgagaacgacgagtggacccaggacagagccaagcccgtgacccagatcgtgtctgccgaagcctggggcagagccgattgcggctttaccagcgagagctaccagcagggcgtgctgagcgccaccatcctgtacgagatcctgctgggcaaggccaccctgtacgccgtgctggtgtctgccctggtgctgatggctatggtcaagcggaaggacagccgggga

SEQ ID NO: 1063 - DNA, 531 bp, Artificial Sequence
  Synthetic Polynucloetide
gaggacctgaagaacgtgttcccacctgaggtggccgtgttcgagcccagcgaggccgagatttcacacactcagaaagccacactcgtatgtctggcgactggtttctttcccgaccacgtggagctgtcttggtgggtgaacggcaaagaggtgcacagcggggtctctaccgacccccagccactgaaagagcagcccgccctgaacgacagccggtactgcctctcttctcggctgagagtgtccgccaccttctggcagaacccccggaaccacttcagatgccaggtgcagttctacggcctgagcgagaacgacgagtggacccaggacagagccaagcctgtgacccagatcgtgagtgctgaagcgtggggacgcgccgattgcggctttaccagcgagagctaccagcagggcgtgctgtctgccaccatcctgtacgagatcctgctgggcaaggccaccctgtacgccgtgctggtgtccgccctggtgctgatggctatggtgaagcggaaggacttc

SEQ ID NO: 1064 - DNA, 531 bp, Artificial Sequence
  Synthetic Polynucloetide
gaggacctgaacaaggtgttcccacctgaggtggccgtgttcgagcccagcgaggccgagatttcacacactcagaaagccacactcgtatgtctggcgactggtttctttcccgaccacgtggagctgtcttggtgggtgaacggcaaagaggtgcacagcggggtctctaccgacccccagccactgaaagagcagcccgccctgaacgacagccggtactgcctctcttctcggctgagagtgtccgccaccttctggcagaacccccggaaccacttcagatgccaggtgcagttctacggcctgagcgagaacgacgagtggacccaggacagagccaagcctgtgacccagatcgtgagtgctgaagcgtggggacgcgccgattgcggctttaccagcgtgagctaccagcagggcgtgctgtctgccaccatcctgtacgagatcctgctgggcaaggccaccctgtacgccgtgctggtgtccgccctggtgctgatggctatggtgaagcggaaggacttc

SEQ ID NO: 1065 - DNA, 537 bp, Artificial Sequence
  Synthetic Polynucloetide
gaggacctgaagaacgtgttcccacctgaggtggccgtgttcgagcctagcaaggccgagatcgcccacacccagaaagccaccctcgtgtgcctggctaccggcttctaccccgaccatgtggaactgtcttggtgggtcaacggcaaagaggtgcacagcggcgtgtctaccgacccccagccactgaaagaacagcccgccctgaacgacagccggtactgcctgagcagcagactgagagtgtccgccaccttctggcagaacccccggaaccacttcagatgccaggtgcagttctacggcctgagcgagaacgacgagtggacccaggacagagccaagcccgtgacccagatcgtgtctgccgaagcctggggcagagccgattgcggcatcaccagcgccagctaccaccagggcgtgctgagcgccaccatcctgtacgagatcctgctgggcaaggccaccctgtacgccgtgctggtgtctgccctggtgctgatggctatggtcaagcggaaggacagccgggga

SEQ ID NO: 1066 - DNA, 537 bp, Artificial Sequence
  Synthetic Polynucloetide
gaggacctgaagaacgtgttcccacctgaggtggccgtgttcgagcctagcaaggccgagatcgcccacacccagaaagccaccctcgtgtgcctggctaccggcttctaccccgaccatgtggaactgtcttggtgggtcaacggcaaagaggtgcacagcggcgtgtctaccgacccccagccactgaaagaacagcccgccctgaacgacagccggtactgcctgagcagcagactgagagtgtccgccaccttctggcagaacccccggaaccacttcagatgccaggtgcagttctacggcctgagcgagaacgacgagtggacccaggacagagccaagcccgtgacccagatcgtgtctgccgaagcctggggcagagccgattgcggctttaccagcgagagctaccagcagggcgtgctgagcgccaccatcctgtacgagatcctgctgggcaaggccaccctgtacgccgtgctggtgtctgccctggtgctgatggctatggtcaagcggaaggacagccgggga

SEQ ID NO: 1067 - DNA, 537 bp, Artificial Sequence
  Synthetic Polynucloetide
gaggacctgaagaacgtgttcccacctgaggtggccgtgttcgagcctagcaaggccgagatcagccacacccagaaagccaccctcgtgtgcctggctaccggcttctaccccgaccatgtggaactgtcttggtgggtcaacggcaaagaggtgcacagcggcgtgtctaccgacccccagccactgaaagaacagcccgccctgaacgacagccggtactgcctgagcagcagactgagagtgtccgccaccttctggcagaacccccggaaccacttcagatgccaggtgcagttctacggcctgagcgagaacgacgagtggacccaggacagagccaagcccgtgacccagatcgtgtctgccgaagcctggggcagagccgattgcggcatcaccagcgagagctaccagcagggcgtgctgagcgccaccatcctgtacgagatcctgctgggcaaggccaccctgtacgccgtgctggtgtctgccctggtgctgatggctatggtcaagcggaaggacagccgggga

SEQ ID NO: 1068 - DNA, 537 bp, Artificial Sequence
  Synthetic Polynucloetide
gaggacctgaagaacgtgttcccacctgaggtggccgtgttcgagcctagcaaggccgagatcagccacacccagaaagccaccctcgtgtgcctggctaccggcttctaccccgaccatgtggaactgtcttggtgggtcaacggcaaagaggtgcacagcggcgtgtctaccgacccccagccactgaaagaacagcccgccctgaacgacagccggtactgcctgagcagcagactgagagtgtccgccaccttctggcagaacccccggaaccacttcagatgccaggtgcagttctacggcctgagcgagaacgacgagtggacccaggacagagccaagcccgtgacccagatcgtgtctgccgaagcctggggcagagccgattgcggctttaccagcgccagctaccagcagggcgtgctgagcgccaccatcctgtacgagatcctgctgggcaaggccaccctgtacgccgtgctggtgtctgccctggtgctgatggctatggtcaagcggaaggacagccgggga

SEQ ID NO: 1069 - DNA, 537 bp, Artificial Sequence
  Synthetic Polynucloetide
gaggacctgaagaacgtgttcccacctgaggtggccgtgttcgagcctagcaaggccgagatcagccacacccagaaagccaccctcgtgtgcctggctaccggcttctaccccgaccatgtggaactgtcttggtgggtcaacggcaaagaggtgcacagcggcgtgtctaccgacccccagccactgaaagaacagcccgccctgaacgacagccggtactgcctgagcagcagactgagagtgtccgccaccttctggcagaacccccggaaccacttcagatgccaggtgcagttctacggcctgagcgagaacgacgagtggacccaggacagagccaagcccgtgacccagatcgtgtctgccgaagcctggggcagagccgattgcggctttaccagcgagagctaccaccagggcgtgctgagcgccaccatcctgtacgagatcctgctgggcaaggccaccctgtacgccgtgctggtgtctgccctggtgctgatggctatggtcaagcggaaggacagccgggga

SEQ ID NO: 1070 - DNA, 537 bp, Artificial Sequence
  Synthetic Polynucloetide
gaggacctgaagaacgtgttcccacctgaggtggccgtgttcgagcctagcagggccgagatcgcccacacccagaaagccaccctcgtgtgcctggctaccggcttctaccccgaccatgtggaactgtcttggtgggtcaacggcaaagaggtgcacagcggcgtgtctaccgacccccagccactgaaagaacagcccgccctgaacgacagccggtactgcctgagcagcagactgagagtgtccgccaccttctggcagaacccccggaaccacttcagatgccaggtgcagttctacggcctgagcgagaacgacgagtggacccaggacagagccaagcccgtgacccagatcgtgtctgccgaagcctggggcagagccgattgcggctttaccagcgagagctaccagcagggcgtgctgagcgccaccatcctgtacgagatcctgctgggcaaggccaccctgtacgccgtgctggtgtctgccctggtgctgatggctatggtcaagcggaaggacagccgggga

SEQ ID NO: 1071 - DNA, 537 bp, Artificial Sequence
  Synthetic Polynucloetide
gaggacctgaagaacgtgttcccacctgaggtggccgtgttcgagcctagcagggccgagatcagccacacccagaaagccaccctcgtgtgcctggctaccggcttctaccccgaccatgtggaactgtcttggtgggtcaacggcaaagaggtgcacagcggcgtgtctaccgacccccagccactgaaagaacagcccgccctgaacgacagccggtactgcctgagcagcagactgagagtgtccgccaccttctggcagaacccccggaaccacttcagatgccaggtgcagttctacggcctgagcgagaacgacgagtggacccaggacagagccaagcccgtgacccagatcgtgtctgccgaagcctggggcagagccgattgcggctttaccagcgagagctaccagcagggcgtgctgagcgccaccatcctgtacgagatcctgctgggcaaggccaccctgtacgccgtgctggtgtctgccctggtgctgatggctatggtcaagcggaaggacagccgggga

SEQ ID NO: 1072 - DNA, 537 bp, Artificial Sequence
  Synthetic Polynucloetide
gaggacctgaagaacgtgttcccacctgaggtggccgtgttcgagcctagcaaggccgagatcgcccacacccagaaagccaccctcgtgtgcctggctaccggcttctaccccgaccatgtggaactgtcttggtgggtcaacggcaaagaggtgcacagcggcgtgtctaccgacccccagccactgaaagaacagcccgccctgaacgacagccggtactgcctgagcagcggactgagagtgtccgccaccttctggcagaacccccggaaccacttcagatgccaggtgcagttctacggcctgagcgagaacgacgagtggacccaggacagagccaagcccgtgacccagatcgtgtctgccgaagcctggggcagagccgattgcggcatcaccagcgccagctaccaccagggcgtgctgagcgccaccatcctgtacgagatcctgctgggcaaggccaccctgtacgccgtgctggtgtctgccctggtgctgatggctatggtcaagcggaaggacagccgggga

SEQ ID NO: 1073 - DNA, 537 bp, Artificial Sequence
  Synthetic Polynucloetide
gaggacctgaagaacgtgttcccacctgaggtggccgtgttcgagcctagcaaggccgagatcgcccacacccagaaagccaccctcgtgtgcctggctaccggcttctaccccgaccatgtggaactgtcttggtgggtcaacggcaaagaggtgcacagcggcgtgtctaccgacccccagccactgaaagaacagcccgccctgaacgacagccggtactgcctgagcagcggactgagagtgtccgccaccttctggcagaacccccggaaccacttcagatgccaggtgcagttctacggcctgagcgagaacgacgagtggacccaggacagagccaagcccgtgacccagatcgtgtctgccgaagcctggggcagagccgattgcggctttaccagcgagagctaccagcagggcgtgctgagcgccaccatcctgtacgagatcctgctgggcaaggccaccctgtacgccgtgctggtgtctgccctggtgctgatggctatggtcaagcggaaggacagccgggga

SEQ ID NO: 1074 - DNA, 537 bp, Artificial Sequence
  Synthetic Polynucloetide
gaggacctgaagaacgtgttcccacctgaggtggccgtgttcgagcctagcgaggccgagatcagccacacccagaaagccaccctcgtgtgcctggctaccggcttctaccccgaccatgtggaactgtcttggtgggtcaacggcaaagaggtgcacagcggcgtgtctaccgacccccagccactgaaagaacagcccgccctgaacgacagccggtactgcctgagcagcggactgagagtgtccgccaccttctggcagaacccccggaaccacttcagatgccaggtgcagttctacggcctgagcgagaacgacgagtggacccaggacagagccaagcccgtgacccagatcgtgtctgccgaagcctggggcagagccgattgcggctttaccagcgagagctaccagcagggcgtgctgagcgccaccatcctgtacgagatcctgctgggcaaggccaccctgtacgccgtgctggtgtctgccctggtgctgatggctatggtcaagcggaaggacagccgggga

SEQ ID NO: 1075 - DNA, 513 bp, Artificial Sequence
  Synthetic Polynucloetide
gaggatctgcggaacgtgaccccacccaaggtgtccctgttcgagcccagcaaggccgagatcgccaataaacagaaggccaccctcgtgtgcctggccagaggcttcttccccgaccacgtggaactgtcttggtgggtcaacggcaaagaggtgcacagcggcgtcagcaccgaccctcaggcctacaaagagagcaactacagctactgcctgagcagtcggctgcgggtgtccgccaccttctggcacaacccccggaaccacttcagatgccaggtgcagttccacggcctgagcgaagaggacaagtggcccgagggcagccccaagcctgtcacccagaacatcagcgccgaggcctggggcagagcctgtggcatcaccagcagctaccagcagggcgtgctgagcgccaccatcctgtacgagatcctgctgggcaaggccaccctgtacgccgtgctggtgtccaccctggtggtcatggctatggtcaagcggaagaacagc

SEQ ID NO: 1076 - DNA, 531 bp, Artificial Sequence
  Synthetic Polynucloetide
gaggacctccagaaagtgaccccccctaccgtgaccgtgttcgagccttctgaggccgagatcagccggacccagaaagccacactcgtgtgcctggctcggggcttctaccccgatcacgtggaactgtcttggtgggtcaacggcaaagaagtgaccagcggcttcagcaccgacccccagcctgacaaagagcggcccagcgagaacgacagcagctactgcctgagcagcagactgagagtgtccgccagcttctggcacaacccccggaaccacttcagatgccaggtgcagttctacggcctgggcgacgacgacgagtggaagtacgacagagtgaagcccatcacccagaacatcagcgccgaagcctggggcagagccgattgcggctttacctccgtcagctaccaccagggcgtgctgagcgccaccatcctgtacgagatcctgctgggcaaggccaccctgtacgccgtgctggtgtctatcctggtgctgatggctaaagtgaagcggaagggcagc

SEQ ID NO: 1077 - DNA, 828 bp, Artificial Sequence
  Synthetic Polynucloetide
gaggacctgaagaacgtgttcccacctgaggtggccgtgttcgagcctagcgaggccgagatcagccacacccagaaagccaccctcgtgtgcctggctaccggcttctaccccgaccatgtggaactgtcttggtgggtcaacggcaaagaggtgcacagcggcgtgtctaccgacccccagccactgaaagaacagcccgccctgaacgacagccggtactgcctgagcagcagactgagagtgtccgccaccttctggcagaacccccggaaccacttcagatgccaggtgcagttctacggcctgagcgagaacgacgagtggacccaggacagagccaagcccgtgacccagatcgtgtctgccgaagcctggggcagagccgattgcggatcccagagcttcggcctgctggaccccaagctgtgctacctgctggatggcatcctgttcatctacggcgtgatcctgaccgccctgttcctgagagtgaagttcagcagaagcgccgacgcccctgcctaccagcagggacagaaccaactgtacaacgagctgaacctgggcagacgggaagagtacgacgtgctggacaagcggagaggcagggaccctgagatgggcggaaagccccagcggagaaagaacccccaggaaggactgtataacgaactccagaaagacaagatggccgaagcctacagcgagatcggcatgaagggcgagcggagaagaggcaagggccacgatggcctgtaccagggcctgagcaccgccaccaaggacacctatgacgccctgcacatgcaggccctgcctccaaga

SEQ ID NO: 1078 - DNA, 807 bp, Artificial Sequence
  Synthetic Polynucloetide
gggtgtccagccctacccacaggtgtgggcggcacaccctttccttctctggccccaccaatcatgctgctggtggatggaaagcagcagatggtggtggtctgcctggtccttgatgttgcaccccctggccttgacagccccatctggttctcagccggcaatggcagtgcactggatgccttcacctatggcccttccccagcaacggatggcacctggaccaacttggcccatctctccctgccttctgaggagctggcatcctgggagcctttggtctgccacactgggcctggggctgagggtcacagcaggagtacacagcccatgcatctgtcaggagaggcttctacagccaggacctgcccccaggagcctctcagggggacaccgggtggggcgctgtggctgggggtcctgcggctgctgctcttcaagctgctgctgtttgacctgctcctgacctgcagctgcctgtgcgaccccgcgggcccgctgccttcccccgcaaccaccacccgcctgcgagccctcggctcccatcgactgcacccggccacggagactgggggacgagaggccaccagctcacccagaccccagcctcgggaccgccgctggggtgacacccctccgggtcggaagcccgggagcccagtatggggggaagggtcttacctcagcagttaccccacttgcccagcacaggcctggtgctcaagatctcgcctcagggctccttcctccagtcttggagcattttttgcaggtgacctgcctcctcctctgcaggctggagctgcc

SEQ ID NO: 1079 - DNA, 774 bp, Artificial Sequence
  Synthetic Polynucloetide
accccattcccttctctggcccctcccatcatgctgctggtggacggcaagcagcagatggtggtcgtgtgcctggtgctggatgtggccccacctggactggacagccccatctggtttagcgccggcaatggctctgccctggacgcctttacctacggcccaagccctgccaccgatggcacctggacaaatctggcccacctgagcctgcccagcgaggaactggcttcttgggagcctctcgtgtgccacacaggacctggcgctgagggacacagcagatccacccagcctatgcacctgtctggcgaggccagcaccgccagaacctgtcctcaggaacctctgagaggcacccctggcggagcactgtggctgggagtgctgagactgctgctgttcaagctgctgctgtttgacctgctgctgacctgctcctgtctgtgcgatcctgccggccctctgccttctcctgccaccaccacaagactgagagccctgggcagccacagactgcaccctgccacagagacaggcggcagagaggccacaagcagccctagaccccagcccagagacagaagatggggcgataccccccctggcagaaagcctggatctccagtgtggggcgagggcagctacctgagcagctaccctacatgccctgcccaggcttggtgcagcagaagcgcactgagagcacccagctctagcctgggagccttctttgccggcgatctgcctccaccactccaggctggcgctgct

SEQ ID NO: 1080 - DNA, 630 bp, Artificial Sequence
  Synthetic Polynucloetide
accccattcccttctctggcccctcccatcatgctgctggtggacggcaagcagcagatggtggtcgtgtgcctggtgctggatgtggccccacctggactggacagccccatctggtttagcgccggcaatggctctgccctggacgcctttacctacggcccaagccctgccaccgatggcacctggacaaatctggcccacctgagcctgcccagcgaggaactggcttcttgggagcctctcgtgtgccacacaggacctggcgctgagggacacagcagatccacccagcctatgcacctgtctggcgaggccagcaccgccagaacctgtcctcaggaacctctgagaggcacccctggcggagcactgtggctgggagtgctgagactgctgctgttcaagctgctgctgtttgacctgctgctgacctgctcctgtctgtgcgatcctgccggccctctgccttctcctgccaccaccacaagactgagagccctgggcagccacagactgcaccctgccacagagacaggcggcagagaggccacaagcagccctagaccccagcccagagacagaagatggggcgataccccccctggcagaaagcctggatctccagtc

SEQ ID NO: 1081 - DNA, 567 bp, Artificial Sequence
  Synthetic Polynucloetide
gataaacaacttgatgcagatgtttcccccaagcccactatttttcttccttcaattgctgaaacaaaactccagaaggctggaacatacctttgtcttcttgagaaatttttcccagatattattaagatacattggcaagaaaagaagagcaacacgattctgggatcccaggaggggaacaccatgaagactaacgacacatacatgaaatttagctggttaacggtgccagaagagtcactggacaaagaacacagatgtatcgtcagacatgagaataataaaaacggaattgatcaagaaattatctttcctccaataaagacagatgtcaccacagtggatcccaaatacaattattcaaaggatgcaaatgatgtcatcacaatggatcccaaagacaattggtcaaaagatgcaaatgatacactactgctgcagctcacaaacacctctgcatattacatgtacctcctcctgctcctcaagagtgtggtctattttgccatcatcacctgctgtctgcttggaagaacggctttctgctgcaatggagagaaatca

SEQ ID NO: 1082 - DNA, 519 bp, Artificial Sequence
  Synthetic Polynucloetide
gacaagcagctggacgccgacgtgtcccccaagcctaccatcttcctgccctctatcgccgagacaaagctccagaaggccggcacctacctgtgcctgctggaaaagttcttcccagatgtgattaagatccactggcaggaaaagaagtccaacaccatcctgggcagccaggaaggcaacaccatgaagaccaacgacacctacatgaagttcagctggctgaccgtgcccgagaagtccctggacaaagaacacagatgcatcgtgcggcacgaaaacaacaagaacggcgtggaccaggaaatcatcttcccacccatcaagaccgatgtgattacaatggaccccaaggacaactgctccaaggacgccaacgataccctgctgctccagctgaccaacaccagcgcctactacatgtacttgttgctgctgctgaagtccgtggtgtacttcgccatcatcacatgctgcctgctgcggagaaccgccttctgctgcaacggcgagaagtct

SEQ ID NO: 1083 - DNA, 459 bp, Artificial Sequence
  Synthetic Polynucloetide
agtcagcctcataccaaaccatccgtttttgtcatgaaaaatggaacaaatgtcgcttgtctggtgaaggaattctaccccaaggatataagaataaatctcgtgtcatccaagaagataacagagtttgatcctgctattgtcatctctcccagtgggaagtacaatgctgtcaagcttggtaaatatgaagattcaaattcagtgacatgttcagttcaacacgacaataaaactgtgcactccactgactttgaagtgaagacagattctacagatcacgtaaaaccaaaggaaactgaaaacacaaagcaaccttcaaagagctgccataaacccaaagccatagttcataccgagaaggtgaacatgatgtccctcacagtgcttgggctacgaatgctgtttgcaaagactgttgccgtcaattttctcttgactgccaagttatttttcttg

SEQ ID NO: 1084 - DNA, 459 bp, Artificial Sequence
  Synthetic Polynucloetide
agccagcctcacaccaagcccagcgtgttcgtgatgaagaacggcaccaacgtggcctgcctcgtgaaagagttctaccccaaggacatcaggatcaacctggtgtccagcaagaagatcaccgagttcgaccccgccatcgtgatctcccccagcggcaagtacaacgccgtgaagctggggaagtacgaggacagcaacagcgtgacctgctccgtgcagcacgacaacaagaccgtgcacagcaccgactttgaagtgaaaaccgactccaccgaccacgtgaagcccaaagagacagagaacaccaagcagcccagcaagagctgccacaagcccaaggccatcgtgcacaccgagaaagtgaacatgatgagcctgaccgtgctgggcctgcggatgctgttcgccaaaaccgtggccgtgaacttcctgctgaccgccaagctgttcttcctc

SEQ ID NO: 1085 - DNA, 321 bp, Artificial Sequence
  Synthetic Polynucloetide
atccagaaccctgatcctgccgtgtacatcaccgataagaccgtgctggacatgcggagcatggacttcaagagcaactccgccgtggcctggtccaacaagtccgatttcgcctgcgccaacgccttcaacaacagcattatccccgaggacacattcttcccaagccccgagagcagctgcgacgtgaagctggtggaaaagagcttcgagacagacaccaacctgaacttccagaacctgagcgtgatcggcttcagaatcctgctgctgaaagtggccggctttaacctgctgatgaccctgcggctgtggtccagc

SEQ ID NO: 1086 - DNA, 537 bp, Artificial Sequence
  Synthetic Polynucloetide
gaggacctgaagaacgtgttcccacctgaggtggccgtgttcgagcctagcagggccgagatcagccacacccagaaagccaccctcgtgtgcctggctaccggcttctaccccgaccatgtggaactgtcttggtgggtcaacggcaaagaggtgcacagcggcgtgtgtaccgacccccagccactgaaagaacagcccgccctgaacgacagccggtactgcctgagcagcagactgagagtgtccgccaccttctggcagaacccccggaaccacttcagatgccaggtgcagttctacggcctgagcgagaacgacgagtggacccaggacagagccaagcccgtgacccagatcgtgtctgccgaagcctggggcagagccgattgcggctttaccagcgagagctaccagcagggcgtgctgagcgccaccatcctgtacgagatcctgctgggcaaggccaccctgtacgccgtgctggtgtctgccctggtgctgatggctatggtcaagcggaaggacagccgggga

SEQ ID NO: 1087 - DNA, 537 bp, Artificial Sequence
  Synthetic Polynucloetide
gaggacctgaagaacgtgttcccacctgaggtggccgtgttcgagcctagcagggccgagatcgcccacacccagaaagccaccctcgtgtgcctggctaccggcttctaccccgaccatgtggaactgtcttggtgggtcaacggcaaagaggtgcacagcggcgtgtgtaccgacccccagccactgaaagaacagcccgccctgaacgacagccggtactgcctgagcagcagactgagagtgtccgccaccttctggcagaacccccggaaccacttcagatgccaggtgcagttctacggcctgagcgagaacgacgagtggacccaggacagagccaagcccgtgacccagatcgtgtctgccgaagcctggggcagagccgattgcggctttaccagcgagagctaccagcagggcgtgctgagcgccaccatcctgtacgagatcctgctgggcaaggccaccctgtacgccgtgctggtgtctgccctggtgctgatggctatggtcaagcggaaggacagccgggga

SEQ ID NO: 1088 - DNA, 90 bp, Artificial Sequence
  Synthetic Polynucloetide
cagagcttcggcctgctggaccccaagctgtgctacctgctggatggcatcctgttcatctacggcgtgatcctgaccgccctgttcctg

SEQ ID NO: 1089 - DNA, 429 bp, Artificial Sequence
  Synthetic Polynucloetide
cagagcttcggcctgctggaccccaagctgtgctacctgctggatggcatcctgttcatctacggcgtgatcctgaccgccctgttcctgagagtgaagttcagcagaagcgccgacgcccctgcctaccagcagggacagaaccaactgtacaacgagctgaacctgggcagacgggaagagtacgacgtgctggacaagcggagaggcagggaccctgagatgggcggaaagccccagcggagaaagaacccccaggaaggactgtataacgaactccagaaagacaagatggccgaagcctacagcgagatcggcatgaagggcgagcggagaagaggcaagggccacgatggcctgtaccagggcctgagcaccgccaccaaggacacctatgacgccctgcacatgcaggccctgcctccaaga

SEQ ID NO: 1090 - DNA, 429 bp, Artificial Sequence; identical to SEQ ID NO: 1089
  Synthetic Polynucloetide

SEQ ID NO: 1091 - DNA, 123 bp, Artificial Sequence
  Synthetic Polynucloetide
aggagtaagaggagcaggctcctgcacagtgactacatgaacatgactccacgccgccccggacccacccgcaagcattaccagccctatgccccaccacgcgacttcgcagcctatcgctcc

SEQ ID NO: 1092 - DNA, 126 bp, Artificial Sequence
  Synthetic Polynucloetide
aaacggggcagaaagaaactcctgtatatattcaaacaaccatttatgagaccagtacaaactactcaagaggaagatggctgtagctgccgatttccagaagaagaagaaggaggatgtgaactg

SEQ ID NO: 1093 - DNA, 165 bp, Artificial Sequence
  Synthetic Polynucloetide
aagaaccggaaggccaaggccaagcctgtgacaagaggtgctggtgctggcggcagacagagaggccagaacaaagaaagacctcctcctgtgcctaatcctgactacgagcccatcagaaaaggccagcgggatctgtacagcggcctgaaccagcggcggatc

SEQ ID NO: 1094 - DNA, 90 bp, Artificial Sequence
  Synthetic Polynucloetide
cagagttttgggttgttggaccctaaattgtgctatctgttggacggaatcctgttcatttacggagtgatcctgaccgcattgttcctg

SEQ ID NO: 1095 - DNA, 339 bp, Artificial Sequence
  Synthetic Polynucloetide
cgggttaagttttccagatccgcagacgcacccgcttaccaacaagggcagaaccaactctacaatgaacttaatttggggcggagggaagagtacgacgttctggacaaaaggaggggacgagatcccgagatgggcggaaagcctcagcgaaggaagaatccgcaagaggggctttataacgaactccagaaagataaaatggcagaagcctatagtgagattgggatgaagggagaaaggaggaggggtaaaggtcacgatgggttgtaccaaggattgagcacagccactaaagatacctatgatgcgctccacatgcaggccctgccgccaaga

SEQ ID NO: 1096 - DNA, 429 bp, Artificial Sequence
  Synthetic Polynucloetide
cagagttttgggttgttggaccctaaattgtgctatctgttggacggaatcctgttcatttacggagtgatcctgaccgcattgttcctgcgggttaagttttccagatccgcagacgcacccgcttaccaacaagggcagaaccaactctacaatgaacttaatttggggcggagggaagagtacgacgttctggacaaaaggaggggacgagatcccgagatgggcggaaagcctcagcgaaggaagaatccgcaagaggggctttataacgaactccagaaagataaaatggcagaagcctatagtgagattgggatgaagggagaaaggaggaggggtaaaggtcacgatgggttgtaccaaggattgagcacagccactaaagatacctatgatgcgctccacatgcaggccctgccgccaaga

SEQ ID NO: 1097 - DNA, 123 bp, Artificial Sequence
  Synthetic Polynucloetide
aggagcaagcggtcacggctgctccacagcgattacatgaatatgacaccacgaagaccgggtcctactcgcaaacactaccaaccctacgcacctccccgcgactttgcagcgtaccgatct

SEQ ID NO: 1098 - DNA, 126 bp, Artificial Sequence
  Synthetic Polynucloetide
aagagaggccggaagaagctgctgtacatcttcaagcagcctttcatgcggcccgtgcagaccacccaggaagaggacggctgctcctgccggttccccgaggaagaagaaggcggctgcgagctg

SEQ ID NO: 1099 - DNA, 552 bp, Artificial Sequence
  Synthetic Polynucloetide
cagagcttcggcctgctggaccccaagctgtgctacctgctggatggcatcctgttcatctacggcgtgatcctgaccgccctgttcctgaggagtaagaggagcaggctcctgcacagtgactacatgaacatgactccacgccgccccggacccacccgcaagcattaccagccctatgccccaccacgcgacttcgcagcctatcgctccagagtgaagttcagcagaagcgccgacgcccctgcctaccagcagggacagaaccaactgtacaacgagctgaacctgggcagacgggaagagtacgacgtgctggacaagcggagaggcagggaccctgagatgggcggaaagccccagcggagaaagaacccccaggaaggactgtataacgaactccagaaagacaagatggccgaagcctacagcgagatcggcatgaagggcgagcggagaagaggcaagggccacgatggcctgtaccagggcctgagcaccgccaccaaggacacctatgacgccctgcacatgcaggccctgcctccaaga

SEQ ID NO: 1100 - DNA, 555 bp, Artificial Sequence
  Synthetic Polynucloetide
cagagcttcggcctgctggaccccaagctgtgctacctgctggatggcatcctgttcatctacggcgtgatcctgaccgccctgttcctgaaacggggcagaaagaaactcctgtatatattcaaacaaccatttatgagaccagtacaaactactcaagaggaagatggctgtagctgccgatttccagaagaagaagaaggaggatgtgaactgagagtgaagttcagcagaagcgccgacgcccctgcctaccagcagggacagaaccaactgtacaacgagctgaacctgggcagacgggaagagtacgacgtgctggacaagcggagaggcagggaccctgagatgggcggaaagccccagcggagaaagaacccccaggaaggactgtataacgaactccagaaagacaagatggccgaagcctacagcgagatcggcatgaagggcgagcggagaagaggcaagggccacgatggcctgtaccagggcctgagcaccgccaccaaggacacctatgacgccctgcacatgcaggccctgcctccaaga

SEQ ID NO: 1101 - DNA, 552 bp, Artificial Sequence
  Synthetic Polynucloetide
cagagttttgggttgttggaccctaaattgtgctatctgttggacggaatcctgttcatttacggagtgatcctgaccgcattgttcctgaggagcaagcggtcacggctgctccacagcgattacatgaatatgacaccacgaagaccgggtcctactcgcaaacactaccaaccctacgcacctccccgcgactttgcagcgtaccgatctcgggttaagttttccagatccgcagacgcacccgcttaccaacaagggcagaaccaactctacaatgaacttaatttggggcggagggaagagtacgacgttctggacaaaaggaggggacgagatcccgagatgggcggaaagcctcagcgaaggaagaatccgcaagaggggctttataacgaactccagaaagataaaatggcagaagcctatagtgagattgggatgaagggagaaaggaggaggggtaaaggtcacgatgggttgtaccaaggattgagcacagccactaaagatacctatgatgcgctccacatgcaggccctgccgccaaga

SEQ ID NO: 1102 - DNA, 555 bp, Artificial Sequence
  Synthetic Polynucloetide
cagagttttgggttgttggaccctaaattgtgctatctgttggacggaatcctgttcatttacggagtgatcctgaccgcattgttcctgaagagaggccggaagaagctgctgtacatcttcaagcagcctttcatgcggcccgtgcagaccacccaggaagaggacggctgctcctgccggttccccgaggaagaagaaggcggctgcgagctgcgggttaagttttccagatccgcagacgcacccgcttaccaacaagggcagaaccaactctacaatgaacttaatttggggcggagggaagagtacgacgttctggacaaaaggaggggacgagatcccgagatgggcggaaagcctcagcgaaggaagaatccgcaagaggggctttataacgaactccagaaagataaaatggcagaagcctatagtgagattgggatgaagggagaaaggaggaggggtaaaggtcacgatgggttgtaccaaggattgagcacagccactaaagatacctatgatgcgctccacatgcaggccctgccgccaaga

SEQ ID NO: 1103 - DNA, 408 bp, Artificial Sequence
  Synthetic Polynucloetide
gatcctgccgtgtaccagctgcgggatagcaagagcagcgacaagagcgtgtgtctgttcaccgacttcgacagccagaccaacgtgtcccagagcaaggactccgacgtgtacatcaccgataagtgcgtgctggacatgcggagcatggacttcaagagcaactccgccgtggcctggtccaacaagtccgatttcgcctgcgccaacgccttcaacaacagcattatccccgaggacacattcttcccaagccccgagagcagctgcgacgtgaagctggtggaaaagagcttcgagacagacaccaacctgaacttccagaacctgagcgtgatcggcttcagaatcctgctgctgaaagtggccggctttaacctgctgatgaccctgcggctgtggtccagc

SEQ ID NO: 1104 - DNA, 402 bp, Artificial Sequence
  Synthetic Polynucloetide
gccgtgtaccagctgcgggatagcaagagcagcgacaagagcgtgtgtctgttcaccgacttcgacagccagaccaacgtgtcccagagcaaggactccgacgtgtacatcaccgataagtgcgtgctggacatgcggagcatggacttcaagagcaactccgccgtggcctggtccaacaagtccgatttcgcctgcgccaacgccttcaacaacagcattatccccgaggacacattcttcccaagccccgagagcagctgcgacgtgaagctggtggaaaagagcttcgagacagacaccaacctgaacttccagaacctgagcgtgatcggcttcagaatcctgctgctgaaagtggccggctttaacctgctgatgaccctgcggctgtggtccagc

SEQ ID NO: 1105 - DNA, 390 bp, Artificial Sequence
  Synthetic Polynucloetide
ctgcgggatagcaagagcagcgacaagagcgtgtgtctgttcaccgacttcgacagccagaccaacgtgtcccagagcaaggactccgacgtgtacatcaccgataagtgcgtgctggacatgcggagcatggacttcaagagcaactccgccgtggcctggtccaacaagtccgatttcgcctgcgccaacgccttcaacaacagcattatccccgaggacacattcttcccaagccccgagagcagctgcgacgtgaagctggtggaaaagagcttcgagacagacaccaacctgaacttccagaacctgagcgtgatcggcttcagaatcctgctgctgaaagtggccggctttaacctgctgatgaccctgcggctgtggtccagc

SEQ ID NO: 1106 - DNA, 381 bp, Artificial Sequence
  Synthetic Polynucloetide
agcaagagcagcgacaagagcgtgtgtctgttcaccgacttcgacagccagaccaacgtgtcccagagcaaggactccgacgtgtacatcaccgataagtgcgtgctggacatgcggagcatggacttcaagagcaactccgccgtggcctggtccaacaagtccgatttcgcctgcgccaacgccttcaacaacagcattatccccgaggacacattcttcccaagccccgagagcagctgcgacgtgaagctggtggaaaagagcttcgagacagacaccaacctgaacttccagaacctgagcgtgatcggcttcagaatcctgctgctgaaagtggccggctttaacctgctgatgaccctgcggctgtggtccagc

SEQ ID NO: 1107 - DNA, 369 bp, Artificial Sequence
  Synthetic Polynucloetide
gacaagagcgtgtgtctgttcaccgacttcgacagccagaccaacgtgtcccagagcaaggactccgacgtgtacatcaccgataagtgcgtgctggacatgcggagcatggacttcaagagcaactccgccgtggcctggtccaacaagtccgatttcgcctgcgccaacgccttcaacaacagcattatccccgaggacacattcttcccaagccccgagagcagctgcgacgtgaagctggtggaaaagagcttcgagacagacaccaacctgaacttccagaacctgagcgtgatcggcttcagaatcctgctgctgaaagtggccggctttaacctgctgatgaccctgcggctgtggtccagc

SEQ ID NO: 1108 - DNA, 342 bp, Artificial Sequence
  Synthetic Polynucloetide
ttcgacagccagaccaacgtgtcccagagcaaggactccgacgtgtacatcaccgataagtgcgtgctggacatgcggagcatggacttcaagagcaactccgccgtggcctggtccaacaagtccgatttcgcctgcgccaacgccttcaacaacagcattatccccgaggacacattcttcccaagccccgagagcagctgcgacgtgaagctggtggaaaagagcttcgagacagacaccaacctgaacttccagaacctgagcgtgatcggcttcagaatcctgctgctgaaagtggccggctttaacctgctgatgaccctgcggctgtggtccagc

SEQ ID NO: 1109 - DNA, 324 bp, Artificial Sequence
  Synthetic Polynucloetide
gtgtcccagagcaaggactccgacgtgtacatcaccgataagtgcgtgctggacatgcggagcatggacttcaagagcaactccgccgtggcctggtccaacaagtccgatttcgcctgcgccaacgccttcaacaacagcattatccccgaggacacattcttcccaagccccgagagcagctgcgacgtgaagctggtggaaaagagcttcgagacagacaccaacctgaacttccagaacctgagcgtgatcggcttcagaatcctgctgctgaaagtggccggctttaacctgctgatgaccctgcggctgtggtccagc

SEQ ID NO: 1110 - DNA, 282 bp, Artificial Sequence
  Synthetic Polynucloetide
tgcgtgctggacatgcggagcatggacttcaagagcaactccgccgtggcctggtccaacaagtccgatttcgcctgcgccaacgccttcaacaacagcattatccccgaggacacattcttcccaagccccgagagcagctgcgacgtgaagctggtggaaaagagcttcgagacagacaccaacctgaacttccagaacctgagcgtgatcggcttcagaatcctgctgctgaaagtggccggctttaacctgctgatgaccctgcggctgtggtccagc

SEQ ID NO: 1111 - DNA, 264 bp, Artificial Sequence
  Synthetic Polynucloetide
agcatggacttcaagagcaactccgccgtggcctggtccaacaagtccgatttcgcctgcgccaacgccttcaacaacagcattatccccgaggacacattcttcccaagccccgagagcagctgcgacgtgaagctggtggaaaagagcttcgagacagacaccaacctgaacttccagaacctgagcgtgatcggcttcagaatcctgctgctgaaagtggccggctttaacctgctgatgaccctgcggctgtggtccagc

SEQ ID NO: 1112 - DNA, 180 bp, Artificial Sequence
  Synthetic Polynucloetide
atccccgaggacacattcttcccaagccccgagagcagctgcgacgtgaagctggtggaaaagagcttcgagacagacaccaacctgaacttccagaacctgagcgtgatcggcttcagaatcctgctgctgaaagtggccggctttaacctgctgatgaccctgcggctgtggtccagc

SEQ ID NO: 1113 - DNA, 150 bp, Artificial Sequence
  Synthetic Polynucloetide
gagagcagctgcgacgtgaagctggtggaaaagagcttcgagacagacaccaacctgaacttccagaacctgagcgtgatcggcttcagaatcctgctgctgaaagtggccggctttaacctgctgatgaccctgcggctgtggtccagc

SEQ ID NO: 1114 - DNA, 537 bp, Artificial Sequence; identical to SEQ ID NO: 1059
  Synthetic Polynucloetide

SEQ ID NO: 1115 - DNA, 528 bp, Artificial Sequence
  Synthetic Polynucloetide
aagaacgtgttcccacctgaggtggccgtgttcgagcctagcgaggccgagatcagccacacccagaaagccaccctcgtgtgcctggctaccggcttctaccccgaccatgtggaactgtcttggtgggtcaacggcaaagaggtgcacagcggcgtgtgtaccgacccccagccactgaaagaacagcccgccctgaacgacagccggtactgcctgagcagcagactgagagtgtccgccaccttctggcagaacccccggaaccacttcagatgccaggtgcagttctacggcctgagcgagaacgacgagtggacccaggacagagccaagcccgtgacccagatcgtgtctgccgaagcctggggcagagccgattgcggctttaccagcgagagctaccagcagggcgtgctgagcgccaccatcctgtacgagatcctgctgggcaaggccaccctgtacgccgtgctggtgtctgccctggtgctgatggctatggtcaagcggaaggacagccgggga

SEQ ID NO: 1116 - DNA, 525 bp, Artificial Sequence
  Synthetic Polynucloetide
aacgtgttcccacctgaggtggccgtgttcgagcctagcgaggccgagatcagccacacccagaaagccaccctcgtgtgcctggctaccggcttctaccccgaccatgtggaactgtcttggtgggtcaacggcaaagaggtgcacagcggcgtgtgtaccgacccccagccactgaaagaacagcccgccctgaacgacagccggtactgcctgagcagcagactgagagtgtccgccaccttctggcagaacccccggaaccacttcagatgccaggtgcagttctacggcctgagcgagaacgacgagtggacccaggacagagccaagcccgtgacccagatcgtgtctgccgaagcctggggcagagccgattgcggctttaccagcgagagctaccagcagggcgtgctgagcgccaccatcctgtacgagatcctgctgggcaaggccaccctgtacgccgtgctggtgtctgccctggtgctgatggctatggtcaagcggaaggacagccgggga

SEQ ID NO: 1117 - DNA, 519 bp, Artificial Sequence
  Synthetic Polynucloetide
ttcccacctgaggtggccgtgttcgagcctagcgaggccgagatcagccacacccagaaagccaccctcgtgtgcctggctaccggcttctaccccgaccatgtggaactgtcttggtgggtcaacggcaaagaggtgcacagcggcgtgtgtaccgacccccagccactgaaagaacagcccgccctgaacgacagccggtactgcctgagcagcagactgagagtgtccgccaccttctggcagaacccccggaaccacttcagatgccaggtgcagttctacggcctgagcgagaacgacgagtggacccaggacagagccaagcccgtgacccagatcgtgtctgccgaagcctggggcagagccgattgcggctttaccagcgagagctaccagcagggcgtgctgagcgccaccatcctgtacgagatcctgctgggcaaggccaccctgtacgccgtgctggtgtctgccctggtgctgatggctatggtcaagcggaaggacagccgggga

SEQ ID NO: 1118 - DNA, 507 bp, Artificial Sequence
  Synthetic Polynucloetide
gtggccgtgttcgagcctagcgaggccgagatcagccacacccagaaagccaccctcgtgtgcctggctaccggcttctaccccgaccatgtggaactgtcttggtgggtcaacggcaaagaggtgcacagcggcgtgtgtaccgacccccagccactgaaagaacagcccgccctgaacgacagccggtactgcctgagcagcagactgagagtgtccgccaccttctggcagaacccccggaaccacttcagatgccaggtgcagttctacggcctgagcgagaacgacgagtggacccaggacagagccaagcccgtgacccagatcgtgtctgccgaagcctggggcagagccgattgcggctttaccagcgagagctaccagcagggcgtgctgagcgccaccatcctgtacgagatcctgctgggcaaggccaccctgtacgccgtgctggtgtctgccctggtgctgatggctatggtcaagcggaaggacagccgggga

SEQ ID NO: 1119 - DNA, 492 bp, Artificial Sequence
  Synthetic Polynucloetide
cctagcgaggccgagatcagccacacccagaaagccaccctcgtgtgcctggctaccggcttctaccccgaccatgtggaactgtcttggtgggtcaacggcaaagaggtgcacagcggcgtgtgtaccgacccccagccactgaaagaacagcccgccctgaacgacagccggtactgcctgagcagcagactgagagtgtccgccaccttctggcagaacccccggaaccacttcagatgccaggtgcagttctacggcctgagcgagaacgacgagtggacccaggacagagccaagcccgtgacccagatcgtgtctgccgaagcctggggcagagccgattgcggctttaccagcgagagctaccagcagggcgtgctgagcgccaccatcctgtacgagatcctgctgggcaaggccaccctgtacgccgtgctggtgtctgccctggtgctgatggctatggtcaagcggaaggacagccgggga

SEQ ID NO: 1120 - DNA, 483 bp, Artificial Sequence
  Synthetic Polynucloetide
gccgagatcagccacacccagaaagccaccctcgtgtgcctggctaccggcttctaccccgaccatgtggaactgtcttggtgggtcaacggcaaagaggtgcacagcggcgtgtgtaccgacccccagccactgaaagaacagcccgccctgaacgacagccggtactgcctgagcagcagactgagagtgtccgccaccttctggcagaacccccggaaccacttcagatgccaggtgcagttctacggcctgagcgagaacgacgagtggacccaggacagagccaagcccgtgacccagatcgtgtctgccgaagcctggggcagagccgattgcggctttaccagcgagagctaccagcagggcgtgctgagcgccaccatcctgtacgagatcctgctgggcaaggccaccctgtacgccgtgctggtgtctgccctggtgctgatggctatggtcaagcggaaggacagccgggga

SEQ ID NO: 1121 - DNA, 447 bp, Artificial Sequence
  Synthetic Polynucloetide
tgcctggctaccggcttctaccccgaccatgtggaactgtcttggtgggtcaacggcaaagaggtgcacagcggcgtgtgtaccgacccccagccactgaaagaacagcccgccctgaacgacagccggtactgcctgagcagcagactgagagtgtccgccaccttctggcagaacccccggaaccacttcagatgccaggtgcagttctacggcctgagcgagaacgacgagtggacccaggacagagccaagcccgtgacccagatcgtgtctgccgaagcctggggcagagccgattgcggctttaccagcgagagctaccagcagggcgtgctgagcgccaccatcctgtacgagatcctgctgggcaaggccaccctgtacgccgtgctggtgtctgccctggtgctgatggctatggtcaagcggaaggacagccgggga

SEQ ID NO: 1122 - DNA, 411 bp, Artificial Sequence
  Synthetic Polynucloetide
ctgtcttggtgggtcaacggcaaagaggtgcacagcggcgtgtgtaccgacccccagccactgaaagaacagcccgccctgaacgacagccggtactgcctgagcagcagactgagagtgtccgccaccttctggcagaacccccggaaccacttcagatgccaggtgcagttctacggcctgagcgagaacgacgagtggacccaggacagagccaagcccgtgacccagatcgtgtctgccgaagcctggggcagagccgattgcggctttaccagcgagagctaccagcagggcgtgctgagcgccaccatcctgtacgagatcctgctgggcaaggccaccctgtacgccgtgctggtgtctgccctggtgctgatggctatggtcaagcggaaggacagccgggga

SEQ ID NO: 1123 - DNA, 384 bp, Artificial Sequence
  Synthetic Polynucloetide
gtgcacagcggcgtgtgtaccgacccccagccactgaaagaacagcccgccctgaacgacagccggtactgcctgagcagcagactgagagtgtccgccaccttctggcagaacccccggaaccacttcagatgccaggtgcagttctacggcctgagcgagaacgacgagtggacccaggacagagccaagcccgtgacccagatcgtgtctgccgaagcctggggcagagccgattgcggctttaccagcgagagctaccagcagggcgtgctgagcgccaccatcctgtacgagatcctgctgggcaaggccaccctgtacgccgtgctggtgtctgccctggtgctgatggctatggtcaagcggaaggacagccgggga

SEQ ID NO: 1124 - DNA, 369 bp, Artificial Sequence
  Synthetic Polynucloetide
tgtaccgacccccagccactgaaagaacagcccgccctgaacgacagccggtactgcctgagcagcagactgagagtgtccgccaccttctggcagaacccccggaaccacttcagatgccaggtgcagttctacggcctgagcgagaacgacgagtggacccaggacagagccaagcccgtgacccagatcgtgtctgccgaagcctggggcagagccgattgcggctttaccagcgagagctaccagcagggcgtgctgagcgccaccatcctgtacgagatcctgctgggcaaggccaccctgtacgccgtgctggtgtctgccctggtgctgatggctatggtcaagcggaaggacagccgggga

SEQ ID NO: 1125 - DNA, 345 bp, Artificial Sequence
  Synthetic Polynucloetide
gaacagcccgccctgaacgacagccggtactgcctgagcagcagactgagagtgtccgccaccttctggcagaacccccggaaccacttcagatgccaggtgcagttctacggcctgagcgagaacgacgagtggacccaggacagagccaagcccgtgacccagatcgtgtctgccgaagcctggggcagagccgattgcggctttaccagcgagagctaccagcagggcgtgctgagcgccaccatcctgtacgagatcctgctgggcaaggccaccctgtacgccgtgctggtgtctgccctggtgctgatggctatggtcaagcggaaggacagccgggga

SEQ ID NO: 1126 - DNA, 159 bp, Artificial Sequence
  Synthetic Polynucloetide
ggcagagccgattgcggctttaccagcgagagctaccagcagggcgtgctgagcgccaccatcctgtacgagatcctgctgggcaaggccaccctgtacgccgtgctggtgtctgccctggtgctgatggctatggtcaagcggaaggacagccgggga

SEQ ID NO: 1127 - DNA, 153 bp, Artificial Sequence
  Synthetic Polynucloetide
gccgattgcggctttaccagcgagagctaccagcagggcgtgctgagcgccaccatcctgtacgagatcctgctgggcaaggccaccctgtacgccgtgctggtgtctgccctggtgctgatggctatggtcaagcggaaggacagccgggga

SEQ ID NO: 1128 - DNA, 519 bp, Artificial Sequence; identical to SEQ ID NO: 1082
  Synthetic Polynucloetide

SEQ ID NO: 1129 - DNA, 504 bp, Artificial Sequence
  Synthetic Polynucloetide
gccgacgtgtcccccaagcctaccatcttcctgccctctatcgccgagacaaagctccagaaggccggcacctacctgtgcctgctggaaaagttcttcccagatgtgattaagatccactggcaggaaaagaagtccaacaccatcctgggcagccaggaaggcaacaccatgaagaccaacgacacctacatgaagttcagctggctgaccgtgcccgagaagtccctggacaaagaacacagatgcatcgtgcggcacgaaaacaacaagaacggcgtggaccaggaaatcatcttcccacccatcaagaccgatgtgattacaatggaccccaaggacaactgctccaaggacgccaacgataccctgctgctccagctgaccaacaccagcgcctactacatgtacttgttgctgctgctgaagtccgtggtgtacttcgccatcatcacatgctgcctgctgcggagaaccgccttctgctgcaacggcgagaagtct

SEQ ID NO: 1130 - DNA, 498 bp, Artificial Sequence
  Synthetic Polynucloetide
gtgtcccccaagcctaccatcttcctgccctctatcgccgagacaaagctccagaaggccggcacctacctgtgcctgctggaaaagttcttcccagatgtgattaagatccactggcaggaaaagaagtccaacaccatcctgggcagccaggaaggcaacaccatgaagaccaacgacacctacatgaagttcagctggctgaccgtgcccgagaagtccctggacaaagaacacagatgcatcgtgcggcacgaaaacaacaagaacggcgtggaccaggaaatcatcttcccacccatcaagaccgatgtgattacaatggaccccaaggacaactgctccaaggacgccaacgataccctgctgctccagctgaccaacaccagcgcctactacatgtacttgttgctgctgctgaagtccgtggtgtacttcgccatcatcacatgctgcctgctgcggagaaccgccttctgctgcaacggcgagaagtct

SEQ ID NO: 1131 - DNA, 483 bp, Artificial Sequence
  Synthetic Polynucloetide
accatcttcctgccctctatcgccgagacaaagctccagaaggccggcacctacctgtgcctgctggaaaagttcttcccagatgtgattaagatccactggcaggaaaagaagtccaacaccatcctgggcagccaggaaggcaacaccatgaagaccaacgacacctacatgaagttcagctggctgaccgtgcccgagaagtccctggacaaagaacacagatgcatcgtgcggcacgaaaacaacaagaacggcgtggaccaggaaatcatcttcccacccatcaagaccgatgtgattacaatggaccccaaggacaactgctccaaggacgccaacgataccctgctgctccagctgaccaacaccagcgcctactacatgtacttgttgctgctgctgaagtccgtggtgtacttcgccatcatcacatgctgcctgctgcggagaaccgccttctgctgcaacggcgagaagtct

SEQ ID NO: 1132 - DNA, 201 bp, Artificial Sequence
  Synthetic Polynucloetide
cccatcaagaccgatgtgattacaatggaccccaaggacaactgctccaaggacgccaacgataccctgctgctccagctgaccaacaccagcgcctactacatgtacttgttgctgctgctgaagtccgtggtgtacttcgccatcatcacatgctgcctgctgcggagaaccgccttctgctgcaacggcgagaagtct

SEQ ID NO: 1133 - DNA, 177 bp, Artificial Sequence
  Synthetic Polynucloetide
atggaccccaaggacaactgctccaaggacgccaacgataccctgctgctccagctgaccaacaccagcgcctactacatgtacttgttgctgctgctgaagtccgtggtgtacttcgccatcatcacatgctgcctgctgcggagaaccgccttctgctgcaacggcgagaagtct

SEQ ID NO: 1134 - DNA, 459 bp, Artificial Sequence; identical to SEQ ID NO: 1084
  Synthetic Polynucloetide

SEQ ID NO: 1135 - DNA, 453 bp, Artificial Sequence
  Synthetic Polynucloetide
cctcacaccaagcccagcgtgttcgtgatgaagaacggcaccaacgtggcctgcctcgtgaaagagttctaccccaaggacatcaggatcaacctggtgtccagcaagaagatcaccgagttcgaccccgccatcgtgatctcccccagcggcaagtacaacgccgtgaagctggggaagtacgaggacagcaacagcgtgacctgctccgtgcagcacgacaacaagaccgtgcacagcaccgactttgaagtgaaaaccgactccaccgaccacgtgaagcccaaagagacagagaacaccaagcagcccagcaagagctgccacaagcccaaggccatcgtgcacaccgagaaagtgaacatgatgagcctgaccgtgctgggcctgcggatgctgttcgccaaaaccgtggccgtgaacttcctgctgaccgccaagctgttcttcctc

SEQ ID NO: 1136 - DNA, 441 bp, Artificial Sequence
  Synthetic Polynucloetide
cccagcgtgttcgtgatgaagaacggcaccaacgtggcctgcctcgtgaaagagttctaccccaaggacatcaggatcaacctggtgtccagcaagaagatcaccgagttcgaccccgccatcgtgatctcccccagcggcaagtacaacgccgtgaagctggggaagtacgaggacagcaacagcgtgacctgctccgtgcagcacgacaacaagaccgtgcacagcaccgactttgaagtgaaaaccgactccaccgaccacgtgaagcccaaagagacagagaacaccaagcagcccagcaagagctgccacaagcccaaggccatcgtgcacaccgagaaagtgaacatgatgagcctgaccgtgctgggcctgcggatgctgttcgccaaaaccgtggccgtgaacttcctgctgaccgccaagctgttcttcctc

SEQ ID NO: 1137 - DNA, 435 bp, Artificial Sequence
  Synthetic Polynucloetide
gtgttcgtgatgaagaacggcaccaacgtggcctgcctcgtgaaagagttctaccccaaggacatcaggatcaacctggtgtccagcaagaagatcaccgagttcgaccccgccatcgtgatctcccccagcggcaagtacaacgccgtgaagctggggaagtacgaggacagcaacagcgtgacctgctccgtgcagcacgacaacaagaccgtgcacagcaccgactttgaagtgaaaaccgactccaccgaccacgtgaagcccaaagagacagagaacaccaagcagcccagcaagagctgccacaagcccaaggccatcgtgcacaccgagaaagtgaacatgatgagcctgaccgtgctgggcctgcggatgctgttcgccaaaaccgtggccgtgaacttcctgctgaccgccaagctgttcttcctc

SEQ ID NO: 1138 - DNA, 420 bp, Artificial Sequence
  Synthetic Polynucloetide
aacggcaccaacgtggcctgcctcgtgaaagagttctaccccaaggacatcaggatcaacctggtgtccagcaagaagatcaccgagttcgaccccgccatcgtgatctcccccagcggcaagtacaacgccgtgaagctggggaagtacgaggacagcaacagcgtgacctgctccgtgcagcacgacaacaagaccgtgcacagcaccgactttgaagtgaaaaccgactccaccgaccacgtgaagcccaaagagacagagaacaccaagcagcccagcaagagctgccacaagcccaaggccatcgtgcacaccgagaaagtgaacatgatgagcctgaccgtgctgggcctgcggatgctgttcgccaaaaccgtggccgtgaacttcctgctgaccgccaagctgttcttcctc

SEQ ID NO: 1139 - DNA, 204 bp, Artificial Sequence
  Synthetic Polynucloetide
gaagtgaaaaccgactccaccgaccacgtgaagcccaaagagacagagaacaccaagcagcccagcaagagctgccacaagcccaaggccatcgtgcacaccgagaaagtgaacatgatgagcctgaccgtgctgggcctgcggatgctgttcgccaaaaccgtggccgtgaacttcctgctgaccgccaagctgttcttcctc

SEQ ID NO: 1140 - DNA, 183 bp, Artificial Sequence
  Synthetic Polynucloetide
gaccacgtgaagcccaaagagacagagaacaccaagcagcccagcaagagctgccacaagcccaaggccatcgtgcacaccgagaaagtgaacatgatgagcctgaccgtgctgggcctgcggatgctgttcgccaaaaccgtggccgtgaacttcctgctgaccgccaagctgttcttcctc

SEQ ID NO: 1141 - skipped

SEQ ID NO: 1142 - DNA, 318 bp, Artificial Sequence
  Synthetic Polynucloetide
ggacagcctaaggccaatcctaccgtgacactgttccctccaagcagcgaagaactccaggccaacaaggccacacttgtgtgcctgatctccgacttctaccctggggctgtgacagtggcttggaaggccgatggatctcctgtgaaagccggcgtggaaaccaccaagccatccaagcagagcaacaacaaatacgccgccagctcctacctgagcctgacacctgagcagtggaagtcccacagatcctacagctgccaagtgacccacgaaggcagcaccgtggaaaagacagtggcccctacagagtgcagc

SEQ ID NO: 1143 - DNA, 309 bp, Artificial Sequence
  Synthetic Polynucloetide
gcctctacaaagggaccctccgtgtttcctctggctcccagcagcaagtctacaagcggaggaacagccgctctgggctgcctggtcaaggattactttcccgagcctgtgaccgtgtcctggaatagcggagcactgacaagcggcgtgcacacctttccagccgtgctgcaaagcagcggcctgtactctctgagcagcgtggtcacagtgcctagctctagcctgggcacccagacctacatctgcaatgtgaaccacaagcctagcaacaccaaggtggacaagagagtggaacccaagagctgt

SEQ ID NO: 1144 - DNA, 306 bp, Artificial Sequence
  Synthetic Polynucloetide
gcctctacaaagggaccctccgtgtttcctctggctcccagcagcaagtctacaagcggaggaacagccgctctgggctgcctggtcaaggattactttcccgagcctgtgaccgtgtcctggaatagcggagcactgacaagcggcgtgcacacctttccagccgtgctgcaaagcagcggcctgtactctctgagcagcgtggtcacagtgcctagctctagcctgggcacccagacctacatctgcaatgtgaaccacaagcctagcaacaccaaggtggacaagagagtggaacccaagagc

SEQ ID NO: 1145 - DNA, 339 bp, Artificial Sequence
  Synthetic Polynucloetide
gcctctacaaagggaccctccgtgtttcctctggctcccagcagcaagtctacaagcggaggaacagccgctctgggctgcctggtcaaggattactttcccgagcctgtgaccgtgtcctggaatagcggagcactgacaagcggcgtgcacacctttccagccgtgctgcaaagcagcggcctgtactctctgagcagcgtggtcacagtgcctagctctagcctgggcacccagacctacatctgcaatgtgaaccacaagcctagcaacaccaaggtggacaagagagtggaacccaagagctgtgataaaactcatacctgtccgccatgcccg

SEQ ID NO: 1146 - DNA, 309 bp, Artificial Sequence
  Synthetic Polynucloetide
gctagtaccaagggcccatcggtcttccccctggcaccctcctccaagagcacctctgggggcacagcggccctgggctgcctggtcaaggactacttccccgaaccggtgacggtgtcgtggaactcaggcgccctgaccagcggcgtgcacaccttcccggctgtcctacagtcctcaggactctactccctcagcagcgtggtgaccgtgccctccagcagcttgggcacccagacctacatctgcaacgtgaatcacaagcccagcaacaccaaggtggacaagaaagttgagcccaaatcttgt

SEQ ID NO: 1147 - DNA, 306 bp, Artificial Sequence
  Synthetic Polynucloetide
gctagtaccaagggcccatcggtcttccccctggcaccctcctccaagagcacctctgggggcacagcggccctgggctgcctggtcaaggactacttccccgaaccggtgacggtgtcgtggaactcaggcgccctgaccagcggcgtgcacaccttcccggctgtcctacagtcctcaggactctactccctcagcagcgtggtgaccgtgccctccagcagcttgggcacccagacctacatctgcaacgtgaatcacaagcccagcaacaccaaggtggacaagaaagttgagcccaaatct

SEQ ID NO: 1148 - DNA, 339 bp, Artificial Sequence
  Synthetic Polynucloetide
gctagtaccaagggcccatcggtcttccccctggcaccctcctccaagagcacctctgggggcacagcggccctgggctgcctggtcaaggactacttccccgaaccggtgacggtgtcgtggaactcaggcgccctgaccagcggcgtgcacaccttcccggctgtcctacagtcctcaggactctactccctcagcagcgtggtgaccgtgccctccagcagcttgggcacccagacctacatctgcaacgtgaatcacaagcccagcaacaccaaggtggacaagaaagttgagcccaaatcttgtgacaaaactcacacatgcccaccgtgccca

SEQ ID NO: 1149 - DNA, 303 bp, Artificial Sequence
  Synthetic Polynucloetide
gcctcaacgaaagggcctagcgtcttccccctggcgccgtgctcacgatccacaagcgaatccaccgccgctctcggatgcctcgtaaaggattatttccctgaaccagtcacggtgtcatggaacagcggtgcccttaccagcggcgtccatacctttcctgctgtgctccagtccagcggactttatagtctcagctctgtcgtgaccgtcccttcctctaattttggcacccagacttacacgtgcaacgtcgatcataagcccagtaacaccaaggtagacaagacggtggaacgaaag

SEQ ID NO: 1150 - DNA, 306 bp, Artificial Sequence
  Synthetic Polynucloetide
gcctccacgaagggaccatctgttttccctcttgccccctgctcacggtcaacgtctgaatccacggcagccctgggctgcctcgttaaggactactttccagagccggtaacagtctcctggaacagtggagcccttacatcaggtgttcacactttccctgccgtcttgcaaagtagcggactgtacagccttagttccgttgttacggttccttctagcaacttcggtacacagacatatacttgtaacgtagatcataagcctagcaacaccaaggtggacaaaaccgtagagagaaagtgt

SEQ ID NO: 1151 - DNA, 309 bp, Artificial Sequence
  Synthetic Polynucloetide
gcaagtacaaagggacccagtgttttcccgctcgccccctgttcacgatcaacgagtgagtccactgcggctctcggatgcctcgtcaaagactacttccccgagccggtgactgttagttggaactctggggctcttacttcaggcgtacacacattccccgccgtgcttcagtcaagtgggctctactcacttagcagtgtggtaacggttccctctagcaactttggcacccaaacatatacttgcaacgtcgatcacaagccgtcaaataccaaagttgacaagaccgttgaaaggaaatgttgt

SEQ ID NO: 1152 - DNA, 309 bp, Artificial Sequence
  Synthetic Polynucloetide
gcgtccactaagggtccgtcagtcttcccgctggcgccctgttcccgcagcacgagtgaatctaccgccgcccttgggtgcttggtaaaagactattttcctgagcccgttacagtatcatggaacagcggggctctgactagcggggtgcatacgttccctgcggttctgcaatctagcggactgtattctctctccagtgttgtgaccgtgccaagctccagcctcggtactaaaacttatacatgtaatgtggatcataaaccttcaaataccaaggttgacaaaagggtagagagtaagtacggt

SEQ ID NO: 1153 - DNA, 363 bp, Artificial Sequence
  Synthetic Polynucloetide
gcgtctcccacttctccgaaagttttccccctttccctctgtagcacacaacctgatggaaatgtggtcatcgcatgtctggtacaaggattctttccacaagagccattgagcgttacatggtcagagagcgggcagggagttaccgctaggaatttcccaccctcacaggatgcgagtggtgatctttataccacatcatcacaactcacgttgccagccactcagtgcctcgctggaaagtcagtaacatgccatgtcaaacattacactaatccctcacaagatgttaccgtgccttgcccagtaccttctacgccgcccaccccgtctccatctactccacccacgccatcacctagt

SEQ ID NO: 1154 - DNA, 324 bp, Artificial Sequence
  Synthetic Polynucloetide
gcgtcacctacgtccccaaaagtgttcccgctgtcactcgattccactccacaggacggtaacgtggtggttgcctgcctggtacaaggtttctttcctcaagaaccactctctgtgacgtggtctgaaagtggtcagaatgttacagcacggaacttcccaccgagtcaagatgcgagtggggatctctatacgacatccagtcaactcacactgcccgcaacacaatgccccgatggcaaatctgttacctgccatgtgaaacattacaccaatccatcccaggatgtgacagtaccttgtccggttccgccccctcccccg

SEQ ID NO: 1155 - DNA, 477 bp, Artificial Sequence
  Synthetic Polynucloetide
gctccgacaaaggcgccagacgtttttcctattatttcaggatgtcggcatccgaaagataattccccagttgttctggcgtgtcttatcacgggctaccatcctacatctgttaccgttacgtggtatatgggtacgcaaagccaacctcagcggacttttccagagatccaacggcgagattcatattatatgacatccagtcagttgagtacaccgctgcaacagtggcggcaaggtgagtataagtgtgtggtccaacacacagccagtaaaagtaagaaagagatattccggtggcctgaaagcccgaaggcacaagcatcttctgttccgacggcgcaaccgcaagctgaaggaagtcttgcaaaagcaaccacagcacccgcgacaacacgaaacacaggacgcggaggcgaggaaaagaaaaaagaaaaggaaaaggaagagcaagaggagagggaaactaagaccccc

SEQ ID NO: 1156 - DNA, 309 bp, Artificial Sequence
  Synthetic Polynucloetide
gctagtacccagtcaccttctgttttcccgcttactagatgctgcaagaacataccatccaatgccacttctgtcacactgggctgtcttgctacaggttattttcctgagccggtgatggtcacttgggataccggtagcctgaatggaactacaatgacgctgcctgccacgacgctcacattgagtgggcattacgcgacaattagtcttttgacggtaagcggagcttgggctaagcagatgttcacttgcagagtagcgcacactccctctagtactgactgggttgacaacaaaaccttttct

SEQ ID NO: 1157 - DNA, 312 bp, Artificial Sequence
  Synthetic Polynucloetide
gggtcagcaagtgcgcccacgctctttccattggtttcttgcgagaactctccctcagacacatcaagtgtcgcggtaggctgtctcgcccaagattttttgcccgatagtataacgctgtcatggaaatataagaacaatagtgatataagctccacaaggggttttccgagcgtactgcgaggcggtaaatatgcagcgacgagtcaagtcttgctcccatccaaggatgtcatgcaaggcaccgatgagcatgttgtttgcaaagtgcaacatccgaatggaaataaggaaaaaaacgtcccgctgccc

SEQ ID NO: 1158 - DNA, 240 bp, Artificial Sequence
  Synthetic Polynucloetide
atccagaaccctgatcctgccgtgtaccagctgcgggatagcaagagcagcgacaagagcgtgtgtctgttcaccgacttcgacagccagaccaacgtgtcccagagcaaggactccgacgtgtacatcaccgataagaccgtgctggacatgcggagcatggacttcaagagcaactccgccgtggcctggtccaacaagtccgatttcgcctgcgccaacgccttcaacaacagcatt

SEQ ID NO: 1159 - DNA, 270 bp, Artificial Sequence
  Synthetic Polynucloetide
atccagaaccctgatcctgccgtgtaccagctgcgggatagcaagagcagcgacaagagcgtgtgtctgttcaccgacttcgacagccagaccaacgtgtcccagagcaaggactccgacgtgtacatcaccgataagaccgtgctggacatgcggagcatggacttcaagagcaactccgccgtggcctggtccaacaagtccgatttcgcctgcgccaacgccttcaacaacagcattatccccgaggacacattcttcccaagcccc

SEQ ID NO: 1160 - DNA, 378 bp, Artificial Sequence
  Synthetic Polynucloetide
gaggacctgaagaacgtgttcccacctgaggtggccgtgttcgagcctagcgaggccgagatcagccacacccagaaagccaccctcgtgtgcctggctaccggcttctaccccgaccatgtggaactgtcttggtgggtcaacggcaaagaggtgcacagcggcgtgtctaccgacccccagccactgaaagaacagcccgccctgaacgacagccggtactgcctgagcagcagactgagagtgtccgccaccttctggcagaacccccggaaccacttcagatgccaggtgcagttctacggcctgagcgagaacgacgagtggacccaggacagagccaagcccgtgacccagatcgtgtctgccgaagcctgg

SEQ ID NO: 1161 - DNA, 384 bp, Artificial Sequence
  Synthetic Polynucloetide
gaggacctgaagaacgtgttcccacctgaggtggccgtgttcgagcctagcgaggccgagatcagccacacccagaaagccaccctcgtgtgcctggctaccggcttctaccccgaccatgtggaactgtcttggtgggtcaacggcaaagaggtgcacagcggcgtgtctaccgacccccagccactgaaagaacagcccgccctgaacgacagccggtactgcctgagcagcagactgagagtgtccgccaccttctggcagaacccccggaaccacttcagatgccaggtgcagttctacggcctgagcgagaacgacgagtggacccaggacagagccaagcccgtgacccagatcgtgtctgccgaagcctggggcaga

SEQ ID NO: 1162 - DNA, 318 bp, Artificial Sequence
  Synthetic Polynucloetide
gacaagcagctggacgccgacgtgtcccccaagcctaccatcttcctgccctctatcgccgagacaaagctccagaaggccggcacctacctgtgcctgctggaaaagttcttcccagatgtgattaagatccactggcaggaaaagaagtccaacaccatcctgggcagccaggaaggcaacaccatgaagaccaacgacacctacatgaagttcagctggctgaccgtgcccgagaagtccctggacaaagaacacagatgcatcgtgcggcacgaaaacaacaagaacggcgtggaccaggaaatcatcttccca

SEQ ID NO: 1163 - DNA, 342 bp, Artificial Sequence
  Synthetic Polynucloetide
gacaagcagctggacgccgacgtgtcccccaagcctaccatcttcctgccctctatcgccgagacaaagctccagaaggccggcacctacctgtgcctgctggaaaagttcttcccagatgtgattaagatccactggcaggaaaagaagtccaacaccatcctgggcagccaggaaggcaacaccatgaagaccaacgacacctacatgaagttcagctggctgaccgtgcccgagaagtccctggacaaagaacacagatgcatcgtgcggcacgaaaacaacaagaacggcgtggaccaggaaatcatcttcccacccatcaagaccgatgtgattaca

SEQ ID NO: 1164 - DNA, 255 bp, Artificial Sequence
  Synthetic Polynucloetide
agccagcctcacaccaagcccagcgtgttcgtgatgaagaacggcaccaacgtggcctgcctcgtgaaagagttctaccccaaggacatcaggatcaacctggtgtccagcaagaagatcaccgagttcgaccccgccatcgtgatctcccccagcggcaagtacaacgccgtgaagctggggaagtacgaggacagcaacagcgtgacctgctccgtgcagcacgacaacaagaccgtgcacagcaccgacttt

SEQ ID NO: 1165 - DNA, 276 bp, Artificial Sequence
  Synthetic Polynucloetide
agccagcctcacaccaagcccagcgtgttcgtgatgaagaacggcaccaacgtggcctgcctcgtgaaagagttctaccccaaggacatcaggatcaacctggtgtccagcaagaagatcaccgagttcgaccccgccatcgtgatctcccccagcggcaagtacaacgccgtgaagctggggaagtacgaggacagcaacagcgtgacctgctccgtgcagcacgacaacaagaccgtgcacagcaccgactttgaagtgaaaaccgactccacc

SEQ ID NO: 1166 - DNA, 395 bp, Artificial Sequence
  Synthetic Polynucloetide
gaggacctgaagaacgtgttcccacctgaggtggccgtgttcgagcctagcgaggccgagatcagccacacccagaaagccaccctcgtgtgcctggctaccggcttctaccccgaccatgtggaactgtcttggtgggtcaacggcaaagaggtgcacagcggcgtgtctaccgacccccagccactgaaagaacagcccgccctgaacgacagccggtactgcctgagcagcagactgagagtgtccgccaccttctggcagaacccccggaaccacttcagatgccaggtgcagttctacggcctgagcgagaacgacgagtggacccaggacagagccaagcccgtgacccagatcgtgtctgccgaagcctggggcagagccgattgcgg

SEQ ID NO: 1167 - DNA, 282 bp, Artificial Sequence
  Synthetic Polynucloetide
atccagaaccctgatcctgccgtgtaccagctgcgggatagcaagagcagcgacaagagcgtgtgtctgttcaccgacttcgacagccagaccaacgtgtcccagagcaaggactccgacgtgtacatcaccgataagaccgtgctggacatgcggagcatggacttcaagagcaactccgccgtggcctggtccaacaagtccgatttcgcctgcgccaacgccttcaacaacagcattatccccgaggacacattcttcccaagccccgagagcagctgc

SEQ ID NO: 1168 - DNA, 282 bp, Artificial Sequence; identical to SEQ ID NO: 1167
  Synthetic Polynucloetide

SEQ ID NO: 1169 - DNA, 237 bp, Artificial Sequence
  Synthetic Polynucloetide
aagagcagcgacaagagcgtgtgtctgttcaccgacttcgacagccagaccaacgtgtcccagagcaaggactccgacgtgtacatcaccgataagaccgtgctggacatgcggagcatggacttcaagagcaactccgccgtggcctggtccaacaagtccgatttcgcctgcgccaacgccttcaacaacagcattatccccgaggacacattcttcccaagccccgagagcagc

SEQ ID NO: 1170 - DNA, 378 bp, Artificial Sequence; identical to SEQ ID NO: 1160
  Synthetic Polynucloetide

SEQ ID NO: 1171 - DNA, 330 bp, Artificial Sequence
  Synthetic Polynucloetide
cctgaggtggccgtgttcgagcctagcgaggccgagatcagccacacccagaaagccaccctcgtgtgcctggctaccggcttctaccccgaccatgtggaactgtcttggtgggtcaacggcaaagaggtgcacagcggcgtgtctaccgacccccagccactgaaagaacagcccgccctgaacgacagccggtactgcctgagcagcagactgagagtgtccgccaccttctggcagaacccccggaaccacttcagatgccaggtgcagttctacggcctgagcgagaacgacgagtggacccaggacagagccaagcccgtgacc

SEQ ID NO: 1172 - DNA, 342 bp, Artificial Sequence; identical to SEQ ID NO: 1163
  Synthetic Polynucloetide

SEQ ID NO: 1173 - DNA, 285 bp, Artificial Sequence
  Synthetic Polynucloetide
cccaagcctaccatcttcctgccctctatcgccgagacaaagctccagaaggccggcacctacctgtgcctgctggaaaagttcttcccagatgtgattaagatccactggcaggaaaagaagtccaacaccatcctgggcagccaggaaggcaacaccatgaagaccaacgacacctacatgaagttcagctggctgaccgtgcccgagaagtccctggacaaagaacacagatgcatcgtgcggcacgaaaacaacaagaacggcgtggaccaggaaatcatc

SEQ ID NO: 1174 - DNA, 255 bp, Artificial Sequence; identical to SEQ ID NO: 1164
  Synthetic Polynucloetide

SEQ ID NO: 1175 - DNA, 276 bp, Artificial Sequence; identical to SEQ ID NO: 1165
  Synthetic Polynucloetide

SEQ ID NO: 1176 - skipped

SEQ ID NO: 1177 - DNA, 63 bp, Artificial Sequence
  Synthetic Polynucloetide
gacgtgaagctggtggaaaagagcttcgagacagacaccaacctgaacttccagaacctgagc

SEQ ID NO: 1178 - DNA, 66 bp, Artificial Sequence
  Synthetic Polynucloetide
tgcgacgtgaagctggtggaaaagagcttcgagacagacaccaacctgaacttccagaacctgagc

SEQ ID NO: 1179 - DNA, 57 bp, Artificial Sequence
  Synthetic Polynucloetide
ggcagagccgattgcggctttaccagcgagagctaccagcagggcgtgctgagcgcc

SEQ ID NO: 1180 - DNA, 81 bp, Artificial Sequence
  Synthetic Polynucloetide
cagatcgtgtctgccgaagcctggggcagagccgattgcggctttaccagcgagagctaccagcagggcgtgctgagcgcc

SEQ ID NO: 1181 - DNA, 72 bp, Artificial Sequence
  Synthetic Polynucloetide
atggaccccaaggacaactgctccaaggacgccaacgataccctgctgctccagctgaccaacaccagcgcc

SEQ ID NO: 1182 - DNA, 102 bp, Artificial Sequence
  Synthetic Polynucloetide
ttcccacccatcaagaccgatgtgattacaatggaccccaaggacaactgctccaaggacgccaacgataccctgctgctccagctgaccaacaccagcgcc

SEQ ID NO: 1183 - DNA, 132 bp, Artificial Sequence
  Synthetic Polynucloetide
gaagtgaaaaccgactccaccgaccacgtgaagcccaaagagacagagaacaccaagcagcccagcaagagctgccacaagcccaaggccatcgtgcacaccgagaaagtgaacatgatgagcctgaccgtg

SEQ ID NO: 1184 - DNA, 111 bp, Artificial Sequence
  Synthetic Polynucloetide
gaccacgtgaagcccaaagagacagagaacaccaagcagcccagcaagagctgccacaagcccaaggccatcgtgcacaccgagaaagtgaacatgatgagcctgaccgtg

SEQ ID NO: 1185 - DNA, 30 bp, Artificial Sequence
  Synthetic Polynucloetide
cagagttttgggttgttggaccctaaattg

SEQ ID NO: 1186 - skipped

SEQ ID NO: 1187 - DNA, 60 bp, Artificial Sequence
  Synthetic Polynucloetide
gtgatcggcttcagaatcctgctgctgaaagtggccggctttaacctgctgatgaccctg

SEQ ID NO: 1188 - DNA, 69 bp, Artificial Sequence
  Synthetic Polynucloetide
accatcctgtacgagatcctgctgggcaaggccaccctgtacgccgtgctggtgtctgccctggtgctg

SEQ ID NO: 1189 - DNA, 69 bp, Artificial Sequence
  Synthetic Polynucloetide
tactacatgtacttgttgctgctgctgaagtccgtggtgtacttcgccatcatcacatgctgcctgctg

SEQ ID NO: 1190 - DNA, 69 bp, Artificial Sequence
  Synthetic Polynucloetide
ctgggcctgcggatgctgttcgccaaaaccgtggccgtgaacttcctgctgaccgccaagctgttcttc

SEQ ID NO: 1191 - DNA, 60 bp, Artificial Sequence
  Synthetic Polynucloetide
tgctatctgttggacggaatcctgttcatttacggagtgatcctgaccgcattgttcctg

SEQ ID NO: 1192 - skipped

SEQ ID NO: 1193 - DNA, 15 bp, Artificial Sequence
  Synthetic Polynucloetide
cggctgtggtccagc

SEQ ID NO: 1194 - DNA, 33 bp, Artificial Sequence
  Synthetic Polynucloetide
atggctatggtcaagcggaaggacagccgggga

SEQ ID NO: 1195 - DNA, 36 bp, Artificial Sequence
  Synthetic Polynucloetide
cggagaaccgccttctgctgcaacggcgagaagtct

SEQ ID NO: 1196 - DNA, 339 bp, Artificial Sequence; identical to SEQ ID NO: 1095
  Synthetic Polynucloetide

SEQ ID NO: 1197 - skipped

SEQ ID NO: 1198 - DNA, 30 bp, Artificial Sequence
  Synthetic Polynucloetide
gataaaactcatacctgtccgccatgcccg

SEQ ID NO: 1199 - DNA, 27 bp, Artificial Sequence
  Synthetic Polynucloetide
tgctgcgttgaatgtccgccgtgtcct

SEQ ID NO: 1200 - DNA, 702 bp, Artificial Sequence
  Synthetic Polynucloetide
cctgctgaacccaaatccccagacaagacacatacctgccccccttgccctgcgcctcccgtcgccgggccttctgtcttccttttccctcccaagcccaaagacacgttgatgattgcccgaactccagaggtaacgtgtgttgtcgtcgatgttagccatgaggacccagaggttaagttcaattggtatgtggacggtgttgaagttcataatgctaagacaaaacctagggaggaacaatacaattcaacatatcgggtcgtcagtgtcctcaccgtccttcaccaagattggctcaatggtaaagaatataagtgcaaagtctcaaataaggcgcttcctgcgcccatcgaaaaaaccatttccaaggccaagggacaacctagagagccacaggtgtatacgcttccgccgagtcgggatgaattgacgaaaaaccaggtgagcctgacatgcttggtcaaagggttttatccaagcgacattgctgtcgagtgggaatccaacggccagcctgaaaataactacaaaaccacaccgcccgtactggacagtgacggatcattcttcctgtactctaaactcaccgttgacaaatcccggtggcaacagggtaatgtctttagttgcagtgtcatgcatgaggctctgcacaatcattatacccagaaaagtctgagtctgtcacccggtaaaaaa

SEQ ID NO: 1201 - DNA, 705 bp, Artificial Sequence
  Synthetic Polynucloetide
ccagctgaaccaaaaagtcccgataaaacgcatacctgtccaccatgcccagcgccccctgtcgctgggccaagtgtttttctgtttcctccgaagccaaaggatacgctgatgattgcaagaactccagaagtcacctgcgtcgtcgtggatgtttctcacgaggacccagaggtaaagttcaactggtatgtagacggagtcgaagtacacaatgctaaaaccaaaccgcgcgaggaacaatacaattcaacttaccgggtcgtatctgtgcttaccgtcctccaccaagattggctgaatgggaaagaatacaaatgcaaagtcagtaataaggcgctgccggcacctatcgaaaagacgatctctaaggcaaaggggcagcccagagaaccgcaagtgtatacgcttccgccatcacgagatgagctgacgaagaaccaagtctcattgacttgcttggtgaaaggcttctacccgtccgacatagccgtggaatgggaaagcaatggtcaacctgagaataactacaagacaacacccccagttctcgacagcgatggtagcttctttttgtatagtaagttgacggtagataagtcacggtggcagcaaggcaacgtattcagttgtagtgtaatgcatgaagcactccataaccattatactcaaaagagcctttcttcactttctcctggaaagaaa

SEQ ID NO: 1202 - DNA, 687 bp, Artificial Sequence
  Synthetic Polynucloetide
gaaagtaagtatggccctccgtgccctccgtgccccgcaccggaatttgagggcggaccatccgtgttcctttttccaccaaaacccaaagacacacttatgatttccaggacccctgaagtcacctgcgtcgtggtagacgtttctcaggaagatccggaggttcaatttaactggtacgttgacggtgtagaagtacacaatgccaagactaagccacgggaggagcaatttaattcaacatacagggtagtatcagtcttgacagtattgcaccaggattggctgaacggaaaagagtataagtgtaaggtatctaacaagggtctcccgtcatccatcgagaaaacgatcagtaaagcaaaagggcagccacgggaaccacaagtgtacacactgccacccagtcaagaggagatgactaagaatcaagtaagtcttacgtgtctcgtcaaggggttttatccgtcagacattgctgttgagtgggaatccaatgggcaacccgagaacaattataagaccacaccaccagtccttgatagcgatggcagtttttttctgtactccagactcacagtagataagagccggtggcaggagggcaatgttttctcctgcagcgttatgcacgaagcgcttcataaccactatactcagaaatccttgagtctgagtctcggcaaa

SEQ ID NO: 1203 - DNA, 357 bp, Artificial Sequence
  Synthetic Polynucloetide
gagagtaaatacggtccgccgtgtccaccgtgccctggacagccgagggaaccacaggtttacactttgccaccgtcacaggaagaaatgactaaaaaccaggtcagcctcacttgtctggttaagggcttctaccccagcgacattgctgtggagtgggagagcaacggccagccagagaataattacaagaccacgccgcctgtgttggacagtgatggtagtttctttttgtactcacggcttacagtcgacaagagccggtggcaggaaggcaacgttttcagttgctcagtaatgcacgaagccttgcacaaccattatacccaaaaatcactgtcattgagtctcggtaag

SEQ ID NO: 1204 - DNA, 36 bp, Artificial Sequence
  Synthetic Polynucloetide
gaatcaaagtacggccccccgtgtcctccatgtcct

SEQ ID NO: 1205 - skipped

SEQ ID NO: 1206 - DNA, 336 bp, Artificial Sequence
  Synthetic Polynucloetide
agagtgaagttcagcaggagcgcagacgcccccgcgtaccagcagggccagaaccagctctataacgagctgaatctaggacgaagagaggagtacgatgttttggacaagagacgtggccgggaccctgagatggggggaaagccgagaaggaagaaccctcaggaaggcctgtacaatgaactgcagaaagataagatggcggaggcctacagtgagattgggatgaaaggcgagcgccggaggggcaaggggcacgatggcctttaccagggtctcagtacagccaccaaggacacctacgacgcccttcacatgcaggccctgccccctcgc

SEQ ID NO: 1207 - DNA, 336 bp, Artificial Sequence
  Synthetic Polynucloetide
agagtgaagttcagcaggagcgcagacgcccccgcgtaccagcagggccagaaccagctctataacgagctcaatctaggacgaagagaggagtacgatgttttggacaagagacgtggccgggaccctgagatggggggaaagccgagaaggaagaaccctcaggaaggcctgtacaatgaactgcagaaagataagatggcggaggcctacagtgagattgggatgaaaggcgagcgccggaggggcaaggggcacgatggcctttaccagggtctcagtacagccaccaaggacacctacgacgcccttcacatgcaggccctgccccctcgc

SEQ ID NO: 1208 - DNA, 126 bp, Artificial Sequence; identical to SEQ ID NO: 1092
  Synthetic Polynucloetide

SEQ ID NO: 1209 - DNA, 216 bp, Artificial Sequence
  Synthetic Polynucloetide
gcgaagcccaccacgacgccagcgccgcgaccaccaacaccggcgcccaccatcgcgtcgcagcccctgtccctgcgcccagaggcgtgccggccagcggcggggggcgcagtgcacacgagggggctggacttcgcctgtgacatctacatctgggcgcccttggccgggacttgtggggtccttctcctgtcactggttatcaccctttactgc

SEQ ID NO: 1210 - DNA, 678 bp, Artificial Sequence
  Synthetic Polynucloetide
gcgaagcccaccacgacgccagcgccgcgaccaccaacaccggcgcccaccatcgcgtcgcagcccctgtccctgcgcccagaggcgtgccggccagcggcggggggcgcagtgcacacgagggggctggacttcgcctgtgacatctacatctgggcgcccttggccgggacttgtggggtccttctcctgtcactggttatcaccctttactgcaaacggggcagaaagaaactcctgtatatattcaaacaaccatttatgagaccagtacaaactactcaagaggaagatggctgtagctgccgatttccagaagaagaagaaggaggatgtgaactgagagtgaagttcagcaggagcgcagacgcccccgcgtaccagcagggccagaaccagctctataacgagctgaatctaggacgaagagaggagtacgatgttttggacaagagacgtggccgggaccctgagatggggggaaagccgagaaggaagaaccctcaggaaggcctgtacaatgaactgcagaaagataagatggcggaggcctacagtgagattgggatgaaaggcgagcgccggaggggcaaggggcacgatggcctttaccagggtctcagtacagccaccaaggacacctacgacgcccttcacatgcaggccctgccccctcgc

SEQ ID NO: 1211 - DNA, 342 bp, Artificial Sequence
  Synthetic Polynucloetide
gcgaagcccaccacgacgccagcgccgcgaccaccaacaccggcgcccaccatcgcgtcgcagcccctgtccctgcgcccagaggcgtgccggccagcggcggggggcgcagtgcacacgagggggctggacttcgcctgtgacatctacatctgggcgcccttggccgggacttgtggggtccttctcctgtcactggttatcaccctttactgcaaacggggcagaaagaaactcctgtatatattcaaacaaccatttatgagaccagtacaaactactcaagaggaagatggctgtagctgccgatttccagaagaagaagaaggaggatgtgaactg

SEQ ID NO: 1212 - DNA, 324 bp, Artificial Sequence
  Synthetic Polynucloetide
aaaattgaagttatgtatcctcctccttacctagacaatgagaagagcaatggaaccattatccatgtgaaagggaaacacctttgtccaagtcccctatttcccggaccttctaagcccttttgggtgctggtggtggttgggggagtcctggcttgctatagcttgctagtaacagtggcctttattattttctgggtgaggagtaagaggagcaggctcctgcacagtgactacatgaacatgactccacgccgccccggacccacccgcaagcattaccagccctatgccccaccacgcgacttcgcagcctatcgctcc

SEQ ID NO: 1213 - DNA, 450 bp, Artificial Sequence
  Synthetic Polynucloetide
ttcaagatccccatcgaggaactggaagatcgggtgttcgtgaactgcaacacctctatcacctgggtggaaggcaccgtgggaacactgctgagcgacatcaccagactggacctcggcaagcggattctggaccctcggggcatctacagatgcaacggcaccgacatctacaaggacaaagaaagcaccgtgcaggtccactacagaatgtgccagtcctgcgtggaactggaccctgctacagtggccggcatcatcgtgaccgatgtgatcgctactctgctgctggctctgggagtgttctgcttcgccggacacgaaacaggcagactgtctggcgctgccgatacacaggccctgctgagaaacgaccaagtgtatcagcccctgcgcgacagagatgatgcccagtattctcacctcggcggcaactgggctagaaacaag

SEQ ID NO: 1214 - DNA, 555 bp, Artificial Sequence
  Synthetic Polynucloetide
gacggtaacgaggagatgggaggaatcactcaaaccccttacaaagtctcaatttcaggaacaactgttatccttacatgtccccagtatcctggcagcgagatcctttggcagcataacgacaagaatatagggggagatgaagacgataagaatatcggatctgacgaggatcacttgagcctgaaagagttctccgagcttgaacaaagcggatattatgtgtgctatccgcgcgggtcaaagccggaagacgctaacttttacctttatctccgagccagagtgtgcgaaaattgcatggaaatggacgttatgtccgttgctacaatagttatcgtagatatatgcatcacgggtggactgcttctgctggtttattattggtccaagaatagaaaggccaaagctaaacccgtgaccagaggcgctggcgcaggcggaaggcaaaggggacaaaacaaagaacggccaccaccagtgcaaaatccagattatgagcctattcggaaaggacagagggacctgtactctggcctgaatcagagaagaatc

SEQ ID NO: 1215 - DNA, 480 bp, Artificial Sequence
  Synthetic Polynucloetide
cagagcatcaagggcaaccacctggtcaaggtgtacgactaccaagaggacggcagcgtgctgctgacatgtgatgccgaggccaagaacatcacctggtttaaggacggcaagatgatcggcttcctgaccgaggacaagaagaagtggaacctgggcagcaacgctaaggaccccagaggcatgtatcagtgcaagggcagccagaacaagagcaagcccctccaggtgtactaccggatgtgccagaactgcatcgagctgaacgccgctaccatcagcggctttctgttcgccgagatcgtgtccatcttcgtgctggccgtgggcgtgtactttatcgctggacaggatggcgtgcggcagagcagagcttccgataagcaaaccctgctgcctaacgaccagctgtaccagcctctgaaggacagagaggacgaccagtacagccacctccagggcaatcagctgagaagaaac

SEQ ID NO: 1216 - DNA, 429 bp, Artificial Sequence; identical to SEQ ID NO: 1096
  Synthetic Polynucloetide

SEQ ID NO: 1217 - skipped

SEQ ID NO: 1218 - DNA, 27 bp, Artificial Sequence
  Synthetic Polynucloetide
ggcgcgatagggttccttcgaacagcg

SEQ ID NO: 1219 - DNA, 30 bp, Artificial Sequence
  Synthetic Polynucloetide
gccctgcgaagattgttgggactctttggt

SEQ ID NO: 1220 - DNA, 30 bp, Artificial Sequence
  Synthetic Polynucloetide
agggctgcccgagtccttggtcttgagaca

SEQ ID NO: 1221 - DNA, 24 bp, Artificial Sequence
  Synthetic Polynucloetide
ggtccccaaggcatctttggccag

SEQ ID NO: 1222 - DNA, 24 bp, Artificial Sequence
  Synthetic Polynucloetide
agagctatccacattcaggcggag

SEQ ID NO: 1223 - DNA, 24 bp, Artificial Sequence
  Synthetic Polynucloetide
gcacccggacaaatagccggacaa

SEQ ID NO: 1224 - DNA, 24 bp, Artificial Sequence
  Synthetic Polynucloetide
gggcctcaaggcttggcgggtcaa

SEQ ID NO: 1225 - DNA, 24 bp, Artificial Sequence
  Synthetic Polynucloetide
ggtccattgggtattgctgggatt

SEQ ID NO: 1226 - DNA, 24 bp, Artificial Sequence
  Synthetic Polynucloetide
attccagagaatttcttcggagta

SEQ ID NO: 1227 - DNA, 24 bp, Artificial Sequence
  Synthetic Polynucloetide
atggcggcttccgcgaagcgcgag

SEQ ID NO: 1228 - DNA, 24 bp, Artificial Sequence
  Synthetic Polynucloetide
ccgttctcaccgttggtcgcaaca

SEQ ID NO: 1229 - DNA, 24 bp, Artificial Sequence
  Synthetic Polynucloetide
gggccattgggtatcgctggtcaa

SEQ ID NO: 1230 - DNA, 24 bp, Artificial Sequence
  Synthetic Polynucloetide
ggtcctcaagcaatcgccggtcaa

SEQ ID NO: 1231 - DNA, 15 bp, Artificial Sequence
  Synthetic Polynucloetide
cccggctatataaac

SEQ ID NO: 1232 - skipped

SEQ ID NO: 1233 - DNA, 66 bp, Artificial Sequence
  Synthetic Polynucloetide
gtgaagcagaccctgaatttcgacctgctgaagctggctggcgacgtggaatccaacccaggccct

SEQ ID NO: 1234 - DNA, 54 bp, Artificial Sequence
  Synthetic Polynucloetide
gagggcagaggaagtctactaacctgcggagatgtggaagaaaatcctggccca

SEQ ID NO: 1235 - DNA, 54 bp, Artificial Sequence
  Synthetic Polynucloetide
gagggaagaggtagcctcctcacctgtggggacgttgaagagaaccccggccca

SEQ ID NO: 1236 - DNA, 57 bp, Artificial Sequence
  Synthetic Polynucloetide
gcaacaaacttctcactactcaaacaagcaggtgacgtggaggagaatcccgggcct

SEQ ID NO: 1237 - DNA, 57 bp, Artificial Sequence
  Synthetic Polynucloetide
gcaacaaacttctcactactcaaacaagcaggtgacgtggagcagaatcccgggcct

SEQ ID NO: 1238 - DNA, 60 bp, Artificial Sequence
  Synthetic Polynucloetide
caatgcactaattacgcattgctcaagctggccggtgacgttgagagtaatcctggcccc

SEQ ID NO: 1239 - DNA, 12 bp, Artificial Sequence
  Synthetic Polynucloetide
tctggatctgga

SEQ ID NO: 1240 - DNA, 12 bp, Artificial Sequence
  Synthetic Polynucloetide
agcggatctggc

SEQ ID NO: 1241 - DNA, 12 bp, Artificial Sequence
  Synthetic Polynucloetide
cgggccaagaga

SEQ ID NO: 1242 - DNA, 12 bp, Artificial Sequence
  Synthetic Polynucloetide
agggccaagcga

SEQ ID NO: 1243 - DNA, 12 bp, Artificial Sequence
  Synthetic Polynucloetide
cgcgccaagaga

SEQ ID NO: 1244 - skipped

SEQ ID NO: 1245 - DNA, 2193 bp, Artificial Sequence
  Synthetic Polynucloetide
atggccttaccagtgaccgccttgctcctgccgctggccttgctgctccacgccgccaggccggacatccagatgacacagactacatcctccctgtctgcctctctgggagacagagtcaccatcagttgcagggcaagtcaggacattagtaaatatttaaattggtatcagcagaaaccagatggaactgttaaactcctgatctaccatacatcaagattacactcaggagtcccatcaaggttcagtggcagtgggtctggaacagattattctctcaccattagcaacctggagcaagaagatattgccacttacttttgccaacagggtaatacgcttccgtacacgttcggaggggggaccaagctggagatcacaggtggcggtggctcgggcggtggtgggtcgggtggcggcggatctgaggtgaaactgcaggagtcaggacctggcctggtggcgccctcacagagcctgtccgtcacatgcactgtctcaggggtctcattacccgactatggtgtaagctggattcgccagcctccacgaaagggtctggagtggctgggagtaatatggggtagtgaaaccacatactataattcagctctcaaatccagactgaccatcatcaaggacaactccaagagccaagttttcttaaaaatgaacagtctgcaaactgatgacacagccatttactactgtgccaaacattattactacggtggtagctatgctatggactactggggtcaaggaacctcagtcaccgtctcctcaacgcgtggaggcagtggtgtcttcacactcgaagatttcgttggggactggcgacagacagccggctacaacctggaccaagtccttgaacagggaggtgtgtccagtttgtttcagaatctcggggtgtccgtaactccgatccaaaggattgtcctgagcggtgaaaatgggctgaagatcgacatccatgtcatcatcccgtatgaaggtctgagcggcgaccaaatgggccagatcgaaaaaatttttaaggtggtgtaccctgtggatgatcatcactttaaggtgatcctgcactatggcacactggtaatcgacggggttacgccgaacatgatcgactatttcggacggccgtatgaaggcatcgccgtgttcgacggcaaaaagatcactgtaacagggaccctgtggaacggcaacaaaattatcgacgagcgcctgatcaaccccgacggctccctgctgttccgagtaaccatcaacggagtgaccggctggcggctgtgcgaacgcattctggcgctcgagggaggcagctggagccaccctcagtttgaaaaagactacaaagacgatgacgataagggatcagattacaaggatgatgatgacaaggggtcagattataaagacgacgatgataaagggagcgactacaaggacgacgatgacaaggcctggtcccatccccagttcgagaaacaccatcaccaccaccatcatcacactagtggctccggcgagggcagaggaagtctactaacctgcggagatgtggaagaaaatcctggcccacatatgaccgagtacaagcccacggtgcgcctcgccacccgcgacgacgtccccagggccgtacgcaccctcgccgccgcgttcgccgactaccccgccacgcgccacaccgtcgatccggaccgccacatcgagcgggtcaccgagctgcaagaactcttcctcacgcgcgtcgggctcgacatcggcaaggtgtgggtcgcggacgacggcgccgcggtggcggtctggaccacgccggagagcgtcgaagcgggggcggtgttcgccgagatcggcccgcgcatggccgagttgagcggttcccggctggccgcgcagcaacagatggaaggcctcctggcgccgcaccggcccaaggagcccgcgtggttcctggccaccgtcggcgtctcgcccgaccaccagggcaagggtctgggcagcgccgtcgtgctccccggagtggaggcggccgagcgcgccggggtgcccgccttcctggagacctccgcgccccgcaacctccccttctacgagcggctcggcttcaccgtcaccgccgacgtcgaggtgcccgaaggaccgcgcacctggtgcatgacccgcaagcccggtgcctga

SEQ ID NO: 1246 - DNA, 2193 bp, Artificial Sequence
  Synthetic Polynucloetide
atggccttaccagtgaccgccttgctcctgccgctggccttgctgctccacgccgccaggccggagatcgtgatgacccagagccctgccaccctgtctctgagccctggcgaaagagccaccctgagctgtagagccagccaggacatcagcaagtacctgaactggtatcagcagaagcccggccaggcccccagactgctgatctaccacaccagcagactgcacagcggcatccccgccagattttctggctctggcagcggcaccgactacaccctgacaatcagcagcctccagcccgaggacttcgccgtgtacttctgtcagcaaggcaacaccctgccctacaccttcggccagggcaccaagctggaaatcaagggcggaggcggaagtggaggcggaggatctggcggcggaggctctcaggtgcaactccaggaatctggccctggcctcgtgaagcccagcgagacactgagcctgacctgtaccgtgtccggcgtgtccctgcctgactatggcgtgtcctggatcagacagccccctggcaagggcctggaatggatcggagtgatttggggcagcgaaaccacctactacaacagctccctgaagtccagagtgaccatctccaaggacaactccaagaaccaggtgtccctgaagctgagcagcgtgacagccgccgacaccgccgtgtattactgcgccaagcactactactacggcggcagctacgctatggactactggggccagggaaccctcgtgaccgtgtctagtacgcgtggaggcagtggtgtcttcacactcgaagatttcgttggggactggcgacagacagccggctacaacctggaccaagtccttgaacagggaggtgtgtccagtttgtttcagaatctcggggtgtccgtaactccgatccaaaggattgtcctgagcggtgaaaatgggctgaagatcgacatccatgtcatcatcccgtatgaaggtctgagcggcgaccaaatgggccagatcgaaaaaatttttaaggtggtgtaccctgtggatgatcatcactttaaggtgatcctgcactatggcacactggtaatcgacggggttacgccgaacatgatcgactatttcggacggccgtatgaaggcatcgccgtgttcgacggcaaaaagatcactgtaacagggaccctgtggaacggcaacaaaattatcgacgagcgcctgatcaaccccgacggctccctgctgttccgagtaaccatcaacggagtgaccggctggcggctgtgcgaacgcattctggcgctcgagggaggcagctggagccaccctcagtttgaaaaagactacaaagacgatgacgataagggatcagattacaaggatgatgatgacaaggggtcagattataaagacgacgatgataaagggagcgactacaaggacgacgatgacaaggcctggtcccatccccagttcgagaaacaccatcaccaccaccatcatcacactagtggctccggcgagggcagaggaagtctactaacctgcggagatgtggaagaaaatcctggcccacatatgaccgagtacaagcccacggtgcgcctcgccacccgcgacgacgtccccagggccgtacgcaccctcgccgccgcgttcgccgactaccccgccacgcgccacaccgtcgatccggaccgccacatcgagcgggtcaccgagctgcaagaactcttcctcacgcgcgtcgggctcgacatcggcaaggtgtgggtcgcggacgacggcgccgcggtggcggtctggaccacgccggagagcgtcgaagcgggggcggtgttcgccgagatcggcccgcgcatggccgagttgagcggttcccggctggccgcgcagcaacagatggaaggcctcctggcgccgcaccggcccaaggagcccgcgtggttcctggccaccgtcggcgtctcgcccgaccaccagggcaagggtctgggcagcgccgtcgtgctccccggagtggaggcggccgagcgcgccggggtgcccgccttcctggagacctccgcgccccgcaacctccccttctacgagcggctcggcttcaccgtcaccgccgacgtcgaggtgcccgaaggaccgcgcacctggtgcatgacccgcaagcccggtgcctga

SEQ ID NO: 1247 - DNA, 2199 bp, Artificial Sequence
  Synthetic Polynucloetide
atggccttaccagtgaccgccttgctcctgccgctggccttgctgctccacgccgccaggccggacatccagatgacccagagccctagctcactgagcgccagcgtgggcgacagggtgaccattacctgctccgccagccaggacatcagcaactacctgaactggtaccagcagaagcccggcaaggcccccaagctgctgatctactacacctccaacctgcactccggcgtgcccagcaggttcagcggaagcggcagcggcaccgatttcaccctgaccatctccagcctgcagcccgaggacttcgccacctactactgccagcagtacaggaagctcccctggactttcggccagggcaccaaactggagatcaagcgtggcggaggcggaagtggaggcggaggatctggcggcggaggctctcaggtgcagctggtccagagcggcgccgaagtgaagaagcccggcagctccgtgaaagtgagctgcaaggccagcggcggcaccttcagcaactactggatgcactgggtgaggcaggcccccggacagggcctggagtggatgggcgccacctacaggggccacagcgacacctactacaaccagaagttcaagggccgggtgaccatcaccgccgacaagagcaccagcaccgcctacatggaactgagcagcctcaggagcgaggacaccgctgtgtattactgcgccaggggcgccatctacgacggctacgacgtgctggacaactggggccagggcacactggtgaccgtgtccagcacgcgtggaggcagtggtgtcttcacactcgaagatttcgttggggactggcgacagacagccggctacaacctggaccaagtccttgaacagggaggtgtgtccagtttgtttcagaatctcggggtgtccgtaactccgatccaaaggattgtcctgagcggtgaaaatgggctgaagatcgacatccatgtcatcatcccgtatgaaggtctgagcggcgaccaaatgggccagatcgaaaaaatttttaaggtggtgtaccctgtggatgatcatcactttaaggtgatcctgcactatggcacactggtaatcgacggggttacgccgaacatgatcgactatttcggacggccgtatgaaggcatcgccgtgttcgacggcaaaaagatcactgtaacagggaccctgtggaacggcaacaaaattatcgacgagcgcctgatcaaccccgacggctccctgctgttccgagtaaccatcaacggagtgaccggctggcggctgtgcgaacgcattctggcgctcgagggaggcagctggagccaccctcagtttgaaaaagactacaaagacgatgacgataagggatcagattacaaggatgatgatgacaaggggtcagattataaagacgacgatgataaagggagcgactacaaggacgacgatgacaaggcctggtcccatccccagttcgagaaacaccatcaccaccaccatcatcacactagtggctccggcgagggcagaggaagtctactaacctgcggagatgtggaagaaaatcctggcccacatatgaccgagtacaagcccacggtgcgcctcgccacccgcgacgacgtccccagggccgtacgcaccctcgccgccgcgttcgccgactaccccgccacgcgccacaccgtcgatccggaccgccacatcgagcgggtcaccgagctgcaagaactcttcctcacgcgcgtcgggctcgacatcggcaaggtgtgggtcgcggacgacggcgccgcggtggcggtctggaccacgccggagagcgtcgaagcgggggcggtgttcgccgagatcggcccgcgcatggccgagttgagcggttcccggctggccgcgcagcaacagatggaaggcctcctggcgccgcaccggcccaaggagcccgcgtggttcctggccaccgtcggcgtctcgcccgaccaccagggcaagggtctgggcagcgccgtcgtgctccccggagtggaggcggccgagcgcgccggggtgcccgccttcctggagacctccgcgccccgcaacctccccttctacgagcggctcggcttcaccgtcaccgccgacgtcgaggtgcccgaaggaccgcgcacctggtgcatgacccgcaagcccggtgcctga

SEQ ID NO: 1248 - DNA, 2199 bp, Artificial Sequence
  Synthetic Polynucloetide
atggccttaccagtgaccgccttgctcctgccgctggccttgctgctccacgccgccaggccggacatcgtgctgacacagagccctgccaccctgtctctgagccctggcgatagagccaccatcagctgtagagccagcgagagcgtgaccatcctgggcagccacctgatctactggtatcagcagaagcccggccagccccccagactgctgattcagctggcctccaatgtgcagaccggcgtgccagccagattttccggcagcggcagcagaaccgacttcaccctgaccatcagcagcgtggaacccgaggacttcgccgtgtactactgcctccagagccggaccatccccagaacattcggccagggcaccaagctggaaatcaagagaggcggaggcggaagtggaggcggaggatctggcggcggaggctctcaggtgcagctggtgcagtctggccccgaagtgaagaaacccggcgagtccgtgaagatcagctgcaaggccagcggctacaccttccggcactacagcatgaactgggtcaagcaggccccaggccagggcctgaagtggatgggcagaatcaacaccgagagcggcgtgcccatctacgccgacgacttcaagggccggttcagcttcaccgtggacaccagcgccagcaccgcctacctggaaatctccagcctgaccagcgaggataccgccgtgtatttctgctccaacgactacctgtacagcctggatttctggggccagggaaccaccctgacagtgtcctctacgcgtggaggcagtggtgtcttcacactcgaagatttcgttggggactggcgacagacagccggctacaacctggaccaagtccttgaacagggaggtgtgtccagtttgtttcagaatctcggggtgtccgtaactccgatccaaaggattgtcctgagcggtgaaaatgggctgaagatcgacatccatgtcatcatcccgtatgaaggtctgagcggcgaccaaatgggccagatcgaaaaaatttttaaggtggtgtaccctgtggatgatcatcactttaaggtgatcctgcactatggcacactggtaatcgacggggttacgccgaacatgatcgactatttcggacggccgtatgaaggcatcgccgtgttcgacggcaaaaagatcactgtaacagggaccctgtggaacggcaacaaaattatcgacgagcgcctgatcaaccccgacggctccctgctgttccgagtaaccatcaacggagtgaccggctggcggctgtgcgaacgcattctggcgctcgagggaggcagctggagccaccctcagtttgaaaaagactacaaagacgatgacgataagggatcagattacaaggatgatgatgacaaggggtcagattataaagacgacgatgataaagggagcgactacaaggacgacgatgacaaggcctggtcccatccccagttcgagaaacaccatcaccaccaccatcatcacactagtggctccggcgagggcagaggaagtctactaacctgcggagatgtggaagaaaatcctggcccacatatgaccgagtacaagcccacggtgcgcctcgccacccgcgacgacgtccccagggccgtacgcaccctcgccgccgcgttcgccgactaccccgccacgcgccacaccgtcgatccggaccgccacatcgagcgggtcaccgagctgcaagaactcttcctcacgcgcgtcgggctcgacatcggcaaggtgtgggtcgcggacgacggcgccgcggtggcggtctggaccacgccggagagcgtcgaagcgggggcggtgttcgccgagatcggcccgcgcatggccgagttgagcggttcccggctggccgcgcagcaacagatggaaggcctcctggcgccgcaccggcccaaggagcccgcgtggttcctggccaccgtcggcgtctcgcccgaccaccagggcaagggtctgggcagcgccgtcgtgctccccggagtggaggcggccgagcgcgccggggtgcccgccttcctggagacctccgcgccccgcaacctccccttctacgagcggctcggcttcaccgtcaccgccgacgtcgaggtgcccgaaggaccgcgcacctggtgcatgacccgcaagcccggtgcctga

SEQ ID NO: 1249 - DNA, 2202 bp, Artificial Sequence
  Synthetic Polynucloetide
atggccttaccagtgaccgccttgctcctgccgctggccttgctgctccacgccgccaggccggacgagatcgtgctgacacagagccctgccaccctgtctctgagccctggcgaaagagccaccctgagctgtagagccagccagagcgtgtccagctacctggcctggtatcagcagaagcccggccaggctccccggctgctgatctacgatgccagcaatagagccaccggcatccccgccagattttccggctctggcagcggcaccgacttcaccctgaccatcagctccctggaacccgaggacttcgccgtgtactactgccagcagcggagcaactggcccatcacattcggccagggcacccggctggaaatcaaaggcggaggcggaagtggaggcggaggatctggcggcggaggctctgaagtgcagctggtggaatcaggcggcggactggtgcagcctggcagaagcctgagactgagctgtgccgccagcggcttcaccttcaacgactacgccatgcactgggtgcgccaggcccctggaaaaggactggaatgggtgtccacaatcagctggaacagcggcagcatcggctacgccgatagcgtgaagggccggttcaccatcagccgggacaacgccaagaagtccctgtacctccagatgaacagcctgcgggccgaggacacagccctgtactattgcgccaaggacatccagtacggcaactactactacggcatggacgtgtggggccagggaaccaccgtgaccgtgtcatctacgcgtggaggcagtggtgtcttcacactcgaagatttcgttggggactggcgacagacagccggctacaacctggaccaagtccttgaacagggaggtgtgtccagtttgtttcagaatctcggggtgtccgtaactccgatccaaaggattgtcctgagcggtgaaaatgggctgaagatcgacatccatgtcatcatcccgtatgaaggtctgagcggcgaccaaatgggccagatcgaaaaaatttttaaggtggtgtaccctgtggatgatcatcactttaaggtgatcctgcactatggcacactggtaatcgacggggttacgccgaacatgatcgactatttcggacggccgtatgaaggcatcgccgtgttcgacggcaaaaagatcactgtaacagggaccctgtggaacggcaacaaaattatcgacgagcgcctgatcaaccccgacggctccctgctgttccgagtaaccatcaacggagtgaccggctggcggctgtgcgaacgcattctggcgctcgagggaggcagctggagccaccctcagtttgaaaaagactacaaagacgatgacgataagggatcagattacaaggatgatgatgacaaggggtcagattataaagacgacgatgataaagggagcgactacaaggacgacgatgacaaggcctggtcccatccccagttcgagaaacaccatcaccaccaccatcatcacactagtggctccggcgagggcagaggaagtctactaacctgcggagatgtggaagaaaatcctggcccacatatgaccgagtacaagcccacggtgcgcctcgccacccgcgacgacgtccccagggccgtacgcaccctcgccgccgcgttcgccgactaccccgccacgcgccacaccgtcgatccggaccgccacatcgagcgggtcaccgagctgcaagaactcttcctcacgcgcgtcgggctcgacatcggcaaggtgtgggtcgcggacgacggcgccgcggtggcggtctggaccacgccggagagcgtcgaagcgggggcggtgttcgccgagatcggcccgcgcatggccgagttgagcggttcccggctggccgcgcagcaacagatggaaggcctcctggcgccgcaccggcccaaggagcccgcgtggttcctggccaccgtcggcgtctcgcccgaccaccagggcaagggtctgggcagcgccgtcgtgctccccggagtggaggcggccgagcgcgccggggtgcccgccttcctggagacctccgcgccccgcaacctccccttctacgagcggctcggcttcaccgtcaccgccgacgtcgaggtgcccgaaggaccgcgcacctggtgcatgacccgcaagcccggtgcctga

SEQ ID NO: 1250-1258 - skipped (9 entries)

SEQ ID NO: 1259 - DNA, 1839 bp, Artificial Sequence
  Synthetic Polynucloetide
atggccttaccagtgaccgccttgctcctgccgctggccttgctgctccacgccgccaggccggaggtgcaactggttgagtctggcggaggactggtgcagcctggaagaagcctgagactgtcttgtgccgccagcggcttcaccttcgacgattatgccatgggctgggtccgaagagcccctggcaaagaagaggaactggtgtccggcatctcctggaacagcggctctatcggctacgccgattccgtgaagggcagattcaccatcagccgggacaacgccaagaacagcctgtacctccagatgaactccctgagagccgaggacacagccctgtactactgcgccaaagacaaaggcggaggctactacgacttttggagcggcagcgattatagaggccagggcacactggtcacagtgtctagcacgcgtggaggcagtggtgtcttcacactcgaagatttcgttggggactggcgacagacagccggctacaacctggaccaagtccttgaacagggaggtgtgtccagtttgtttcagaatctcggggtgtccgtaactccgatccaaaggattgtcctgagcggtgaaaatgggctgaagatcgacatccatgtcatcatcccgtatgaaggtctgagcggcgaccaaatgggccagatcgaaaaaatttttaaggtggtgtaccctgtggatgatcatcactttaaggtgatcctgcactatggcacactggtaatcgacggggttacgccgaacatgatcgactatttcggacggccgtatgaaggcatcgccgtgttcgacggcaaaaagatcactgtaacagggaccctgtggaacggcaacaaaattatcgacgagcgcctgatcaaccccgacggctccctgctgttccgagtaaccatcaacggagtgaccggctggcggctgtgcgaacgcattctggcgctcgagggaggcagctggagccaccctcagtttgaaaaagactacaaagacgatgacgataagggatcagattacaaggatgatgatgacaaggggtcagattataaagacgacgatgataaagggagcgactacaaggacgacgatgacaaggcctggtcccatccccagttcgagaaacaccatcaccaccaccatcatcacactagtggctccggcgagggcagaggaagtctactaacctgcggagatgtggaagaaaatcctggcccacatatgaccgagtacaagcccacggtgcgcctcgccacccgcgacgacgtccccagggccgtacgcaccctcgccgccgcgttcgccgactaccccgccacgcgccacaccgtcgatccggaccgccacatcgagcgggtcaccgagctgcaagaactcttcctcacgcgcgtcgggctcgacatcggcaaggtgtgggtcgcggacgacggcgccgcggtggcggtctggaccacgccggagagcgtcgaagcgggggcggtgttcgccgagatcggcccgcgcatggccgagttgagcggttcccggctggccgcgcagcaacagatggaaggcctcctggcgccgcaccggcccaaggagcccgcgtggttcctggccaccgtcggcgtctcgcccgaccaccagggcaagggtctgggcagcgccgtcgtgctccccggagtggaggcggccgagcgcgccggggtgcccgccttcctggagacctccgcgccccgcaacctccccttctacgagcggctcggcttcaccgtcaccgccgacgtcgaggtgcccgaaggaccgcgcacctggtgcatgacccgcaagcccggtgcctga

SEQ ID NO: 1260 - DNA, 1830 bp, Artificial Sequence
  Synthetic Polynucloetide
atggccttaccagtgaccgccttgctcctgccgctggccttgctgctccacgccgccaggccggaggtgcagctggttgaatctggcggaggactggttcagcctggcggatctctgagactgtcttgtgccgccagcggcttcaccttcagcagctatgctatgggctgggttcgcagagcccctggcaaagaggaagaactggtcgccagcatcagcggcagcggcgactatatcagatacgccgacagcgtgaagggcagattcaccatcagcgccgacaccagcaagaacaccgcctacctccagatgaacagcctgagagccgaggacaccgccgtgtactactgtgccaaagaaggcaccggcgctaacagcagcctggccgattatagaggccagggcacactggtcaccgtgtctagtacgcgtggaggcagtggtgtcttcacactcgaagatttcgttggggactggcgacagacagccggctacaacctggaccaagtccttgaacagggaggtgtgtccagtttgtttcagaatctcggggtgtccgtaactccgatccaaaggattgtcctgagcggtgaaaatgggctgaagatcgacatccatgtcatcatcccgtatgaaggtctgagcggcgaccaaatgggccagatcgaaaaaatttttaaggtggtgtaccctgtggatgatcatcactttaaggtgatcctgcactatggcacactggtaatcgacggggttacgccgaacatgatcgactatttcggacggccgtatgaaggcatcgccgtgttcgacggcaaaaagatcactgtaacagggaccctgtggaacggcaacaaaattatcgacgagcgcctgatcaaccccgacggctccctgctgttccgagtaaccatcaacggagtgaccggctggcggctgtgcgaacgcattctggcgctcgagggaggcagctggagccaccctcagtttgaaaaagactacaaagacgatgacgataagggatcagattacaaggatgatgatgacaaggggtcagattataaagacgacgatgataaagggagcgactacaaggacgacgatgacaaggcctggtcccatccccagttcgagaaacaccatcaccaccaccatcatcacactagtggctccggcgagggcagaggaagtctactaacctgcggagatgtggaagaaaatcctggcccacatatgaccgagtacaagcccacggtgcgcctcgccacccgcgacgacgtccccagggccgtacgcaccctcgccgccgcgttcgccgactaccccgccacgcgccacaccgtcgatccggaccgccacatcgagcgggtcaccgagctgcaagaactcttcctcacgcgcgtcgggctcgacatcggcaaggtgtgggtcgcggacgacggcgccgcggtggcggtctggaccacgccggagagcgtcgaagcgggggcggtgttcgccgagatcggcccgcgcatggccgagttgagcggttcccggctggccgcgcagcaacagatggaaggcctcctggcgccgcaccggcccaaggagcccgcgtggttcctggccaccgtcggcgtctcgcccgaccaccagggcaagggtctgggcagcgccgtcgtgctccccggagtggaggcggccgagcgcgccggggtgcccgccttcctggagacctccgcgccccgcaacctccccttctacgagcggctcggcttcaccgtcaccgccgacgtcgaggtgcccgaaggaccgcgcacctggtgcatgacccgcaagcccggtgcctga

SEQ ID NO: 1261-1264 - skipped (4 entries)

SEQ ID NO: 1265 - DNA, 2205 bp, Artificial Sequence
  Synthetic Polynucloetide
atggccttaccagtgaccgccttgctcctgccgctggccttgctgctccacgccgccaggccggaggtgcagctggttgaatctggcggaggactggttcagcctggcggatctctgagactgtcttgtgccgccagcggcttcaacatcaaggatacctgtatcggctgggttcgcagagcccctggcaaagaggaagaactggtcgccaaaatctgcaagtacagcggccacaccagatacgccgacagcgtgaagggcagattcaccatcagcgccgacaccagcaagaacaccgcctacctccagatgaacagcctgagagccgaggacaccgccgtgtactattgtgccgctgtgtccgtcagagatgggcactacaattactggggccagggcaccaccgtgaccgtttcttcaggcggaggaagcggcggaggatctgaagtgcaactggtggaaagcggaggcggacttgttcaaccaggcggaagcctgagactgagctgtgccgcttccggctttaatatcaaagacacatgcatcggatgggttcgccgcgctccagggaaagaagaggaactggttgccgacatctgtccctacaagggcagcacaagatatgccgactccgtgaaaggccggtttaccatctctgccgacacctctaagaatacggcctatctgcaaatgaactctctgcgggccgaagatacagccgtgtattactgcgccatcgtgtctgccagagatggctactataactattggggacagggaaccacagtcacagtgtcctctacgcgtggaggcagtggtgtcttcacactcgaagatttcgttggggactggcgacagacagccggctacaacctggaccaagtccttgaacagggaggtgtgtccagtttgtttcagaatctcggggtgtccgtaactccgatccaaaggattgtcctgagcggtgaaaatgggctgaagatcgacatccatgtcatcatcccgtatgaaggtctgagcggcgaccaaatgggccagatcgaaaaaatttttaaggtggtgtaccctgtggatgatcatcactttaaggtgatcctgcactatggcacactggtaatcgacggggttacgccgaacatgatcgactatttcggacggccgtatgaaggcatcgccgtgttcgacggcaaaaagatcactgtaacagggaccctgtggaacggcaacaaaattatcgacgagcgcctgatcaaccccgacggctccctgctgttccgagtaaccatcaacggagtgaccggctggcggctgtgcgaacgcattctggcgctcgagggaggcagctggagccaccctcagtttgaaaaagactacaaagacgatgacgataagggatcagattacaaggatgatgatgacaaggggtcagattataaagacgacgatgataaagggagcgactacaaggacgacgatgacaaggcctggtcccatccccagttcgagaaacaccatcaccaccaccatcatcacactagtggctccggcgagggcagaggaagtctactaacctgcggagatgtggaagaaaatcctggcccacatatgaccgagtacaagcccacggtgcgcctcgccacccgcgacgacgtccccagggccgtacgcaccctcgccgccgcgttcgccgactaccccgccacgcgccacaccgtcgatccggaccgccacatcgagcgggtcaccgagctgcaagaactcttcctcacgcgcgtcgggctcgacatcggcaaggtgtgggtcgcggacgacggcgccgcggtggcggtctggaccacgccggagagcgtcgaagcgggggcggtgttcgccgagatcggcccgcgcatggccgagttgagcggttcccggctggccgcgcagcaacagatggaaggcctcctggcgccgcaccggcccaaggagcccgcgtggttcctggccaccgtcggcgtctcgcccgaccaccagggcaagggtctgggcagcgccgtcgtgctccccggagtggaggcggccgagcgcgccggggtgcccgccttcctggagacctccgcgccccgcaacctccccttctacgagcggctcggcttcaccgtcaccgccgacgtcgaggtgcccgaaggaccgcgcacctggtgcatgacccgcaagcccggtgcctga

SEQ ID NO: 1266 - DNA, 1824 bp, Artificial Sequence
  Synthetic Polynucloetide
atggccttaccagtgaccgccttgctcctgccgctggccttgctgctccacgccgccaggccggaggtgcagctggttgaatctggcggaggactggttcagcctggcggatctctgagactgtcttgtgccgccagcggcttcaacatcaaggatacctgtatcggctgggttcgcagagcccctggcaaagaggaagaactggtcgccaaaatctgcaagtacagcggccacaccagatacgccgacagcgtgaagggcagattcaccatcagcgccgacaccagcaagaacaccgcctacctccagatgaacagcctgagagccgaggacaccgccgtgtactattgtgccgctgtgtccgtcagagatgggcactacaattactggggccagggcaccaccgtgaccgtttcttcaacgcgtggaggcagtggtgtcttcacactcgaagatttcgttggggactggcgacagacagccggctacaacctggaccaagtccttgaacagggaggtgtgtccagtttgtttcagaatctcggggtgtccgtaactccgatccaaaggattgtcctgagcggtgaaaatgggctgaagatcgacatccatgtcatcatcccgtatgaaggtctgagcggcgaccaaatgggccagatcgaaaaaatttttaaggtggtgtaccctgtggatgatcatcactttaaggtgatcctgcactatggcacactggtaatcgacggggttacgccgaacatgatcgactatttcggacggccgtatgaaggcatcgccgtgttcgacggcaaaaagatcactgtaacagggaccctgtggaacggcaacaaaattatcgacgagcgcctgatcaaccccgacggctccctgctgttccgagtaaccatcaacggagtgaccggctggcggctgtgcgaacgcattctggcgctcgagggaggcagctggagccaccctcagtttgaaaaagactacaaagacgatgacgataagggatcagattacaaggatgatgatgacaaggggtcagattataaagacgacgatgataaagggagcgactacaaggacgacgatgacaaggcctggtcccatccccagttcgagaaacaccatcaccaccaccatcatcacactagtggctccggcgagggcagaggaagtctactaacctgcggagatgtggaagaaaatcctggcccacatatgaccgagtacaagcccacggtgcgcctcgccacccgcgacgacgtccccagggccgtacgcaccctcgccgccgcgttcgccgactaccccgccacgcgccacaccgtcgatccggaccgccacatcgagcgggtcaccgagctgcaagaactcttcctcacgcgcgtcgggctcgacatcggcaaggtgtgggtcgcggacgacggcgccgcggtggcggtctggaccacgccggagagcgtcgaagcgggggcggtgttcgccgagatcggcccgcgcatggccgagttgagcggttcccggctggccgcgcagcaacagatggaaggcctcctggcgccgcaccggcccaaggagcccgcgtggttcctggccaccgtcggcgtctcgcccgaccaccagggcaagggtctgggcagcgccgtcgtgctccccggagtggaggcggccgagcgcgccggggtgcccgccttcctggagacctccgcgccccgcaacctccccttctacgagcggctcggcttcaccgtcaccgccgacgtcgaggtgcccgaaggaccgcgcacctggtgcatgacccgcaagcccggtgcctga

SEQ ID NO: 1267 - DNA, 2205 bp, Artificial Sequence
  Synthetic Polynucloetide
atggccttaccagtgaccgccttgctcctgccgctggccttgctgctccacgccgccaggccggaggtgcagctggttgaatctggcggaggactggttcagcctggcggatctctgagactgtcctgcacattttccggcggcaccttcagcagctacacaatgggctggttcagacaggcccctggcaaagaacgggaatttgtggccgaagtccgatggggcggagtgaccacatacagcaacagcctgaaggacagattcagcatcagcgaggacagcgtgaagaacgccgtgtacctccagatgaactccctgaagcctgaggacacagccgtgtactattgtgccgctgtgcggcagatgtacatgaccgtggtgcctgattattggggccagggcacactggtcacagtgtctagcagcggcggaggcggatctttcgaacagctccagttgcaagagagcggccctggcttggtaaaaccttccgagacccttagcctcacatgcacggttagtgggggcagcatttcctcaggtgattactattggggatggattcggcaacccccgggtaaaggattggagtggattggtcatatttattatagtggagcgacgtactacaacccaagtctcaaatccagggttacaatatccgtcgatacgagcaggaaccaattcagcttgaaactttctagtgtcaccgcagcagacacagccgtctattactgtacgcgggatgactccagtaattggcggtcccgagggcaagggacactggtcacggtctcctcaacgcgtggaggcagtggtgtcttcacactcgaagatttcgttggggactggcgacagacagccggctacaacctggaccaagtccttgaacagggaggtgtgtccagtttgtttcagaatctcggggtgtccgtaactccgatccaaaggattgtcctgagcggtgaaaatgggctgaagatcgacatccatgtcatcatcccgtatgaaggtctgagcggcgaccaaatgggccagatcgaaaaaatttttaaggtggtgtaccctgtggatgatcatcactttaaggtgatcctgcactatggcacactggtaatcgacggggttacgccgaacatgatcgactatttcggacggccgtatgaaggcatcgccgtgttcgacggcaaaaagatcactgtaacagggaccctgtggaacggcaacaaaattatcgacgagcgcctgatcaaccccgacggctccctgctgttccgagtaaccatcaacggagtgaccggctggcggctgtgcgaacgcattctggcgctcgagggaggcagctggagccaccctcagtttgaaaaagactacaaagacgatgacgataagggatcagattacaaggatgatgatgacaaggggtcagattataaagacgacgatgataaagggagcgactacaaggacgacgatgacaaggcctggtcccatccccagttcgagaaacaccatcaccaccaccatcatcacactagtggctccggcgagggcagaggaagtctactaacctgcggagatgtggaagaaaatcctggcccacatatgaccgagtacaagcccacggtgcgcctcgccacccgcgacgacgtccccagggccgtacgcaccctcgccgccgcgttcgccgactaccccgccacgcgccacaccgtcgatccggaccgccacatcgagcgggtcaccgagctgcaagaactcttcctcacgcgcgtcgggctcgacatcggcaaggtgtgggtcgcggacgacggcgccgcggtggcggtctggaccacgccggagagcgtcgaagcgggggcggtgttcgccgagatcggcccgcgcatggccgagttgagcggttcccggctggccgcgcagcaacagatggaaggcctcctggcgccgcaccggcccaaggagcccgcgtggttcctggccaccgtcggcgtctcgcccgaccaccagggcaagggtctgggcagcgccgtcgtgctccccggagtggaggcggccgagcgcgccggggtgcccgccttcctggagacctccgcgccccgcaacctccccttctacgagcggctcggcttcaccgtcaccgccgacgtcgaggtgcccgaaggaccgcgcacctggtgcatgacccgcaagcccggtgcctga

SEQ ID NO: 1268 - DNA, 1827 bp, Artificial Sequence
  Synthetic Polynucloetide
atggccttaccagtgaccgccttgctcctgccgctggccttgctgctccacgccgccaggccggaggtgcagctggttgaatctggcggaggactggttcagcctggcggatctctgagactgtcctgcacattttccggcggcaccttcagcagctacacaatgggctggttcagacaggcccctggcaaagaacgggaatttgtggccgaagtccgatggggcggagtgaccacatacagcaacagcctgaaggacagattcagcatcagcgaggacagcgtgaagaacgccgtgtacctccagatgaactccctgaagcctgaggacacagccgtgtactattgtgccgctgtgcggcagatgtacatgaccgtggtgcctgattattggggccagggcacactggtcacagtgtctagcacgcgtggaggcagtggtgtcttcacactcgaagatttcgttggggactggcgacagacagccggctacaacctggaccaagtccttgaacagggaggtgtgtccagtttgtttcagaatctcggggtgtccgtaactccgatccaaaggattgtcctgagcggtgaaaatgggctgaagatcgacatccatgtcatcatcccgtatgaaggtctgagcggcgaccaaatgggccagatcgaaaaaatttttaaggtggtgtaccctgtggatgatcatcactttaaggtgatcctgcactatggcacactggtaatcgacggggttacgccgaacatgatcgactatttcggacggccgtatgaaggcatcgccgtgttcgacggcaaaaagatcactgtaacagggaccctgtggaacggcaacaaaattatcgacgagcgcctgatcaaccccgacggctccctgctgttccgagtaaccatcaacggagtgaccggctggcggctgtgcgaacgcattctggcgctcgagggaggcagctggagccaccctcagtttgaaaaagactacaaagacgatgacgataagggatcagattacaaggatgatgatgacaaggggtcagattataaagacgacgatgataaagggagcgactacaaggacgacgatgacaaggcctggtcccatccccagttcgagaaacaccatcaccaccaccatcatcacactagtggctccggcgagggcagaggaagtctactaacctgcggagatgtggaagaaaatcctggcccacatatgaccgagtacaagcccacggtgcgcctcgccacccgcgacgacgtccccagggccgtacgcaccctcgccgccgcgttcgccgactaccccgccacgcgccacaccgtcgatccggaccgccacatcgagcgggtcaccgagctgcaagaactcttcctcacgcgcgtcgggctcgacatcggcaaggtgtgggtcgcggacgacggcgccgcggtggcggtctggaccacgccggagagcgtcgaagcgggggcggtgttcgccgagatcggcccgcgcatggccgagttgagcggttcccggctggccgcgcagcaacagatggaaggcctcctggcgccgcaccggcccaaggagcccgcgtggttcctggccaccgtcggcgtctcgcccgaccaccagggcaagggtctgggcagcgccgtcgtgctccccggagtggaggcggccgagcgcgccggggtgcccgccttcctggagacctccgcgccccgcaacctccccttctacgagcggctcggcttcaccgtcaccgccgacgtcgaggtgcccgaaggaccgcgcacctggtgcatgacccgcaagcccggtgcctga

SEQ ID NO: 1269 - DNA, 2241 bp, Artificial Sequence
  Synthetic Polynucloetide
atggccttaccagtgaccgccttgctcctgccgctggccttgctgctccacgccgccaggccggaggtgcagctggttgaatctggtggcggagttgtgcagcctggcagaagcctgagactgtcttgtgccgccagcggctttagcttcagcggctatggaatgcactgggtccgacaggcccctggcaaaggacttgagtgggtcgcctacatcagctacgacggcagcaacaagtattacgccgacagcgtgaagggcagattcaccatcagccgggacaacagcaagaacaccctgtacctccagatgaacagcctgagagccgaggacaccgccgtgtactactgcgccaaagatcctgcctggggactgagactgggcgagagcagcagctacgatttcgacatctggggccagggcacaatggtcacagtttctagcggatccggcggaggcggaagtggaggcggaggatctggcggcggaggctctttcgaagttcagctgctggaatctggcggaggactcgttcaacctggcggctctctgagactgagctgtgccgcttctggcttcagcttctctagctacgccctgagctgggttcgacaagctcccggaaagggccttgaatgggtgtccagcatcggcgagaatgacggcaccacagactatgccgatgccgtgaaaggccggtttaccatcagcagagacaattccaagaacacgctctatctgcaaatgaactccctgcgcgtggaagatacagccgtgtattattgcgtgaaggacggcgtgcactggggacagggaaccctggttacagtgtctagcacgcgtggaggcagtggtgtcttcacactcgaagatttcgttggggactggcgacagacagccggctacaacctggaccaagtccttgaacagggaggtgtgtccagtttgtttcagaatctcggggtgtccgtaactccgatccaaaggattgtcctgagcggtgaaaatgggctgaagatcgacatccatgtcatcatcccgtatgaaggtctgagcggcgaccaaatgggccagatcgaaaaaatttttaaggtggtgtaccctgtggatgatcatcactttaaggtgatcctgcactatggcacactggtaatcgacggggttacgccgaacatgatcgactatttcggacggccgtatgaaggcatcgccgtgttcgacggcaaaaagatcactgtaacagggaccctgtggaacggcaacaaaattatcgacgagcgcctgatcaaccccgacggctccctgctgttccgagtaaccatcaacggagtgaccggctggcggctgtgcgaacgcattctggcgctcgagggaggcagctggagccaccctcagtttgaaaaagactacaaagacgatgacgataagggatcagattacaaggatgatgatgacaaggggtcagattataaagacgacgatgataaagggagcgactacaaggacgacgatgacaaggcctggtcccatccccagttcgagaaacaccatcaccaccaccatcatcacactagtggctccggcgagggcagaggaagtctactaacctgcggagatgtggaagaaaatcctggcccacatatgaccgagtacaagcccacggtgcgcctcgccacccgcgacgacgtccccagggccgtacgcaccctcgccgccgcgttcgccgactaccccgccacgcgccacaccgtcgatccggaccgccacatcgagcgggtcaccgagctgcaagaactcttcctcacgcgcgtcgggctcgacatcggcaaggtgtgggtcgcggacgacggcgccgcggtggcggtctggaccacgccggagagcgtcgaagcgggggcggtgttcgccgagatcggcccgcgcatggccgagttgagcggttcccggctggccgcgcagcaacagatggaaggcctcctggcgccgcaccggcccaaggagcccgcgtggttcctggccaccgtcggcgtctcgcccgaccaccagggcaagggtctgggcagcgccgtcgtgctccccggagtggaggcggccgagcgcgccggggtgcccgccttcctggagacctccgcgccccgcaacctccccttctacgagcggctcggcttcaccgtcaccgccgacgtcgaggtgcccgaaggaccgcgcacctggtgcatgacccgcaagcccggtgcctga

SEQ ID NO: 1270 - DNA, 1848 bp, Artificial Sequence
  Synthetic Polynucloetide
atggccttaccagtgaccgccttgctcctgccgctggccttgctgctccacgccgccaggccggaggtgcagctggttgaatctggtggcggagttgtgcagcctggcagaagcctgagactgtcttgtgccgccagcggctttagcttcagcggctatggaatgcactgggtccgacaggcccctggcaaaggacttgagtgggtcgcctacatcagctacgacggcagcaacaagtattacgccgacagcgtgaagggcagattcaccatcagccgggacaacagcaagaacaccctgtacctccagatgaacagcctgagagccgaggacaccgccgtgtactactgcgccaaagatcctgcctggggactgagactgggcgagagcagcagctacgatttcgacatctggggccagggcacaatggtcacagtttctagcacgcgtggaggcagtggtgtcttcacactcgaagatttcgttggggactggcgacagacagccggctacaacctggaccaagtccttgaacagggaggtgtgtccagtttgtttcagaatctcggggtgtccgtaactccgatccaaaggattgtcctgagcggtgaaaatgggctgaagatcgacatccatgtcatcatcccgtatgaaggtctgagcggcgaccaaatgggccagatcgaaaaaatttttaaggtggtgtaccctgtggatgatcatcactttaaggtgatcctgcactatggcacactggtaatcgacggggttacgccgaacatgatcgactatttcggacggccgtatgaaggcatcgccgtgttcgacggcaaaaagatcactgtaacagggaccctgtggaacggcaacaaaattatcgacgagcgcctgatcaaccccgacggctccctgctgttccgagtaaccatcaacggagtgaccggctggcggctgtgcgaacgcattctggcgctcgagggaggcagctggagccaccctcagtttgaaaaagactacaaagacgatgacgataagggatcagattacaaggatgatgatgacaaggggtcagattataaagacgacgatgataaagggagcgactacaaggacgacgatgacaaggcctggtcccatccccagttcgagaaacaccatcaccaccaccatcatcacactagtggctccggcgagggcagaggaagtctactaacctgcggagatgtggaagaaaatcctggcccacatatgaccgagtacaagcccacggtgcgcctcgccacccgcgacgacgtccccagggccgtacgcaccctcgccgccgcgttcgccgactaccccgccacgcgccacaccgtcgatccggaccgccacatcgagcgggtcaccgagctgcaagaactcttcctcacgcgcgtcgggctcgacatcggcaaggtgtgggtcgcggacgacggcgccgcggtggcggtctggaccacgccggagagcgtcgaagcgggggcggtgttcgccgagatcggcccgcgcatggccgagttgagcggttcccggctggccgcgcagcaacagatggaaggcctcctggcgccgcaccggcccaaggagcccgcgtggttcctggccaccgtcggcgtctcgcccgaccaccagggcaagggtctgggcagcgccgtcgtgctccccggagtggaggcggccgagcgcgccggggtgcccgccttcctggagacctccgcgccccgcaacctccccttctacgagcggctcggcttcaccgtcaccgccgacgtcgaggtgcccgaaggaccgcgcacctggtgcatgacccgcaagcccggtgcctga

SEQ ID NO: 1271 - DNA, 2220 bp, Artificial Sequence
  Synthetic Polynucloetide
atggactggatttggcgcatccttttccttgtcggcgctgctaccggcgcccattccgaggttcagctgcttgagtctggcggaggactggttcaacctggcggaagcctgagactgtcttgtgccgcttccggcttcagcttcagcagctatgccctgagctgggtccgacaggctcctggcaaaggactggaatgggtgtccagcatcggcgagaatgacggcaccaccgattatgccgatgccgtgaagggcagattcaccatctctcgggacaacagcaagaacaccctgtacctccagatgaacagcctcagagtggaagataccgccgtgtactactgcgtgaaggacggcgttcactggggccagggaacactggttacagtgtctagcggatccggcggaggcggaagtggaggcggaggatctttcgaagttcagttggtagagtctggaggcggagtggtacaaccggggcggtctcttagacttagttgcgcagcaagcggtttctctttctctggctatgggatgcactgggtgagacaggcccctgggaaaggactggagtgggtggcctacatttcatacgacgggagtaataaatactatgcagactccgttaagggcaggttcacgatctctcgggacaattccaagaatacattgtatcttcagatgaatagtctccgagctgaagacacggcggtttactactgcgctaaagacccggcctggggacttcgacttggagagagttctagctacgattttgacatttggggacaagggacaatggtcactgtctcaagtacgcgtggaggcagtggtgtcttcacactcgaagatttcgttggggactggcgacagacagccggctacaacctggaccaagtccttgaacagggaggtgtgtccagtttgtttcagaatctcggggtgtccgtaactccgatccaaaggattgtcctgagcggtgaaaatgggctgaagatcgacatccatgtcatcatcccgtatgaaggtctgagcggcgaccaaatgggccagatcgaaaaaatttttaaggtggtgtaccctgtggatgatcatcactttaaggtgatcctgcactatggcacactggtaatcgacggggttacgccgaacatgatcgactatttcggacggccgtatgaaggcatcgccgtgttcgacggcaaaaagatcactgtaacagggaccctgtggaacggcaacaaaattatcgacgagcgcctgatcaaccccgacggctccctgctgttccgagtaaccatcaacggagtgaccggctggcggctgtgcgaacgcattctggcgctcgagggaggcagctggagccaccctcagtttgaaaaagactacaaagacgatgacgataagggatcagattacaaggatgatgatgacaaggggtcagattataaagacgacgatgataaagggagcgactacaaggacgacgatgacaaggcctggtcccatccccagttcgagaaacaccatcaccaccaccatcatcacactagtggctccggcgagggcagaggaagtctactaacctgcggagatgtggaagaaaatcctggcccacatatgaccgagtacaagcccacggtgcgcctcgccacccgcgacgacgtccccagggccgtacgcaccctcgccgccgcgttcgccgactaccccgccacgcgccacaccgtcgatccggaccgccacatcgagcgggtcaccgagctgcaagaactcttcctcacgcgcgtcgggctcgacatcggcaaggtgtgggtcgcggacgacggcgccgcggtggcggtctggaccacgccggagagcgtcgaagcgggggcggtgttcgccgagatcggcccgcgcatggccgagttgagcggttcccggctggccgcgcagcaacagatggaaggcctcctggcgccgcaccggcccaaggagcccgcgtggttcctggccaccgtcggcgtctcgcccgaccaccagggcaagggtctgggcagcgccgtcgtgctccccggagtggaggcggccgagcgcgccggggtgcccgccttcctggagacctccgcgccccgcaacctccccttctacgagcggctcggcttcaccgtcaccgccgacgtcgaggtgcccgaaggaccgcgcacctggtgcatgacccgcaagcccggtgcctga

SEQ ID NO: 1272 - DNA, 1800 bp, Artificial Sequence
  Synthetic Polynucloetide
atggactggatttggcgcatccttttccttgtcggcgctgctaccggcgcccattccgaggttcagctgcttgagtctggcggaggactggttcaacctggcggaagcctgagactgtcttgtgccgcttccggcttcagcttcagcagctatgccctgagctgggtccgacaggctcctggcaaaggactggaatgggtgtccagcatcggcgagaatgacggcaccaccgattatgccgatgccgtgaagggcagattcaccatctctcgggacaacagcaagaacaccctgtacctccagatgaacagcctcagagtggaagataccgccgtgtactactgcgtgaaggacggcgttcactggggccagggaacactggttacagtgtctagcacgcgtggaggcagtggtgtcttcacactcgaagatttcgttggggactggcgacagacagccggctacaacctggaccaagtccttgaacagggaggtgtgtccagtttgtttcagaatctcggggtgtccgtaactccgatccaaaggattgtcctgagcggtgaaaatgggctgaagatcgacatccatgtcatcatcccgtatgaaggtctgagcggcgaccaaatgggccagatcgaaaaaatttttaaggtggtgtaccctgtggatgatcatcactttaaggtgatcctgcactatggcacactggtaatcgacggggttacgccgaacatgatcgactatttcggacggccgtatgaaggcatcgccgtgttcgacggcaaaaagatcactgtaacagggaccctgtggaacggcaacaaaattatcgacgagcgcctgatcaaccccgacggctccctgctgttccgagtaaccatcaacggagtgaccggctggcggctgtgcgaacgcattctggcgctcgagggaggcagctggagccaccctcagtttgaaaaagactacaaagacgatgacgataagggatcagattacaaggatgatgatgacaaggggtcagattataaagacgacgatgataaagggagcgactacaaggacgacgatgacaaggcctggtcccatccccagttcgagaaacaccatcaccaccaccatcatcacactagtggctccggcgagggcagaggaagtctactaacctgcggagatgtggaagaaaatcctggcccacatatgaccgagtacaagcccacggtgcgcctcgccacccgcgacgacgtccccagggccgtacgcaccctcgccgccgcgttcgccgactaccccgccacgcgccacaccgtcgatccggaccgccacatcgagcgggtcaccgagctgcaagaactcttcctcacgcgcgtcgggctcgacatcggcaaggtgtgggtcgcggacgacggcgccgcggtggcggtctggaccacgccggagagcgtcgaagcgggggcggtgttcgccgagatcggcccgcgcatggccgagttgagcggttcccggctggccgcgcagcaacagatggaaggcctcctggcgccgcaccggcccaaggagcccgcgtggttcctggccaccgtcggcgtctcgcccgaccaccagggcaagggtctgggcagcgccgtcgtgctccccggagtggaggcggccgagcgcgccggggtgcccgccttcctggagacctccgcgccccgcaacctccccttctacgagcggctcggcttcaccgtcaccgccgacgtcgaggtgcccgaaggaccgcgcacctggtgcatgacccgcaagcccggtgcctga

SEQ ID NO: 1273 - DNA, 1839 bp, Artificial Sequence
  Synthetic Polynucloetide
atggccttaccagtgaccgccttgctcctgccgctggccttgctgctccacgccgccaggccgcagctgcaactgcaagagtctggccccggactggtcaagccttctgaaacactggccctgacctgcaatgtgtccggcggctctatcagcagcagctcctattactggggctggatcagacagcctccaggcaagagactggaatggatcggcagcatctactacagcggcagcacatacttcaaccccagcctgaagtccagagtgaccatcagcgtggacacctccaagaaccagttctccctgaagctgagcagcgtgacagccgccgatacagccgtgtattactgtgctggcggcgactactatggccccgttggacaatggcccagcgattacagaggacagggaacccttgtgaccgtgtcctctacgcgtggaggcagtggtgtcttcacactcgaagatttcgttggggactggcgacagacagccggctacaacctggaccaagtccttgaacagggaggtgtgtccagtttgtttcagaatctcggggtgtccgtaactccgatccaaaggattgtcctgagcggtgaaaatgggctgaagatcgacatccatgtcatcatcccgtatgaaggtctgagcggcgaccaaatgggccagatcgaaaaaatttttaaggtggtgtaccctgtggatgatcatcactttaaggtgatcctgcactatggcacactggtaatcgacggggttacgccgaacatgatcgactatttcggacggccgtatgaaggcatcgccgtgttcgacggcaaaaagatcactgtaacagggaccctgtggaacggcaacaaaattatcgacgagcgcctgatcaaccccgacggctccctgctgttccgagtaaccatcaacggagtgaccggctggcggctgtgcgaacgcattctggcgctcgagggaggcagctggagccaccctcagtttgaaaaagactacaaagacgatgacgataagggatcagattacaaggatgatgatgacaaggggtcagattataaagacgacgatgataaagggagcgactacaaggacgacgatgacaaggcctggtcccatccccagttcgagaaacaccatcaccaccaccatcatcacactagtggctccggcgagggcagaggaagtctactaacctgcggagatgtggaagaaaatcctggcccacatatgaccgagtacaagcccacggtgcgcctcgccacccgcgacgacgtccccagggccgtacgcaccctcgccgccgcgttcgccgactaccccgccacgcgccacaccgtcgatccggaccgccacatcgagcgggtcaccgagctgcaagaactcttcctcacgcgcgtcgggctcgacatcggcaaggtgtgggtcgcggacgacggcgccgcggtggcggtctggaccacgccggagagcgtcgaagcgggggcggtgttcgccgagatcggcccgcgcatggccgagttgagcggttcccggctggccgcgcagcaacagatggaaggcctcctggcgccgcaccggcccaaggagcccgcgtggttcctggccaccgtcggcgtctcgcccgaccaccagggcaagggtctgggcagcgccgtcgtgctccccggagtggaggcggccgagcgcgccggggtgcccgccttcctggagacctccgcgccccgcaacctccccttctacgagcggctcggcttcaccgtcaccgccgacgtcgaggtgcccgaaggaccgcgcacctggtgcatgacccgcaagcccggtgcctga

SEQ ID NO: 1274 - DNA, 2229 bp, Artificial Sequence
  Synthetic Polynucloetide
atggactggatttggcgcatccttttccttgtcggcgctgctaccggcgcccattcccagctccagctgcaagagtctggacctggcctggtcaagcctagcgagacactgagcctgacctgtacagttagcggcggctctgtgtccagcagcagctattactggggctggatcagacagcctcctggcaagagactggaactgatcggcagcatctactacggcggctccacctacttcaaccccagcctgaaaagcagagtgaccatcagcgtggacaccagcaagaaccagttcagcctgaagctgagcagcgtgacagccgccgatacagccgtgtactattgtgccggcggagacacatacggccctgttggacaatggcccagcgactatagaggccagggcacactggtcacagtgtctagcggtggcggaggaagtggcggcggatctttcgaagttcagctgcttgaaagcggtggcggcctggttcaacctggcggatctctgagactgagctgtgccgccagcggcttcatcttctccatctacgccatgtcctgggtccgacaggcccctggaaaaggactggaatgggtgtccggcatctctggcagcggcgtgaacacctactacgccgattctgtgaagggccgcttcatcatcagccgggacaacagcagaaacaccgtgtacctccagatgaacagcctgagagccgatgacaccgccgtgtaccactgcgccaatggcaaaggctgggacggcaacacttggtacgaggattacagaggacagggaaccctcgtgaccgtgtctagtacgcgtggaggcagtggtgtcttcacactcgaagatttcgttggggactggcgacagacagccggctacaacctggaccaagtccttgaacagggaggtgtgtccagtttgtttcagaatctcggggtgtccgtaactccgatccaaaggattgtcctgagcggtgaaaatgggctgaagatcgacatccatgtcatcatcccgtatgaaggtctgagcggcgaccaaatgggccagatcgaaaaaatttttaaggtggtgtaccctgtggatgatcatcactttaaggtgatcctgcactatggcacactggtaatcgacggggttacgccgaacatgatcgactatttcggacggccgtatgaaggcatcgccgtgttcgacggcaaaaagatcactgtaacagggaccctgtggaacggcaacaaaattatcgacgagcgcctgatcaaccccgacggctccctgctgttccgagtaaccatcaacggagtgaccggctggcggctgtgcgaacgcattctggcgctcgagggaggcagctggagccaccctcagtttgaaaaagactacaaagacgatgacgataagggatcagattacaaggatgatgatgacaaggggtcagattataaagacgacgatgataaagggagcgactacaaggacgacgatgacaaggcctggtcccatccccagttcgagaaacaccatcaccaccaccatcatcacactagtggctccggcgagggcagaggaagtctactaacctgcggagatgtggaagaaaatcctggcccacatatgaccgagtacaagcccacggtgcgcctcgccacccgcgacgacgtccccagggccgtacgcaccctcgccgccgcgttcgccgactaccccgccacgcgccacaccgtcgatccggaccgccacatcgagcgggtcaccgagctgcaagaactcttcctcacgcgcgtcgggctcgacatcggcaaggtgtgggtcgcggacgacggcgccgcggtggcggtctggaccacgccggagagcgtcgaagcgggggcggtgttcgccgagatcggcccgcgcatggccgagttgagcggttcccggctggccgcgcagcaacagatggaaggcctcctggcgccgcaccggcccaaggagcccgcgtggttcctggccaccgtcggcgtctcgcccgaccaccagggcaagggtctgggcagcgccgtcgtgctccccggagtggaggcggccgagcgcgccggggtgcccgccttcctggagacctccgcgccccgcaacctccccttctacgagcggctcggcttcaccgtcaccgccgacgtcgaggtgcccgaaggaccgcgcacctggtgcatgacccgcaagcccggtgcctga

SEQ ID NO: 1275 - DNA, 1833 bp, Artificial Sequence
  Synthetic Polynucloetide
atggactggatttggcgcatccttttccttgtcggcgctgctaccggcgcccattcccagctccagctgcaagagtctggacctggcctggtcaagcctagcgagacactgagcctgacctgtacagttagcggcggctctgtgtccagcagcagctattactggggctggatcagacagcctcctggcaagagactggaactgatcggcagcatctactacggcggctccacctacttcaaccccagcctgaaaagcagagtgaccatcagcgtggacaccagcaagaaccagttcagcctgaagctgagcagcgtgacagccgccgatacagccgtgtactattgtgccggcggagacacatacggccctgttggacaatggcccagcgactatagaggccagggcacactggtcacagtgtctagcacgcgtggaggcagtggtgtcttcacactcgaagatttcgttggggactggcgacagacagccggctacaacctggaccaagtccttgaacagggaggtgtgtccagtttgtttcagaatctcggggtgtccgtaactccgatccaaaggattgtcctgagcggtgaaaatgggctgaagatcgacatccatgtcatcatcccgtatgaaggtctgagcggcgaccaaatgggccagatcgaaaaaatttttaaggtggtgtaccctgtggatgatcatcactttaaggtgatcctgcactatggcacactggtaatcgacggggttacgccgaacatgatcgactatttcggacggccgtatgaaggcatcgccgtgttcgacggcaaaaagatcactgtaacagggaccctgtggaacggcaacaaaattatcgacgagcgcctgatcaaccccgacggctccctgctgttccgagtaaccatcaacggagtgaccggctggcggctgtgcgaacgcattctggcgctcgagggaggcagctggagccaccctcagtttgaaaaagactacaaagacgatgacgataagggatcagattacaaggatgatgatgacaaggggtcagattataaagacgacgatgataaagggagcgactacaaggacgacgatgacaaggcctggtcccatccccagttcgagaaacaccatcaccaccaccatcatcacactagtggctccggcgagggcagaggaagtctactaacctgcggagatgtggaagaaaatcctggcccacatatgaccgagtacaagcccacggtgcgcctcgccacccgcgacgacgtccccagggccgtacgcaccctcgccgccgcgttcgccgactaccccgccacgcgccacaccgtcgatccggaccgccacatcgagcgggtcaccgagctgcaagaactcttcctcacgcgcgtcgggctcgacatcggcaaggtgtgggtcgcggacgacggcgccgcggtggcggtctggaccacgccggagagcgtcgaagcgggggcggtgttcgccgagatcggcccgcgcatggccgagttgagcggttcccggctggccgcgcagcaacagatggaaggcctcctggcgccgcaccggcccaaggagcccgcgtggttcctggccaccgtcggcgtctcgcccgaccaccagggcaagggtctgggcagcgccgtcgtgctccccggagtggaggcggccgagcgcgccggggtgcccgccttcctggagacctccgcgccccgcaacctccccttctacgagcggctcggcttcaccgtcaccgccgacgtcgaggtgcccgaaggaccgcgcacctggtgcatgacccgcaagcccggtgcctga

SEQ ID NO: 1276 - DNA, 1830 bp, Artificial Sequence
  Synthetic Polynucloetide
atggccttaccagtgaccgccttgctcctgccgctggccttgctgctccacgccgccaggccggaggttcagctgcttgagtctggcggaggactggttcaacctggcggaagcctgagactgtcttgtgccgccagcggcttcacctttagcagctacgccatgagctgggtccgacaggctcctggcaaaggactggaatgggtgtccagcatcagcggcagcggcgactacatctactacgccgatagcgtgaagggcagattcaccatcagccgggacatcagcaagaacaccctgtacctccagatgaacagcctgagagccgaggacaccgccgtgtactactgtgccaaagaaggcaccggcgctaacagcagcctggccgattatagaggccagggcacactggtcaccgtgtctagtacgcgtggaggcagtggtgtcttcacactcgaagatttcgttggggactggcgacagacagccggctacaacctggaccaagtccttgaacagggaggtgtgtccagtttgtttcagaatctcggggtgtccgtaactccgatccaaaggattgtcctgagcggtgaaaatgggctgaagatcgacatccatgtcatcatcccgtatgaaggtctgagcggcgaccaaatgggccagatcgaaaaaatttttaaggtggtgtaccctgtggatgatcatcactttaaggtgatcctgcactatggcacactggtaatcgacggggttacgccgaacatgatcgactatttcggacggccgtatgaaggcatcgccgtgttcgacggcaaaaagatcactgtaacagggaccctgtggaacggcaacaaaattatcgacgagcgcctgatcaaccccgacggctccctgctgttccgagtaaccatcaacggagtgaccggctggcggctgtgcgaacgcattctggcgctcgagggaggcagctggagccaccctcagtttgaaaaagactacaaagacgatgacgataagggatcagattacaaggatgatgatgacaaggggtcagattataaagacgacgatgataaagggagcgactacaaggacgacgatgacaaggcctggtcccatccccagttcgagaaacaccatcaccaccaccatcatcacactagtggctccggcgagggcagaggaagtctactaacctgcggagatgtggaagaaaatcctggcccacatatgaccgagtacaagcccacggtgcgcctcgccacccgcgacgacgtccccagggccgtacgcaccctcgccgccgcgttcgccgactaccccgccacgcgccacaccgtcgatccggaccgccacatcgagcgggtcaccgagctgcaagaactcttcctcacgcgcgtcgggctcgacatcggcaaggtgtgggtcgcggacgacggcgccgcggtggcggtctggaccacgccggagagcgtcgaagcgggggcggtgttcgccgagatcggcccgcgcatggccgagttgagcggttcccggctggccgcgcagcaacagatggaaggcctcctggcgccgcaccggcccaaggagcccgcgtggttcctggccaccgtcggcgtctcgcccgaccaccagggcaagggtctgggcagcgccgtcgtgctccccggagtggaggcggccgagcgcgccggggtgcccgccttcctggagacctccgcgccccgcaacctccccttctacgagcggctcggcttcaccgtcaccgccgacgtcgaggtgcccgaaggaccgcgcacctggtgcatgacccgcaagcccggtgcctga

SEQ ID NO: 1277 - DNA, 1821 bp, Artificial Sequence
  Synthetic Polynucloetide
atggccttaccagtgaccgccttgctcctgccgctggccttgctgctccacgccgccaggccgcaggtgcagctggttgaatctggcggaggactggttcagcctggcggatctctgagactgtcttgtgccgccagcggcttcaccttcaccaatcacgccatgagctgggtccgacaggcccctggaaaaggactggaactggtgtctagcatcagcggcaacggcagaaccacctactacgccgatagcgtgaagggcagattcaccatcagccgggacatcagcaagaacaccctggacctccagatgaacagcctgagagccgaggataccgccgtgtactactgtgccaaggatggcggagagacactggtggatagcagaggccagggcacactggtcacagtgtcatctacgcgtggaggcagtggtgtcttcacactcgaagatttcgttggggactggcgacagacagccggctacaacctggaccaagtccttgaacagggaggtgtgtccagtttgtttcagaatctcggggtgtccgtaactccgatccaaaggattgtcctgagcggtgaaaatgggctgaagatcgacatccatgtcatcatcccgtatgaaggtctgagcggcgaccaaatgggccagatcgaaaaaatttttaaggtggtgtaccctgtggatgatcatcactttaaggtgatcctgcactatggcacactggtaatcgacggggttacgccgaacatgatcgactatttcggacggccgtatgaaggcatcgccgtgttcgacggcaaaaagatcactgtaacagggaccctgtggaacggcaacaaaattatcgacgagcgcctgatcaaccccgacggctccctgctgttccgagtaaccatcaacggagtgaccggctggcggctgtgcgaacgcattctggcgctcgagggaggcagctggagccaccctcagtttgaaaaagactacaaagacgatgacgataagggatcagattacaaggatgatgatgacaaggggtcagattataaagacgacgatgataaagggagcgactacaaggacgacgatgacaaggcctggtcccatccccagttcgagaaacaccatcaccaccaccatcatcacactagtggctccggcgagggcagaggaagtctactaacctgcggagatgtggaagaaaatcctggcccacatatgaccgagtacaagcccacggtgcgcctcgccacccgcgacgacgtccccagggccgtacgcaccctcgccgccgcgttcgccgactaccccgccacgcgccacaccgtcgatccggaccgccacatcgagcgggtcaccgagctgcaagaactcttcctcacgcgcgtcgggctcgacatcggcaaggtgtgggtcgcggacgacggcgccgcggtggcggtctggaccacgccggagagcgtcgaagcgggggcggtgttcgccgagatcggcccgcgcatggccgagttgagcggttcccggctggccgcgcagcaacagatggaaggcctcctggcgccgcaccggcccaaggagcccgcgtggttcctggccaccgtcggcgtctcgcccgaccaccagggcaagggtctgggcagcgccgtcgtgctccccggagtggaggcggccgagcgcgccggggtgcccgccttcctggagacctccgcgccccgcaacctccccttctacgagcggctcggcttcaccgtcaccgccgacgtcgaggtgcccgaaggaccgcgcacctggtgcatgacccgcaagcccggtgcctga

SEQ ID NO: 1278 - DNA, 2205 bp, Artificial Sequence
  Synthetic Polynucloetide
atggccttaccagtgaccgccttgctcctgccgctggccttgctgctccacgccgccaggccgcagctccagctgcaagagtctggacctggcctggtcaagcctagcgagacactgagcctgacctgtaccgtgtccggcgatagcatcagcagcggcgattactactggggctggatcagacagcctcctggcaaaggactggaatggatcggccacatctactacagcggcgtgacctactacaaccccagcctgaagtccagagtgaccatcagcgtggacaccagccggaaccagttctccctgaagctgtctagcgtgacagccgccgataccgccgtgtactactgcaccagagaggacagcagcaactggcggagtagaggccagggaacactggtcacagttagctctctcgagagcggcggaggcggatctttcgaagtgcagctgcttgaaagtggcggcggactgattcagcctggcggatctctgagactgagctgtgccgccagcggcttcaccttttctagccacgccatgacctgggtccgacaggcacctggaaaagggcttgaatgggtgtccgccatcagcggctctggcgattacacacactacgccgacagcgtgaagggcagattcaccatcagcagagacaacagcaagaacaccgtgtacctccagatgaacagcctgagagccgaggacagcgccgtgtattattgcgccaaggatgaggatggcggcagcctgcttggacacagaggacaaggcaccctggtcaccgtttcttccacgcgtggaggcagtggtgtcttcacactcgaagatttcgttggggactggcgacagacagccggctacaacctggaccaagtccttgaacagggaggtgtgtccagtttgtttcagaatctcggggtgtccgtaactccgatccaaaggattgtcctgagcggtgaaaatgggctgaagatcgacatccatgtcatcatcccgtatgaaggtctgagcggcgaccaaatgggccagatcgaaaaaatttttaaggtggtgtaccctgtggatgatcatcactttaaggtgatcctgcactatggcacactggtaatcgacggggttacgccgaacatgatcgactatttcggacggccgtatgaaggcatcgccgtgttcgacggcaaaaagatcactgtaacagggaccctgtggaacggcaacaaaattatcgacgagcgcctgatcaaccccgacggctccctgctgttccgagtaaccatcaacggagtgaccggctggcggctgtgcgaacgcattctggcgctcgagggaggcagctggagccaccctcagtttgaaaaagactacaaagacgatgacgataagggatcagattacaaggatgatgatgacaaggggtcagattataaagacgacgatgataaagggagcgactacaaggacgacgatgacaaggcctggtcccatccccagttcgagaaacaccatcaccaccaccatcatcacactagtggctccggcgagggcagaggaagtctactaacctgcggagatgtggaagaaaatcctggcccacatatgaccgagtacaagcccacggtgcgcctcgccacccgcgacgacgtccccagggccgtacgcaccctcgccgccgcgttcgccgactaccccgccacgcgccacaccgtcgatccggaccgccacatcgagcgggtcaccgagctgcaagaactcttcctcacgcgcgtcgggctcgacatcggcaaggtgtgggtcgcggacgacggcgccgcggtggcggtctggaccacgccggagagcgtcgaagcgggggcggtgttcgccgagatcggcccgcgcatggccgagttgagcggttcccggctggccgcgcagcaacagatggaaggcctcctggcgccgcaccggcccaaggagcccgcgtggttcctggccaccgtcggcgtctcgcccgaccaccagggcaagggtctgggcagcgccgtcgtgctccccggagtggaggcggccgagcgcgccggggtgcccgccttcctggagacctccgcgccccgcaacctccccttctacgagcggctcggcttcaccgtcaccgccgacgtcgaggtgcccgaaggaccgcgcacctggtgcatgacccgcaagcccggtgcctga

SEQ ID NO: 1279 - skipped

SEQ ID NO: 1280 - DNA, 2025 bp, Artificial Sequence
  Synthetic Polynucloetide
atgccctcctgggccctcttcatggtcacctcctgcctcctcctggcccctcaaaacctggcccaagtcagcagccaagatgtctccttgctggcatcagactcagagcccctgaagtgtttctcccgaacatttgaggacctcacttgcttctgggatgaggaagaggcagcgcccagtgggacataccagctgctgtatgcctacccgcgggagaagccccgtgcttgccccctgagttcccagagcatgccccactttggaacccgatacgtgtgccagtttccagaccaggaggaagtgcgtctcttctttccgctgcacctctgggtgaagaatgtgttcctaaaccagactcggactcagcgagtcctctttgtggacagtgtaggcctgccggctccccccagtatcatcaaggccatgggtgggagccagccaggggaacttcagatcagctgggaggagccagctccagaaatcagtgatttcctgaggtacgaactccgctatggccccagagatcccaagaactccactggtcccacggtcatacagctgattgccacagaaacctgctgccctgctctgcagaggcctcactcagcctctgctctggaccagtctccatgtgctcagcccacaatgccctggcaagatggaccaaagcagacctccccaagtagagaagcttcagctctgacagcagagggtggaagctgcctcatctcaggactccagcctggcaactcctactggctgcagctgcgcagcgaacctgatgggatctccctcggtggctcctggggatcctggtccctccctgtgactgtggacctgcctggagatgcagtggcacttggactgcaatgctttaccttggacctgaagaatgttacctgtcaatggcagcaacaggaccatgctagctcccaaggcttcttctaccacagcagggcacggtgctgccccagagacaggtaccccatctgggagaactgcgaagaggaagagaaaacaaatccaggactacagaccccacagttctctcgctgccacttcaagtcacgaaatgacagcattattcacatccttgtggaggtgaccacagccccgggtactgttcacagctacctgggctcccctttctggatccaccaggctgtgcgcctccccaccccaaacttgcactggagggagatctccagtgggcatctggaattggagtggcagcacccatcgtcctgggcagcccaagagacctgttatcaactccgatacacaggagaaggccatcaggactggaaggtgctggagccgcctctcggggcccgaggagggaccctggagctgcgcccgcgatctcgctaccgtttacagctgcgcgccaggctcaacggccccacctaccaaggtccctggagctcgtggtcggacccaactagggtggagaccgccaccgagaccgccacgcgtggaggcagtggtgtcttcacactcgaagatttcgttggggactggcgacagacagccggctacaacctggaccaagtccttgaacagggaggtgtgtccagtttgtttcagaatctcggggtgtccgtaactccgatccaaaggattgtcctgagcggtgaaaatgggctgaagatcgacatccatgtcatcatcccgtatgaaggtctgagcggcgaccaaatgggccagatcgaaaaaatttttaaggtggtgtaccctgtggatgatcatcactttaaggtgatcctgcactatggcacactggtaatcgacggggttacgccgaacatgatcgactatttcggacggccgtatgaaggcatcgccgtgttcgacggcaaaaagatcactgtaacagggaccctgtggaacggcaacaaaattatcgacgagcgcctgatcaaccccgacggctccctgctgttccgagtaaccatcaacggagtgaccggctggcggctgtgcgaacgcattctggcgagttggaaggatgcctctggatggtcc

SEQ ID NO: 1281 - DNA, 1449 bp, Artificial Sequence
  Synthetic Polynucloetide
atgccacctcctcgcctcctcttcttcctcctcttcctcacccccatggaagtcaggcccgactacaaggacgacgatgacaaggaggaacctctagtggtgaaggtggaagagggagataacgctgtgctgcagtgcctcaaggggacctcagatggccccactcagcagctgacctggtctcgggagtccccgcttaaacccttcttaaaactcagcctggggctgccaggcctgggaatccacatgaggcccctggccatctggcttttcatcttcaacgtctctcaacagatggggggcttctacctgtgccagccggggcccccctctgagaaggcctggcagcctggctggacagtcaatgtggagggcagcggggagctgttccggtggaatgtttcggacctaggtggcctgggctgtggcctgaagaacaggtcctcagagggccccagctccccttccgggaagctcatgagccccaagctgtatgtgtgggccaaagaccgccctgaaatctgggagggagagcctccgtgtctcccaccgagggacagcctgaaccagagcctcagccaggacctcaccatggcccctggctccacactctggctgtcctgtggggtaccccctgactctgtgtccaggggccccctctcctggacccatgtgcaccccaaggggcctaagtcattgctgagcctagagctgaaggacgatcgcccggccagagatatgtgggtaatggagacgggtctgttgttgccccgggccacagctcaagacgctggaaagtattattgtcaccgtggcaacctgaccatgtcattccacctcgagatcactgctcggccagtactatggcactggctgctgaggactggtggctggacgcgtggaggcagtggtgtcttcacactcgaagatttcgttggggactggcgacagacagccggctacaacctggaccaagtccttgaacagggaggtgtgtccagtttgtttcagaatctcggggtgtccgtaactccgatccaaaggattgtcctgagcggtgaaaatgggctgaagatcgacatccatgtcatcatcccgtatgaaggtctgagcggcgaccaaatgggccagatcgaaaaaatttttaaggtggtgtaccctgtggatgatcatcactttaaggtgatcctgcactatggcacactggtaatcgacggggttacgccgaacatgatcgactatttcggacggccgtatgaaggcatcgccgtgttcgacggcaaaaagatcactgtaacagggaccctgtggaacggcaacaaaattatcgacgagcgcctgatcaaccccgacggctccctgctgttccgagtaaccatcaacggagtgaccggctggcggctgtgcgaacgcattctggcgagttggaaggatgcctctggatggtcc

SEQ ID NO: 1282 - DNA, 2298 bp, Artificial Sequence
  Synthetic Polynucloetide
atgccacctcctcgcctcctcttcttcctcctcttcctcacccccatggaagtcaggcccgactacaaggacgacgatgacaaggaggaacctctagtggtgaaggtggaagagggagataacgctgtgctgcagtgcctcaaggggacctcagatggccccactcagcagctgacctggtctcgggagtccccgcttaaacccttcttaaaactcagcctggggctgccaggcctgggaatccacatgaggcccctggccatctggcttttcatcttcaacgtctctcaacagatggggggcttctacctgtgccagccggggcccccctctgagaaggcctggcagcctggctggacagtcaatgtggagggcagcggggagctgttccggtggaatgtttcggacctaggtggcctgggctgtggcctgaagaacaggtcctcagagggccccagctccccttccgggaagctcatgagccccaagctgtatgtgtgggccaaagaccgccctgaaatctgggagggagagcctccgtgtctcccaccgagggacagcctgaaccagagcctcagccaggacctcaccatggcccctggctccacactctggctgtcctgtggggtaccccctgactctgtgtccaggggccccctctcctggacccatgtgcaccccaaggggcctaagtcattgctgagcctagagctgaaggacgatcgcccggccagagatatgtgggtaatggagacgggtctgttgttgccccgggccacagctcaagacgctggaaagtattattgtcaccgtggcaacctgaccatgtcattccacctcgagatcactgctcggccagtactatggcactggctgctgaggactggtggctggacgcgtggaggcagtggtgtcttcacactcgaagatttcgttggggactggcgacagacagccggctacaacctggaccaagtccttgaacagggaggtgtgtccagtttgtttcagaatctcggggtgtccgtaactccgatccaaaggattgtcctgagcggtgaaaatgggctgaagatcgacatccatgtcatcatcccgtatgaaggtctgagcggcgaccaaatgggccagatcgaaaaaatttttaaggtggtgtaccctgtggatgatcatcactttaaggtgatcctgcactatggcacactggtaatcgacggggttacgccgaacatgatcgactatttcggacggccgtatgaaggcatcgccgtgttcgacggcaaaaagatcactgtaacagggaccctgtggaacggcaacaaaattatcgacgagcgcctgatcaaccccgacggctccctgctgttccgagtaaccatcaacggagtgaccggctggcggctgtgcgaacgcattctggcgctcgagggaggcagctggagccaccctcagtttgaaaaagactacaaagacgatgacgataagggatcagattacaaggatgatgatgacaaggggtcagattataaagacgacgatgataaagggagcgactacaaggacgacgatgacaaggcctggtcccatccccagttcgagaaacaccatcaccaccaccatcatcacactagtggctccggcgagggcagaggaagtctactaacctgcggagatgtggaagaaaatcctggcccacatatgaccgagtacaagcccacggtgcgcctcgccacccgcgacgacgtccccagggccgtacgcaccctcgccgccgcgttcgccgactaccccgccacgcgccacaccgtcgatccggaccgccacatcgagcgggtcaccgagctgcaagaactcttcctcacgcgcgtcgggctcgacatcggcaaggtgtgggtcgcggacgacggcgccgcggtggcggtctggaccacgccggagagcgtcgaagcgggggcggtgttcgccgagatcggcccgcgcatggccgagttgagcggttcccggctggccgcgcagcaacagatggaaggcctcctggcgccgcaccggcccaaggagcccgcgtggttcctggccaccgtcggcgtctcgcccgaccaccagggcaagggtctgggcagcgccgtcgtgctccccggagtggaggcggccgagcgcgccggggtgcccgccttcctggagacctccgcgccccgcaacctccccttctacgagcggctcggcttcaccgtcaccgccgacgtcgaggtgcccgaaggaccgcgcacctggtgcatgacccgcaagcccggtgcctga

SEQ ID NO: 1283 - DNA, 2160 bp, Artificial Sequence
  Synthetic Polynucloetide
atgccgctgctgctactgctgcccctgctgtgggcaggggccctggctatggatccaaatttctggctgcaagtgcaggagtcagtgacggtacaggagggtttgtgcgtcctcgtgccctgcactttcttccatcccataccctactacgacaagaactccccagttcatggttactggttccgggaaggagccattatatccggggactctccagtggccacaaacaagctagatcaagaagtacaggaggagactcagggcagattccgcctccttggggatcccagtaggaacaactgctccctgagcatcgtagacgccaggaggagggataatggttcatacttctttcggatggagagaggaagtaccaaatacagttacaaatctccccagctctctgtgcatgtgacagacttgacccacaggcccaaaatcctcatccctggcactctagaacccggccactccaaaaacctgacctgctctgtgtcctgggcctgtgagcagggaacacccccgatcttctcctggttgtcagctgcccccacctccctgggccccaggactactcactcctcggtgctcataatcaccccacggccccaggaccacggcaccaacctgacctgtcaggtgaagttcgctggagctggtgtgactacggagagaaccatccagctcaacgtcacctatgttccacagaacccaacaactggtatctttccaggagatggctcagggaaacaagagacgcgtggaggcagtggtgtcttcacactcgaagatttcgttggggactggcgacagacagccggctacaacctggaccaagtccttgaacagggaggtgtgtccagtttgtttcagaatctcggggtgtccgtaactccgatccaaaggattgtcctgagcggtgaaaatgggctgaagatcgacatccatgtcatcatcccgtatgaaggtctgagcggcgaccaaatgggccagatcgaaaaaatttttaaggtggtgtaccctgtggatgatcatcactttaaggtgatcctgcactatggcacactggtaatcgacggggttacgccgaacatgatcgactatttcggacggccgtatgaaggcatcgccgtgttcgacggcaaaaagatcactgtaacagggaccctgtggaacggcaacaaaattatcgacgagcgcctgatcaaccccgacggctccctgctgttccgagtaaccatcaacggagtgaccggctggcggctgtgcgaacgcattctggcgctcgagggaggcagctggagccaccctcagtttgaaaaagactacaaagacgatgacgataagggatcagattacaaggatgatgatgacaaggggtcagattataaagacgacgatgataaagggagcgactacaaggacgacgatgacaaggcctggtcccatccccagttcgagaaacaccatcaccaccaccatcatcacactagtggctccggcgagggcagaggaagtctactaacctgcggagatgtggaagaaaatcctggcccacatatgaccgagtacaagcccacggtgcgcctcgccacccgcgacgacgtccccagggccgtacgcaccctcgccgccgcgttcgccgactaccccgccacgcgccacaccgtcgatccggaccgccacatcgagcgggtcaccgagctgcaagaactcttcctcacgcgcgtcgggctcgacatcggcaaggtgtgggtcgcggacgacggcgccgcggtggcggtctggaccacgccggagagcgtcgaagcgggggcggtgttcgccgagatcggcccgcgcatggccgagttgagcggttcccggctggccgcgcagcaacagatggaaggcctcctggcgccgcaccggcccaaggagcccgcgtggttcctggccaccgtcggcgtctcgcccgaccaccagggcaagggtctgggcagcgccgtcgtgctccccggagtggaggcggccgagcgcgccggggtgcccgccttcctggagacctccgcgccccgcaacctccccttctacgagcggctcggcttcaccgtcaccgccgacgtcgaggtgcccgaaggaccgcgcacctggtgcatgacccgcaagcccggtgcctga

SEQ ID NO: 1284 - DNA, 2088 bp, Artificial Sequence
  Synthetic Polynucloetide
atgccgctgctgctactgctgcccctgctgtgggcaggggccctggctatggatccaaatttctggctgcaagtgcaggagtcagtgacggtacaggagggtttgtgcgtcctcgtgccctgcactttcttccatcccataccctactacgacaagaactccccagttcatggttactggttccgggaaggagccattatatccggggactctccagtggccacaaacaagctagatcaagaagtacaggaggagactcagggcagattccgcctccttggggatcccagtaggaacaactgctccctgagcatcgtagacgccaggaggagggataatggttcatacttctttcggatggagagaggaagtaccaaatacagttacaaatctccccagctctctgtgcatgtgacagacttgacccacaggcccaaaatcctcatccctggcactctagaacccggccactccaaaaacctgacctgctctgtgtcctgggcctgtgagcagggaacacccccgatcttctcctggttgtcagctgcccccacctccctgggccccaggactactcactcctcggtgctcataatcaccccacggccccaggaccacggcaccaacctgacctgtcaggtgaagttcgctggagctggtgtgactacggagagaaccatccagctcaacgtcacctatgttccacagaacccaacaactggtatctttccaggagatggctcagggaaacaagagacgcgtggaggcagtgaagccgaggccgagagaggcaagctgcccggcaaaaagctgcccctggaagtgctgatcgagctggaagccaacgccagaaaggccggctgcaccagaggctgcctgatctgcctgagcaagatcaagtgcaccgccaagatgaagaagtacatccccggcagatgcgccgactacggcggcgataagaaaacaggccaggccggcatcgtgggagccatcgtggatatccctgagatcagcggcttcaaagaaatggaacccatggaacagtttatcgcccaggtggaccgctgcgccgattgcacaacaggctgtctgaagggcctggctaacgtgaagtgcagcgacctgctgaagaagtggctgcctggcagatgtgccaccttcgccgacaagatccagagcgaggtggacaacatcaagggactggccggcgacctcgagggaggcagctggagccaccctcagtttgaaaaagactacaaagacgatgacgataagggatcagattacaaggatgatgatgacaaggggtcagattataaagacgacgatgataaagggagcgactacaaggacgacgatgacaaggcctggtcccatccccagttcgagaaacaccatcaccaccaccatcatcacactagtggctccggcgagggcagaggaagtctactaacctgcggagatgtggaagaaaatcctggcccacatatgaccgagtacaagcccacggtgcgcctcgccacccgcgacgacgtccccagggccgtacgcaccctcgccgccgcgttcgccgactaccccgccacgcgccacaccgtcgatccggaccgccacatcgagcgggtcaccgagctgcaagaactcttcctcacgcgcgtcgggctcgacatcggcaaggtgtgggtcgcggacgacggcgccgcggtggcggtctggaccacgccggagagcgtcgaagcgggggcggtgttcgccgagatcggcccgcgcatggccgagttgagcggttcccggctggccgcgcagcaacagatggaaggcctcctggcgccgcaccggcccaaggagcccgcgtggttcctggccaccgtcggcgtctcgcccgaccaccagggcaagggtctgggcagcgccgtcgtgctccccggagtggaggcggccgagcgcgccggggtgcccgccttcctggagacctccgcgccccgcaacctccccttctacgagcggctcggcttcaccgtcaccgccgacgtcgaggtgcccgaaggaccgcgcacctggtgcatgacccgcaagcccggtgcctga

SEQ ID NO: 1285 - DNA, 2190 bp, Artificial Sequence
  Synthetic Polynucloetide
atgccgctgctgctactgctgcccctgctgtgggcaggggccctggctatggatccaaatttctggctgcaagtgcaggagtcagtgacggtacaggagggtttgtgcgtcctcgtgccctgcactttcttccatcccataccctactacgacaagaactccccagttcatggttactggttccgggaaggagccattatatccggggactctccagtggccacaaacaagctagatcaagaagtacaggaggagactcagggcagattccgcctccttggggatcccagtaggaacaactgctccctgagcatcgtagacgccaggaggagggataatggttcatacttctttcggatggagagaggaagtaccaaatacagttacaaatctccccagctctctgtgcatgtgacagacttgacccacaggcccaaaatcctcatccctggcactctagaacccggccactccaaaaacctgacctgctctgtgtcctgggcctgtgagcagggaacacccccgatcttctcctggttgtcagctgcccccacctccctgggccccaggactactcactcctcggtgctcataatcaccccacggccccaggaccacggcaccaacctgacctgtcaggtgaagttcgctggagctggtgtgactacggagagaaccatccagctcaacgtcacctatgttccacagaacccaacaactggtatctttccaggagatggctcagggaaacaagagacgcgtggaggcagtcagcccaccgagaacaagcaggaaagccagatcgaggacatcgacagaagcaccagcctgggcctgatgtgctacgagcagtgtacaggccagagcggcctggatctgaagtgctacaaagagtgcgccgacttcaccggcgaccggaacagaggcagaaagctgcccggcaagaaactgcccctggaagtgctgaagatcatggaagccaacgccagaagggccggctgcaccagaggctgcctgatctgcctgagcaagatcaagtgcaccgccaagatgaagcagtacatccccggcagatgccacacctacgagggcgacaagtctatcggccagggcggcatcggaggccccatcgtggatatccctgagatcatcggcttccagaacatggaacctatggaacagtttatcgcccaggtggacctgtgcgccgattgcacaaccggctgtctgaagggcctggctaacgtgcggtgcaacgacctgctgaagaagtggctgcccgacagatgcgccggcttcgccaacaagatccagagcgaggtggacaacatcaagggactggccggcgacagactcgagtacccctacgatgtgcccgattacgcttggagccaccctcagtttgaaaaatacccctatgacgtgccggactacgctggctatccttacgacgtcccagactacgcaggctacccctacgacgtcccagattaccaccatcaccaccaccatcatcacactagtggctccggcgagggcagaggaagtctactaacctgcggagatgtggaagaaaatcctggcccacatatgaccgagtacaagcccacggtgcgcctcgccacccgcgacgacgtccccagggccgtacgcaccctcgccgccgcgttcgccgactaccccgccacgcgccacaccgtcgatccggaccgccacatcgagcgggtcaccgagctgcaagaactcttcctcacgcgcgtcgggctcgacatcggcaaggtgtgggtcgcggacgacggcgccgcggtggcggtctggaccacgccggagagcgtcgaagcgggggcggtgttcgccgagatcggcccgcgcatggccgagttgagcggttcccggctggccgcgcagcaacagatggaaggcctcctggcgccgcaccggcccaaggagcccgcgtggttcctggccaccgtcggcgtctcgcccgaccaccagggcaagggtctgggcagcgccgtcgtgctccccggagtggaggcggccgagcgcgccggggtgcccgccttcctggagacctccgcgccccgcaacctccccttctacgagcggctcggcttcaccgtcaccgccgacgtcgaggtgcccgaaggaccgcgcacctggtgcatgacccgcaagcccggtgcctga

SEQ ID NO: 1286 - DNA, 1386 bp, Artificial Sequence
  Synthetic Polynucloetide
atgccgctgctgctactgctgcccctgctgtgggcaggggccctggctatggatccaaatttctggctgcaagtgcaggagtcagtgacggtacaggagggtttgtgcgtcctcgtgccctgcactttcttccatcccataccctactacgacaagaactccccagttcatggttactggttccgggaaggagccattatatccggggactctccagtggccacaaacaagctagatcaagaagtacaggaggagactcagggcagattccgcctccttggggatcccagtaggaacaactgctccctgagcatcgtagacgccaggaggagggataatggttcatacttctttcggatggagagaggaagtaccaaatacagttacaaatctccccagctctctgtgcatgtgacagacttgacccacaggcccaaaatcctcatccctggcactctagaacccggccactccaaaaacctgacctgctctgtgtcctgggcctgtgagcagggaacacccccgatcttctcctggttgtcagctgcccccacctccctgggccccaggactactcactcctcggtgctcataatcaccccacggccccaggaccacggcaccaacctgacctgtcaggtgaagttcgctggagctggtgtgactacggagagaaccatccagctcaacgtcacctatgttccacagaacccaacaactggtatctttccaggagatggctcagggaaacaagagacgcgtggaggcagtgccgcctctgaagaggccgatgacgatcacgtgtccctcgtgaagaactactggcggatcggcgtgggcaacgagcgggatgtgtctctggatagaggcggccctcccaagctgagcaaagaactgctggccgagatgcacgccattgccagcaatgccggctgctccagagtgtgcctgatcggcctgagcaagatcaagtgcacccccaagatgaagaccttcctgcccggcagatgcaacaccttcgcccctaaacctgccaccggcgacggaccttttgccgccgctgctgccatccctggcttcagcgatctgaccgctatggaacagtacaaggcccaggtggcccagtgcgactgctccaacagatgcctcgtgggcctggctaacatcaagtgttctgccgccctgaaggccgccctgcctcagagatgtaccacctttgccaccaacatccagaaagagggcgaggtggacagcatcaagggctacggcagaaagctcgagaccgatttctacgactacaaggacgacgatgacaaggattataaagatgatgacgataaagtcgagaccgatttctacgactacaaggacgacgatgacaagtag

SEQ ID NO: 1287 - DNA, 2127 bp, Artificial Sequence
  Synthetic Polynucloetide
atgaggcgcgcggcgctctggctctggctgtgcgcgctggcgctgagcctgcagccggccctgccgcaaattgtggctactaatttgccccctgaagatcaagatggctctggggatgactctgacaacttctccggctcaggtgcaggtgctttgcaagatatcaccttgtcacagcagaccccctccacttggaaggacacgcagctcctgacggctattcccacgtctccagaacccaccggcctggaggctacagctgcctccacctccaccctgccggctggagaggggcccaaggagggagaggctgtagtcctgccagaagtggagcctggcctcaccgcccgggagcaggaggccaccccccgacccagggagaccacacagctcccgaccactcatcaggcctcaacgaccacagccaccacggcccaggagcccgccacctcccacccccacagggacatgcagcctggccaccatgagacctcaacccctgcaggacccagccaagctgaccttcacactccccacacagaggatggaggtccttctgccaccgagagggctgctgaggatggagcctccagtcagctcccagcagcagagggctctggggagcaggacttcacctttgaaacctcgggggagaatacggctgtagtggccgtggagcctgaccgccggaaccagtccccagtggatcagggggccacggggacgcgtggaggcagtggtgtcttcacactcgaagatttcgttggggactggcgacagacagccggctacaacctggaccaagtccttgaacagggaggtgtgtccagtttgtttcagaatctcggggtgtccgtaactccgatccaaaggattgtcctgagcggtgaaaatgggctgaagatcgacatccatgtcatcatcccgtatgaaggtctgagcggcgaccaaatgggccagatcgaaaaaatttttaaggtggtgtaccctgtggatgatcatcactttaaggtgatcctgcactatggcacactggtaatcgacggggttacgccgaacatgatcgactatttcggacggccgtatgaaggcatcgccgtgttcgacggcaaaaagatcactgtaacagggaccctgtggaacggcaacaaaattatcgacgagcgcctgatcaaccccgacggctccctgctgttccgagtaaccatcaacggagtgaccggctggcggctgtgcgaacgcattctggcgctcgagggaggcagctggagccaccctcagtttgaaaaagactacaaagacgatgacgataagggatcagattacaaggatgatgatgacaaggggtcagattataaagacgacgatgataaagggagcgactacaaggacgacgatgacaaggcctggtcccatccccagttcgagaaacaccatcaccaccaccatcatcacactagtggctccggcgagggcagaggaagtctactaacctgcggagatgtggaagaaaatcctggcccacatatgaccgagtacaagcccacggtgcgcctcgccacccgcgacgacgtccccagggccgtacgcaccctcgccgccgcgttcgccgactaccccgccacgcgccacaccgtcgatccggaccgccacatcgagcgggtcaccgagctgcaagaactcttcctcacgcgcgtcgggctcgacatcggcaaggtgtgggtcgcggacgacggcgccgcggtggcggtctggaccacgccggagagcgtcgaagcgggggcggtgttcgccgagatcggcccgcgcatggccgagttgagcggttcccggctggccgcgcagcaacagatggaaggcctcctggcgccgcaccggcccaaggagcccgcgtggttcctggccaccgtcggcgtctcgcccgaccaccagggcaagggtctgggcagcgccgtcgtgctccccggagtggaggcggccgagcgcgccggggtgcccgccttcctggagacctccgcgccccgcaacctccccttctacgagcggctcggcttcaccgtcaccgccgacgtcgaggtgcccgaaggaccgcgcacctggtgcatgacccgcaagcccggtgcctga

SEQ ID NO: 1288 - DNA, 2304 bp, Artificial Sequence
  Synthetic Polynucloetide
atggtgctgctgtggctgaccctgctgctgatcgccctgccttgtctgctgcagaccaaagaggaccccaacccccccatcaccaacctgcggatgaaggccaaagcccagcaactgacctgggacctgaaccggaacgtgaccgacatcgagtgcgtgaaggacgccgactactccatgcccgccgtgaacaacagctactgccagttcggagccatcagcctgtgcgaagtgaccaactacaccgtgcgggtggcaaacccccccttctccacctggattctgttccccgagaacagcggcaagccctgggctggcgctgagaatctgacctgctggattcacgacgtggactttctgagctgctcctgggctgtgggacctggcgctcctgccgatgtgcagtacgacctgtacctgaatgtggctaaccggcggcagcagtacgagtgcctgcactacaagaccgacgcccagggcaccagaatcggctgcagattcgacgacatcagcagactgagcagcggcagccagtccagccacatccttgtgcggggaagaagcgccgccttcggcatcccttgcaccgacaagttcgtggtgttcagccagatcgagatcctgaccccccccaacatgaccgccaagtgcaacaagacccacagcttcatgcactggaagatgcggagccacttcaaccggaagttcagatacgagctgcagatccagaaacggatgcagcccgtgattaccgaacaagtgcgggaccggaccagcttccaactgctgaaccctggcacctacacagtgcagatccgggccagagaacgggtgtacgagttcctgagcgcctggtccaccccccagagattcgagtgcgatcaggaagagggggccaacacgcgtggaggcagtggtgtcttcacactcgaagatttcgttggggactggcgacagacagccggctacaacctggaccaagtccttgaacagggaggtgtgtccagtttgtttcagaatctcggggtgtccgtaactccgatccaaaggattgtcctgagcggtgaaaatgggctgaagatcgacatccatgtcatcatcccgtatgaaggtctgagcggcgaccaaatgggccagatcgaaaaaatttttaaggtggtgtaccctgtggatgatcatcactttaaggtgatcctgcactatggcacactggtaatcgacggggttacgccgaacatgatcgactatttcggacggccgtatgaaggcatcgccgtgttcgacggcaaaaagatcactgtaacagggaccctgtggaacggcaacaaaattatcgacgagcgcctgatcaaccccgacggctccctgctgttccgagtaaccatcaacggagtgaccggctggcggctgtgcgaacgcattctggcgctcgagggaggcagctggagccaccctcagtttgaaaaagactacaaagacgatgacgataagggatcagattacaaggatgatgatgacaaggggtcagattataaagacgacgatgataaagggagcgactacaaggacgacgatgacaaggcctggtcccatccccagttcgagaaacaccatcaccaccaccatcatcacactagtggctccggcgagggcagaggaagtctactaacctgcggagatgtggaagaaaatcctggcccacatatgaccgagtacaagcccacggtgcgcctcgccacccgcgacgacgtccccagggccgtacgcaccctcgccgccgcgttcgccgactaccccgccacgcgccacaccgtcgatccggaccgccacatcgagcgggtcaccgagctgcaagaactcttcctcacgcgcgtcgggctcgacatcggcaaggtgtgggtcgcggacgacggcgccgcggtggcggtctggaccacgccggagagcgtcgaagcgggggcggtgttcgccgagatcggcccgcgcatggccgagttgagcggttcccggctggccgcgcagcaacagatggaaggcctcctggcgccgcaccggcccaaggagcccgcgtggttcctggccaccgtcggcgtctcgcccgaccaccagggcaagggtctgggcagcgccgtcgtgctccccggagtggaggcggccgagcgcgccggggtgcccgccttcctggagacctccgcgccccgcaacctccccttctacgagcggctcggcttcaccgtcaccgccgacgtcgaggtgcccgaaggaccgcgcacctggtgcatgacccgcaagcccggtgcctga

SEQ ID NO: 1289 - DNA, 3531 bp, Artificial Sequence
  Synthetic Polynucloetide
atgggcccttggagccgcagcctctcggcgctgctgctgctgctgcaggtctcctcttggctctgccaggagccggagccctgccaccctggctttgacgccgagagctacacgttcacggtgccccggcgccacctggagagaggccgcgtcctgggcagagtgaattttgaagattgcaccggtcgacaaaggacagcctatttttccctcgacacccgattcaaagtgggcacagatggtgtgattacagtcaaaaggcctctacggtttcataacccacagatccatttcttggtctacgcctgggactccacctacagaaagttttccaccaaagtcacgctgaatacagtggggcaccaccaccgccccccgccccatcaggcctccgtttctggaatccaagcagaattgctcacatttcccaactcctctcctggcctcagaagacagaagagagactgggttattcctcccatcagctgcccagaaaatgaaaaaggcccatttcctaaaaacctggttcagatcaaatccaacaaagacaaagaaggcaaggttttctacagcatcactggccaaggagctgacacaccccctgttggtgtctttattattgaaagagaaacaggatggctgaaggtgacagagcctctggatagagaacgcattgccacatacactctcttctctcacgctgtgtcatccaacgggaatgcagttgaggatccaatggagattttgatcacggtaaccgatcagaatgacaacaagcccgaattcacccaggaggtctttaaggggtctgtcatggaaggtgctcttccaggaacctctgtgatggaggtcacagccacagacgcggacgatgatgtgaacacctacaatgccgccatcgcttacaccatcctcagccaagatcctgagctccctgacaaaaatatgttcaccattaacaggaacacaggagtcatcagtgtggtcaccactgggctggaccgagagagtttccctacgtataccctggtggttcaagctgctgaccttcaaggtgaggggttaagcacaacagcaacagctgtgatcacagtcactgacaccaacgataatcctccgatcttcaatcccaccacgtacaagggtcaggtgcctgagaacgaggctaacgtcgtaatcaccacactgaaagtgactgatgctgatgcccccaataccccagcgtgggaggctgtatacaccatattgaatgatgatggtggacaatttgtcgtcaccacaaatccagtgaacaacgatggcattttgaaaacagcaaagggcttggattttgaggccaagcagcagtacattctacacgtagcagtgacgaatgtggtaccttttgaggtctctctcaccacctccacagccaccgtcaccgtggatgtgctggatgtgaatgaagcccccatctttgtgcctcctgaaaagagagtggaagtgtccgaggactttggcgtgggccaggaaatcacatcctacactgcccaggagccagacacatttatggaacagaaaataacatatcggatttggagagacactgccaactggctggagattaatccggacactggtgccatttccactcgggctgagctggacagggaggattttgagcacgtgaagaacagcacgtacacagccctaatcatagctacagacaatggttctccagttgctactggaacagggacacttctgctgatcctgtctgatgtgaatgacaacgcccccataccagaacctcgaactatattcttctgtgagaggaatccaaagcctcaggtcataaacatcattgatgcagaccttcctcccaatacatctcccttcacagcagaactaacacacggggcgagtgccaactggaccattcagtacaacgacccaacccaagaatctatcattttgaagccaaagatggccttagaggtgggtgactacaaaatcaatctcaagctcatggataaccagaataaagaccaagtgaccaccttagaggtcagcgtgtgtgactgtgaaggggccgctggcgtctgtaggaaggcacagcctgtcgaagcaggattgcaaattcctgccacgcgtggaggcagtggtgtcttcacactcgaagatttcgttggggactggcgacagacagccggctacaacctggaccaagtccttgaacagggaggtgtgtccagtttgtttcagaatctcggggtgtccgtaactccgatccaaaggattgtcctgagcggtgaaaatgggctgaagatcgacatccatgtcatcatcccgtatgaaggtctgagcggcgaccaaatgggccagatcgaaaaaatttttaaggtggtgtaccctgtggatgatcatcactttaaggtgatcctgcactatggcacactggtaatcgacggggttacgccgaacatgatcgactatttcggacggccgtatgaaggcatcgccgtgttcgacggcaaaaagatcactgtaacagggaccctgtggaacggcaacaaaattatcgacgagcgcctgatcaaccccgacggctccctgctgttccgagtaaccatcaacggagtgaccggctggcggctgtgcgaacgcattctggcgctcgagggaggcagctggagccaccctcagtttgaaaaagactacaaagacgatgacgataagggatcagattacaaggatgatgatgacaaggggtcagattataaagacgacgatgataaagggagcgactacaaggacgacgatgacaaggcctggtcccatccccagttcgagaaacaccatcaccaccaccatcatcacactagtggctccggcgagggcagaggaagtctactaacctgcggagatgtggaagaaaatcctggcccacatatgaccgagtacaagcccacggtgcgcctcgccacccgcgacgacgtccccagggccgtacgcaccctcgccgccgcgttcgccgactaccccgccacgcgccacaccgtcgatccggaccgccacatcgagcgggtcaccgagctgcaagaactcttcctcacgcgcgtcgggctcgacatcggcaaggtgtgggtcgcggacgacggcgccgcggtggcggtctggaccacgccggagagcgtcgaagcgggggcggtgttcgccgagatcggcccgcgcatggccgagttgagcggttcccggctggccgcgcagcaacagatggaaggcctcctggcgccgcaccggcccaaggagcccgcgtggttcctggccaccgtcggcgtctcgcccgaccaccagggcaagggtctgggcagcgccgtcgtgctccccggagtggaggcggccgagcgcgccggggtgcccgccttcctggagacctccgcgccccgcaacctccccttctacgagcggctcggcttcaccgtcaccgccgacgtcgaggtgcccgaaggaccgcgcacctggtgcatgacccgcaagcccggtgcctga

SEQ ID NO: 1290 - DNA, 2121 bp, Artificial Sequence
  Synthetic Polynucloetide
atgtcagctccaagattactgatttccatcattatcatggtgtctgcttcaagtagttcatgcatgggtggaaagcagatgacacagaactattcaacaatttttgcagaaggtaacatttcacagcctgtactgatggatataaatgctgtgctttgttgccctcctatcgcattaagaaatttgatcataataacatgggaaataatcctgagaggccagccttcctgcacaaaagcctacaagaaagaaacaaatgagaccaaggaaaccaactgtactgttgagagaataacctgggtctctagacctgatcagaattcggaccttcagattcttccggtggacaccactcatgacgggtattacagaggcatagtggtaacacctgatgggaatttccatcgtggatatcacctccaagtgttagttacacccgaagtgaacctatttcaaagcaggaatataactgcagtatgcaaggcagttacagggaagccagctgcccagatctcctggatcccagagggatctattcttgccactaagcaagaatactggggcaatggcacagtgacggttaagagtacatgcccctgggagggccacaagtctactgtgacctgccatgtctcccatttgactggcaacaagagtctgtccgtaaagttgaattcaggtctcagaacctcaggatctccagcgttgtccttactgacgcgtggaggcagtggtgtcttcacactcgaagatttcgttggggactggcgacagacagccggctacaacctggaccaagtccttgaacagggaggtgtgtccagtttgtttcagaatctcggggtgtccgtaactccgatccaaaggattgtcctgagcggtgaaaatgggctgaagatcgacatccatgtcatcatcccgtatgaaggtctgagcggcgaccaaatgggccagatcgaaaaaatttttaaggtggtgtaccctgtggatgatcatcactttaaggtgatcctgcactatggcacactggtaatcgacggggttacgccgaacatgatcgactatttcggacggccgtatgaaggcatcgccgtgttcgacggcaaaaagatcactgtaacagggaccctgtggaacggcaacaaaattatcgacgagcgcctgatcaaccccgacggctccctgctgttccgagtaaccatcaacggagtgaccggctggcggctgtgcgaacgcattctggcgctcgagggaggcagctggagccaccctcagtttgaaaaagactacaaagacgatgacgataagggatcagattacaaggatgatgatgacaaggggtcagattataaagacgacgatgataaagggagcgactacaaggacgacgatgacaaggcctggtcccatccccagttcgagaaacaccatcaccaccaccatcatcacactagtggctccggcgagggcagaggaagtctactaacctgcggagatgtggaagaaaatcctggcccacatatgaccgagtacaagcccacggtgcgcctcgccacccgcgacgacgtccccagggccgtacgcaccctcgccgccgcgttcgccgactaccccgccacgcgccacaccgtcgatccggaccgccacatcgagcgggtcaccgagctgcaagaactcttcctcacgcgcgtcgggctcgacatcggcaaggtgtgggtcgcggacgacggcgccgcggtggcggtctggaccacgccggagagcgtcgaagcgggggcggtgttcgccgagatcggcccgcgcatggccgagttgagcggttcccggctggccgcgcagcaacagatggaaggcctcctggcgccgcaccggcccaaggagcccgcgtggttcctggccaccgtcggcgtctcgcccgaccaccagggcaagggtctgggcagcgccgtcgtgctccccggagtggaggcggccgagcgcgccggggtgcccgccttcctggagacctccgcgccccgcaacctccccttctacgagcggctcggcttcaccgtcaccgccgacgtcgaggtgcccgaaggaccgcgcacctggtgcatgacccgcaagcccggtgcctga

SEQ ID NO: 1291 - DNA, 2868 bp, Artificial Sequence
  Synthetic Polynucloetide
atggaatgtctctactatttcctgggatttctgctcctggctgcaagattgccacttgatgccgccaaacgatttcatgatgtgctgggcaatgaaagaccttctgcttacatgagggagcacaatcaattaaatggctggtcttctgatgaaaatgactggaatgaaaaactctacccagtgtggaagcggggagacatgaggtggaaaaactcctggaagggaggccgtgtgcaggcggtcctgaccagtgactcaccagccctcgtgggctcaaatataacatttgcggtgaacctgatattccctagatgccaaaaggaagatgccaatggcaacatagtctatgagaagaactgcagaaatgaggctggtttatctgctgatccgtatgtttacaactggacagcatggtcagaggacagtgacggggaaaatggcaccggccaaagccatcataacgtcttccctgatgggaaaccttttcctcaccaccccggatggagaagatggaatttcatctacgtcttccacacacttggtcagtatttccagaaattgggacgatgttcagtgagagtttctgtgaacacagccaatgtgacacttgggcctcaactcatggaagtgactgtctacagaagacatggacgggcatatgttcccatcgcacaagtgaaagatgtgtacgtggtaacagatcagattcctgtgtttgtgactatgttccagaagaacgatcgaaattcatccgacgaaaccttcctcaaagatctccccattatgtttgatgtcctgattcatgatcctagccacttcctcaattattctaccattaactacaagtggagcttcggggataatactggcctgtttgtttccaccaatcatactgtgaatcacacgtatgtgctcaatggaaccttcagccttaacctcactgtgaaagctgcagcaccaggaccttgtccgccaccgccaccaccacccagaccttcaaaacccaccccttctttaggacctgctggtgacaaccccctggagctgagtaggattcctgatgaaaactgccagattaacagatatggccactttcaagccaccatcacaattgtagagggaatcttagaggttaacatcatccagatgacagacgtcctgatgccggtgccatggcctgaaagctccctaatagactttgtcgtgacctgccaagggagcattcccacggaggtctgtaccatcatttctgaccccacctgcgagatcacccagaacacagtctgcagccctgtggatgtggatgagatgtgtctgctgactgtgagacgaaccttcaatgggtctgggacgtactgtgtgaacctcaccctgggggatgacacaagcctggctctcacgagcaccctgatttctgttcctgacagagacccagcctcgcctttaaggatggcaaacagcgccacgcgtggaggcagtggtgtcttcacactcgaagatttcgttggggactggcgacagacagccggctacaacctggaccaagtccttgaacagggaggtgtgtccagtttgtttcagaatctcggggtgtccgtaactccgatccaaaggattgtcctgagcggtgaaaatgggctgaagatcgacatccatgtcatcatcccgtatgaaggtctgagcggcgaccaaatgggccagatcgaaaaaatttttaaggtggtgtaccctgtggatgatcatcactttaaggtgatcctgcactatggcacactggtaatcgacggggttacgccgaacatgatcgactatttcggacggccgtatgaaggcatcgccgtgttcgacggcaaaaagatcactgtaacagggaccctgtggaacggcaacaaaattatcgacgagcgcctgatcaaccccgacggctccctgctgttccgagtaaccatcaacggagtgaccggctggcggctgtgcgaacgcattctggcgctcgagggaggcagctggagccaccctcagtttgaaaaagactacaaagacgatgacgataagggatcagattacaaggatgatgatgacaaggggtcagattataaagacgacgatgataaagggagcgactacaaggacgacgatgacaaggcctggtcccatccccagttcgagaaacaccatcaccaccaccatcatcacactagtggctccggcgagggcagaggaagtctactaacctgcggagatgtggaagaaaatcctggcccacatatgaccgagtacaagcccacggtgcgcctcgccacccgcgacgacgtccccagggccgtacgcaccctcgccgccgcgttcgccgactaccccgccacgcgccacaccgtcgatccggaccgccacatcgagcgggtcaccgagctgcaagaactcttcctcacgcgcgtcgggctcgacatcggcaaggtgtgggtcgcggacgacggcgccgcggtggcggtctggaccacgccggagagcgtcgaagcgggggcggtgttcgccgagatcggcccgcgcatggccgagttgagcggttcccggctggccgcgcagcaacagatggaaggcctcctggcgccgcaccggcccaaggagcccgcgtggttcctggccaccgtcggcgtctcgcccgaccaccagggcaagggtctgggcagcgccgtcgtgctccccggagtggaggcggccgagcgcgccggggtgcccgccttcctggagacctccgcgccccgcaacctccccttctacgagcggctcggcttcaccgtcaccgccgacgtcgaggtgcccgaaggaccgcgcacctggtgcatgacccgcaagcccggtgcctga

SEQ ID NO: 1292 - DNA, 3396 bp, Artificial Sequence
  Synthetic Polynucloetide
atgggagctgcgcggggatccccggccagaccccgccggttgcctctgctcagcgtcctgctgctgccgctgctgggcggtacccagacagccattgtcttcatcaagcagccgtcctcccaggatgcactgcaggggcgccgggcgctgcttcgctgtgaggttgaggctccgggcccggtacatgtgtactggctgctcgatggggcccctgtccaggacacggagcggcgtttcgcccagggcagcagcctgagctttgcagctgtggaccggctgcaggactctggcaccttccagtgtgtggctcgggatgatgtcactggagaagaagcccgcagtgccaacgcctccttcaacatcaaatggattgaggcaggtcctgtggtcctgaagcatccagcctcggaagctgagatccagccacagacccaggtcacacttcgttgccacattgatgggcaccctcggcccacctaccaatggttccgagatgggacccccctttctgatggtcagagcaaccacacagtcagcagcaaggagcggaacctgacgctccggccagctggtcctgagcatagtgggctgtattcctgctgcgcccacagtgcttttggccaggcttgcagcagccagaacttcaccttgagcattgctgatgaaagctttgccagggtggtgctggcaccccaggacgtggtagtagcgaggtatgaggaggccatgttccattgccagttctcagcccagccacccccgagcctgcagtggctctttgaggatgagactcccatcactaaccgcagtcgccccccacacctccgcagagccacagtgtttgccaacgggtctctgctgctgacccaggtccggccacgcaatgcagggatctaccgctgcattggccaggggcagaggggcccacccatcatcctggaagccacacttcacctagcagagattgaagacatgccgctatttgagccacgggtgtttacagctggcagcgaggagcgtgtgacctgccttccccccaagggtctgccagagcccagcgtgtggtgggagcacgcgggagtccggctgcccacccatggcagggtctaccagaagggccacgagctggtgttggccaatattgctgaaagtgatgctggtgtctacacctgccacgcggccaacctggctggtcagcggagacaggatgtcaacatcactgtggccactgtgccctcctggctgaagaagccccaagacagccagctggaggagggcaaacccggctacttggattgcctgacccaggccacaccaaaacctacagttgtctggtacagaaaccagatgctcatctcagaggactcacggttcgaggtcttcaagaatgggaccttgcgcatcaacagcgtggaggtgtatgatgggacatggtaccgttgtatgagcagcaccccagccggcagcatcgaggcgcaagcccgtgtccaagtgctggatgggagcagcctcccagagtgggtgacagacaacgctgggaccctgcattttgcccgggtgactcgagatgacgctggcaactacacttgcattgcctccaacgggccgcagggccagattcgtgcccatgtccagctcactgtggcagtttttatcaccttcaaagtggaaccagagcgtacgactgtgtaccagggccacacagccctactgcagtgcgaggcccagggggaccccaagccgctgattcagtggaaaggcaaggaccgcatcctggaccccaccaagctgggacccaggatgcacatcttccagaatggctccctggtgatccatgacgtggcccctgaggactcaggccgctacacctgcattgcaggcaacagctgcaacatcaagcacacggaggcccccctctatgtcgtggacaagcctgtgccggaggagtcggagggccctggcagccctcccccctacaagatgatccagaccacgcgtggaggcagtggtgtcttcacactcgaagatttcgttggggactggcgacagacagccggctacaacctggaccaagtccttgaacagggaggtgtgtccagtttgtttcagaatctcggggtgtccgtaactccgatccaaaggattgtcctgagcggtgaaaatgggctgaagatcgacatccatgtcatcatcccgtatgaaggtctgagcggcgaccaaatgggccagatcgaaaaaatttttaaggtggtgtaccctgtggatgatcatcactttaaggtgatcctgcactatggcacactggtaatcgacggggttacgccgaacatgatcgactatttcggacggccgtatgaaggcatcgccgtgttcgacggcaaaaagatcactgtaacagggaccctgtggaacggcaacaaaattatcgacgagcgcctgatcaaccccgacggctccctgctgttccgagtaaccatcaacggagtgaccggctggcggctgtgcgaacgcattctggcgctcgagggaggcagctggagccaccctcagtttgaaaaagactacaaagacgatgacgataagggatcagattacaaggatgatgatgacaaggggtcagattataaagacgacgatgataaagggagcgactacaaggacgacgatgacaaggcctggtcccatccccagttcgagaaacaccatcaccaccaccatcatcacactagtggctccggcgagggcagaggaagtctactaacctgcggagatgtggaagaaaatcctggcccacatatgaccgagtacaagcccacggtgcgcctcgccacccgcgacgacgtccccagggccgtacgcaccctcgccgccgcgttcgccgactaccccgccacgcgccacaccgtcgatccggaccgccacatcgagcgggtcaccgagctgcaagaactcttcctcacgcgcgtcgggctcgacatcggcaaggtgtgggtcgcggacgacggcgccgcggtggcggtctggaccacgccggagagcgtcgaagcgggggcggtgttcgccgagatcggcccgcgcatggccgagttgagcggttcccggctggccgcgcagcaacagatggaaggcctcctggcgccgcaccggcccaaggagcccgcgtggttcctggccaccgtcggcgtctcgcccgaccaccagggcaagggtctgggcagcgccgtcgtgctccccggagtggaggcggccgagcgcgccggggtgcccgccttcctggagacctccgcgccccgcaacctccccttctacgagcggctcggcttcaccgtcaccgccgacgtcgaggtgcccgaaggaccgcgcacctggtgcatgacccgcaagcccggtgcctga

SEQ ID NO: 1293 - DNA, 2274 bp, Artificial Sequence
  Synthetic Polynucloetide
atgctggtccgcaggggcgcgcgcgcagggcccaggatgccgcggggctggaccgcgctttgcttgctgagtttgctgccttctgggttcatgagtcttgacaacaacggtactgctaccccagagttacctacccagggaacattttcaaatgtttctacaaatgtatcctaccaagaaactacaacacctagtacccttggaagtaccagcctgcaccctgtgtctcaacatggcaatgaggccacaacaaacatcacagaaacgacagtcaaattcacatctacctctgtgataacctcagtttatggaaacacaaactcttctgtccagtcacagacctctgtaatcagcacagtgttcaccaccccagccaacgtttcaactccagagacaaccttgaagcctagcctgtcacctggaaatgtttcagacctttcaaccactagcactagccttgcaacatctcccactaaaccctatacatcatcttctcctatcctaagtgacatcaaggcagaaatcaaatgttcaggcatcagagaagtgaaattgactcagggcatctgcctggagcaaaataagacctccagctgtgcggagtttaagaaggacaggggagagggcctggcccgagtgctgtgtggggaggagcaggctgatgctgatgctggggcccaggtatgctccctgctccttgcccagtctgaggtgaggcctcagtgtctactgctggtcttggccaacagaacagaaatttccagcaaactccaacttatgaaaaagcaccaatctgacctgaaaaagctggggatcctagatttcactgagcaagatgttgcaagccaccagagctattcccaaaagaccacgcgtggaggcagtggtgtcttcacactcgaagatttcgttggggactggcgacagacagccggctacaacctggaccaagtccttgaacagggaggtgtgtccagtttgtttcagaatctcggggtgtccgtaactccgatccaaaggattgtcctgagcggtgaaaatgggctgaagatcgacatccatgtcatcatcccgtatgaaggtctgagcggcgaccaaatgggccagatcgaaaaaatttttaaggtggtgtaccctgtggatgatcatcactttaaggtgatcctgcactatggcacactggtaatcgacggggttacgccgaacatgatcgactatttcggacggccgtatgaaggcatcgccgtgttcgacggcaaaaagatcactgtaacagggaccctgtggaacggcaacaaaattatcgacgagcgcctgatcaaccccgacggctccctgctgttccgagtaaccatcaacggagtgaccggctggcggctgtgcgaacgcattctggcgctcgagggaggcagctggagccaccctcagtttgaaaaagactacaaagacgatgacgataagggatcagattacaaggatgatgatgacaaggggtcagattataaagacgacgatgataaagggagcgactacaaggacgacgatgacaaggcctggtcccatccccagttcgagaaacaccatcaccaccaccatcatcacactagtggctccggcgagggcagaggaagtctactaacctgcggagatgtggaagaaaatcctggcccacatatgaccgagtacaagcccacggtgcgcctcgccacccgcgacgacgtccccagggccgtacgcaccctcgccgccgcgttcgccgactaccccgccacgcgccacaccgtcgatccggaccgccacatcgagcgggtcaccgagctgcaagaactcttcctcacgcgcgtcgggctcgacatcggcaaggtgtgggtcgcggacgacggcgccgcggtggcggtctggaccacgccggagagcgtcgaagcgggggcggtgttcgccgagatcggcccgcgcatggccgagttgagcggttcccggctggccgcgcagcaacagatggaaggcctcctggcgccgcaccggcccaaggagcccgcgtggttcctggccaccgtcggcgtctcgcccgaccaccagggcaagggtctgggcagcgccgtcgtgctccccggagtggaggcggccgagcgcgccggggtgcccgccttcctggagacctccgcgccccgcaacctccccttctacgagcggctcggcttcaccgtcaccgccgacgtcgaggtgcccgaaggaccgcgcacctggtgcatgacccgcaagcccggtgcctga

SEQ ID NO: 1294 - DNA, 2208 bp, Artificial Sequence
  Synthetic Polynucloetide
atggcgcccccgcaggtcctcgcgttcgggcttctgcttgccgcggcgacggcgacttttgccgcagctcaggaagaatgtgtctgtgaaaactacaagctggccgtaaactgctttgtgaataataatcgtcaatgccagtgtacttcagttggtgcacaaaatactgtcatttgctcaaagctggctgccaaatgtttggtgatgaaggcagaaatgaatggctcaaaacttgggagaagagcaaaacctgaaggggccctccagaacaatgatgggctttatgatcctgactgcgatgagagcgggctctttaaggccaagcagtgcaacggcacctccacgtgctggtgtgtgaacactgctggggtcagaagaacagacaaggacactgaaataacctgctctgagcgagtgagaacctactggatcatcattgaactaaaacacaaagcaagagaaaaaccttatgatagtaaaagtttgcggactgcacttcagaaggagatcacaacgcgttatcaactggatccaaaatttatcacgagtattttgtatgagaataatgttatcactattgatctggttcaaaattcttctcaaaaaactcagaatgatgtggacatagctgatgtggcttattattttgaaaaagatgttaaaggtgaatccttgtttcattctaagaaaatggacctgacagtaaatggggaacaactggatctggatcctggtcaaactttaatttattatgttgatgaaaaagcacctgaattctcaatgcagggtctaaaacaggcgcgcacgcgtggaggcagtggtgtcttcacactcgaagatttcgttggggactggcgacagacagccggctacaacctggaccaagtccttgaacagggaggtgtgtccagtttgtttcagaatctcggggtgtccgtaactccgatccaaaggattgtcctgagcggtgaaaatgggctgaagatcgacatccatgtcatcatcccgtatgaaggtctgagcggcgaccaaatgggccagatcgaaaaaatttttaaggtggtgtaccctgtggatgatcatcactttaaggtgatcctgcactatggcacactggtaatcgacggggttacgccgaacatgatcgactatttcggacggccgtatgaaggcatcgccgtgttcgacggcaaaaagatcactgtaacagggaccctgtggaacggcaacaaaattatcgacgagcgcctgatcaaccccgacggctccctgctgttccgagtaaccatcaacggagtgaccggctggcggctgtgcgaacgcattctggcgctcgagggaggcagctggagccaccctcagtttgaaaaagactacaaagacgatgacgataagggatcagattacaaggatgatgatgacaaggggtcagattataaagacgacgatgataaagggagcgactacaaggacgacgatgacaaggcctggtcccatccccagttcgagaaacaccatcaccaccaccatcatcacactagtggctccggcgagggcagaggaagtctactaacctgcggagatgtggaagaaaatcctggcccacatatgaccgagtacaagcccacggtgcgcctcgccacccgcgacgacgtccccagggccgtacgcaccctcgccgccgcgttcgccgactaccccgccacgcgccacaccgtcgatccggaccgccacatcgagcgggtcaccgagctgcaagaactcttcctcacgcgcgtcgggctcgacatcggcaaggtgtgggtcgcggacgacggcgccgcggtggcggtctggaccacgccggagagcgtcgaagcgggggcggtgttcgccgagatcggcccgcgcatggccgagttgagcggttcccggctggccgcgcagcaacagatggaaggcctcctggcgccgcaccggcccaaggagcccgcgtggttcctggccaccgtcggcgtctcgcccgaccaccagggcaagggtctgggcagcgccgtcgtgctccccggagtggaggcggccgagcgcgccggggtgcccgccttcctggagacctccgcgccccgcaacctccccttctacgagcggctcggcttcaccgtcaccgccgacgtcgaggtgcccgaaggaccgcgcacctggtgcatgacccgcaagcccggtgcctga

SEQ ID NO: 1295 - DNA, 2199 bp, Artificial Sequence
  Synthetic Polynucloetide
atgtctgaagaagttacttatgcagatcttcaattccagaactccagtgagatggaaaaaatcccagaaattggcaaatttggggaaaaagcacctccagctccctctcatgtatggcgtccagcagccttgtttctgactcttctgtgccttctgttgctcattggattgggagtcttggcaagcatgtttcacgtaactttgaagatagaaatgaaaaaaatgaacaaactacaaaacatcagtgaagagctccagagaaatatttctctacaactgatgagtaacatgaatatctccaacaagatcaggaacctctccaccacactgcaaacaatagccaccaaattatgtcgtgagctatatagcaaagaacaagagcacaaatgtaagccttgtccaaggagatggatttggcataaggacagctgttatttcctaagtgatgatgtccaaacatggcaggagagtaaaatggcctgtgctgctcagaatgccagcctgttgaagataaacaacaaaaatgcattggaatttataaaatcccagagtagatcatatgactattggctgggattatctcctgaagaagattccactcgtggtatgagagtggataatataatcaactcctctgcctgggttataagaaacgcacctgacttaaataacatgtattgtggatatataaatagactatatgttcaatattatcactgcacttataaacaaagaatgatatgtgagaagatggccaatccagtgcagcttggttctacatattttagggaggcaacgcgtggaggcagtggtgtcttcacactcgaagatttcgttggggactggcgacagacagccggctacaacctggaccaagtccttgaacagggaggtgtgtccagtttgtttcagaatctcggggtgtccgtaactccgatccaaaggattgtcctgagcggtgaaaatgggctgaagatcgacatccatgtcatcatcccgtatgaaggtctgagcggcgaccaaatgggccagatcgaaaaaatttttaaggtggtgtaccctgtggatgatcatcactttaaggtgatcctgcactatggcacactggtaatcgacggggttacgccgaacatgatcgactatttcggacggccgtatgaaggcatcgccgtgttcgacggcaaaaagatcactgtaacagggaccctgtggaacggcaacaaaattatcgacgagcgcctgatcaaccccgacggctccctgctgttccgagtaaccatcaacggagtgaccggctggcggctgtgcgaacgcattctggcgctcgagggaggcagctggagccaccctcagtttgaaaaagactacaaagacgatgacgataagggatcagattacaaggatgatgatgacaaggggtcagattataaagacgacgatgataaagggagcgactacaaggacgacgatgacaaggcctggtcccatccccagttcgagaaacaccatcaccaccaccatcatcacactagtggctccggcgagggcagaggaagtctactaacctgcggagatgtggaagaaaatcctggcccacatatgaccgagtacaagcccacggtgcgcctcgccacccgcgacgacgtccccagggccgtacgcaccctcgccgccgcgttcgccgactaccccgccacgcgccacaccgtcgatccggaccgccacatcgagcgggtcaccgagctgcaagaactcttcctcacgcgcgtcgggctcgacatcggcaaggtgtgggtcgcggacgacggcgccgcggtggcggtctggaccacgccggagagcgtcgaagcgggggcggtgttcgccgagatcggcccgcgcatggccgagttgagcggttcccggctggccgcgcagcaacagatggaaggcctcctggcgccgcaccggcccaaggagcccgcgtggttcctggccaccgtcggcgtctcgcccgaccaccagggcaagggtctgggcagcgccgtcgtgctccccggagtggaggcggccgagcgcgccggggtgcccgccttcctggagacctccgcgccccgcaacctccccttctacgagcggctcggcttcaccgtcaccgccgacgtcgaggtgcccgaaggaccgcgcacctggtgcatgacccgcaagcccggtgcctga

SEQ ID NO: 1296 - DNA, 1893 bp, Artificial Sequence
  Synthetic Polynucloetide
atggccttaccagtgaccgccttgctcctgccgctggccttgctgctccacgccgccaggccgttcgaatgtcctgccggcatctacgcccctatctgttctggcggagggggatcttgtgggggaggcggcagcaagatcagccacttcctgaagatggaaagcctgaacttcatcagagcccacaccccctacatcaacatctacaactgcgagcccgccaaccccagcgagaagaacagccccagcacccagtattgctacagcatccagagcggaggcggcggaagttgtggaggcggaggctctcctgctggaatctatgctcctatcggaggcggaggctccaagatttcccactttctgaaaatggaatctctgaatttcatccgggctcacacaccttacatcaatatctataactgcgaacctgccaatccctctgagaagaactccccatccacacagtattgctattccatccagtccacgcgtggaggcagtggtgtcttcacactcgaagatttcgttggggactggcgacagacagccggctacaacctggaccaagtccttgaacagggaggtgtgtccagtttgtttcagaatctcggggtgtccgtaactccgatccaaaggattgtcctgagcggtgaaaatgggctgaagatcgacatccatgtcatcatcccgtatgaaggtctgagcggcgaccaaatgggccagatcgaaaaaatttttaaggtggtgtaccctgtggatgatcatcactttaaggtgatcctgcactatggcacactggtaatcgacggggttacgccgaacatgatcgactatttcggacggccgtatgaaggcatcgccgtgttcgacggcaaaaagatcactgtaacagggaccctgtggaacggcaacaaaattatcgacgagcgcctgatcaaccccgacggctccctgctgttccgagtaaccatcaacggagtgaccggctggcggctgtgcgaacgcattctggcgctcgagggaggcagctggagccaccctcagtttgaaaaagactacaaagacgatgacgataagggatcagattacaaggatgatgatgacaaggggtcagattataaagacgacgatgataaagggagcgactacaaggacgacgatgacaaggcctggtcccatccccagttcgagaaacaccatcaccaccaccatcatcacactagtggctccggcgagggcagaggaagtctactaacctgcggagatgtggaagaaaatcctggcccacatatgaccgagtacaagcccacggtgcgcctcgccacccgcgacgacgtccccagggccgtacgcaccctcgccgccgcgttcgccgactaccccgccacgcgccacaccgtcgatccggaccgccacatcgagcgggtcaccgagctgcaagaactcttcctcacgcgcgtcgggctcgacatcggcaaggtgtgggtcgcggacgacggcgccgcggtggcggtctggaccacgccggagagcgtcgaagcgggggcggtgttcgccgagatcggcccgcgcatggccgagttgagcggttcccggctggccgcgcagcaacagatggaaggcctcctggcgccgcaccggcccaaggagcccgcgtggttcctggccaccgtcggcgtctcgcccgaccaccagggcaagggtctgggcagcgccgtcgtgctccccggagtggaggcggccgagcgcgccggggtgcccgccttcctggagacctccgcgccccgcaacctccccttctacgagcggctcggcttcaccgtcaccgccgacgtcgaggtgcccgaaggaccgcgcacctggtgcatgacccgcaagcccggtgcctga

SEQ ID NO: 1297 - DNA, 1713 bp, Artificial Sequence
  Synthetic Polynucloetide
atggccttaccagtgaccgccttgctcctgccgctggccttgctgctccacgccgccaggccgttcgaatgtcctgccggcatctacgcccctatctgttctggcggagggggatcttgtgggggaggcggcagcaagatcagccacttcctgaagatggaaagcctgaacttcatcagagcccacaccccctacatcaacatctacaactgcgagcccgccaaccccagcgagaagaacagccccagcacccagtattgctacagcatccagagcggaggcggcggaagttgtggaggcggaggctctacgcgtggaggcagtggtgtcttcacactcgaagatttcgttggggactggcgacagacagccggctacaacctggaccaagtccttgaacagggaggtgtgtccagtttgtttcagaatctcggggtgtccgtaactccgatccaaaggattgtcctgagcggtgaaaatgggctgaagatcgacatccatgtcatcatcccgtatgaaggtctgagcggcgaccaaatgggccagatcgaaaaaatttttaaggtggtgtaccctgtggatgatcatcactttaaggtgatcctgcactatggcacactggtaatcgacggggttacgccgaacatgatcgactatttcggacggccgtatgaaggcatcgccgtgttcgacggcaaaaagatcactgtaacagggaccctgtggaacggcaacaaaattatcgacgagcgcctgatcaaccccgacggctccctgctgttccgagtaaccatcaacggagtgaccggctggcggctgtgcgaacgcattctggcgctcgagggaggcagctggagccaccctcagtttgaaaaagactacaaagacgatgacgataagggatcagattacaaggatgatgatgacaaggggtcagattataaagacgacgatgataaagggagcgactacaaggacgacgatgacaaggcctggtcccatccccagttcgagaaacaccatcaccaccaccatcatcacactagtggctccggcgagggcagaggaagtctactaacctgcggagatgtggaagaaaatcctggcccacatatgaccgagtacaagcccacggtgcgcctcgccacccgcgacgacgtccccagggccgtacgcaccctcgccgccgcgttcgccgactaccccgccacgcgccacaccgtcgatccggaccgccacatcgagcgggtcaccgagctgcaagaactcttcctcacgcgcgtcgggctcgacatcggcaaggtgtgggtcgcggacgacggcgccgcggtggcggtctggaccacgccggagagcgtcgaagcgggggcggtgttcgccgagatcggcccgcgcatggccgagttgagcggttcccggctggccgcgcagcaacagatggaaggcctcctggcgccgcaccggcccaaggagcccgcgtggttcctggccaccgtcggcgtctcgcccgaccaccagggcaagggtctgggcagcgccgtcgtgctccccggagtggaggcggccgagcgcgccggggtgcccgccttcctggagacctccgcgccccgcaacctccccttctacgagcggctcggcttcaccgtcaccgccgacgtcgaggtgcccgaaggaccgcgcacctggtgcatgacccgcaagcccggtgcctga

SEQ ID NO: 1298 - DNA, 2949 bp, Artificial Sequence
  Synthetic Polynucloetide
atgtctctgtggctcctagagggggttccaatgaggcaggctgctgtcacctcgacctccttgaccatcaagtctgtcttcacccggagcgagctcaagttctccccacagtggagtcaccatgggaagattgtgacctgccagcttcaggatgcagatgggaagttcctctccaatgacacggtgcagctgaacgtgaagcacaccccgaagttggagatcaaggtcactcccagtgatgccatagtgagggagggggactctgtgaccatgacctgcgaggtcagcagcagcaacccggagtacacgacggtatcctggctcaaggatgggacctcgctgaagaagcagaatacattcacgctaaacctgcgcgaagtgaccaaggaccagagtgggaagtactgctgtcaggtctccaatgacgtgggcccgggaaggtcggaagaagtgttcctgcaagtgcagtatgccccggaaccttccacggttcagatcctccactcaccggctgtggagggaagtcaagtcgagtttctttgcatgtcactggccaatcctcttccaacaaattacacgtggtaccacaatgggaaagaaatgcagggaaggacagaggagaaagtccacatcccaaagatcctcccctggcacgctgggacttattcctgtgtggcagaaaacattcttggtactggacagaggggcccgggagctgagctggatgtccagtatcctcccaagaaggtgaccacagtgattcaaaaccccatgccgattcgagaaggagacacagtgaccctttcctgtaactacaattccagtaaccccagtgttacccggtatgaatggaaaccccatggcgcctgggaggagccatcgcttggggtgctgaagatccaaaacgttggctgggacaacacaaccatcgcctgcgcagcttgtaatagttggtgctcgtgggcctcccctgtcgccctgaatgtccagtatgccccccgagacgtgagggtccggaaaatcaagcccctttccgagattcactctggaaactcggtcagcctccaatgtgacttctcaagcagccaccccaaagaagtccagttcttctgggagaaaaatggcaggcttctggggaaagaaagccagctgaattttgactccatctccccagaagatgctgggagttacagctgctgggtgaacaactccataggacagacagcgtccaaggcctggacacttgaagtgctgtatgcacccaggaggctgcgtgtgtccatgagcccgggggaccaagtgatggaggggaagagtgcaaccctgacctgtgagagcgacgccaaccctcccgtctcccactacacctggtttgactggaataaccaaagcctcccctaccacagccagaagctgagattggagccggtgaaggtccagcactcgggtgcctactggtgccaggggaccaacagtgtgggcaagggccgttcgcctctcagcaccctcaccgtctactatagcccggagaccatcggcaggcgaacgcgtggaggcagtggtgtcttcacactcgaagatttcgttggggactggcgacagacagccggctacaacctggaccaagtccttgaacagggaggtgtgtccagtttgtttcagaatctcggggtgtccgtaactccgatccaaaggattgtcctgagcggtgaaaatgggctgaagatcgacatccatgtcatcatcccgtatgaaggtctgagcggcgaccaaatgggccagatcgaaaaaatttttaaggtggtgtaccctgtggatgatcatcactttaaggtgatcctgcactatggcacactggtaatcgacggggttacgccgaacatgatcgactatttcggacggccgtatgaaggcatcgccgtgttcgacggcaaaaagatcactgtaacagggaccctgtggaacggcaacaaaattatcgacgagcgcctgatcaaccccgacggctccctgctgttccgagtaaccatcaacggagtgaccggctggcggctgtgcgaacgcattctggcgctcgagggaggcagctggagccaccctcagtttgaaaaagactacaaagacgatgacgataagggatcagattacaaggatgatgatgacaaggggtcagattataaagacgacgatgataaagggagcgactacaaggacgacgatgacaaggcctggtcccatccccagttcgagaaacaccatcaccaccaccatcatcacactagtggctccggcgagggcagaggaagtctactaacctgcggagatgtggaagaaaatcctggcccacatatgaccgagtacaagcccacggtgcgcctcgccacccgcgacgacgtccccagggccgtacgcaccctcgccgccgcgttcgccgactaccccgccacgcgccacaccgtcgatccggaccgccacatcgagcgggtcaccgagctgcaagaactcttcctcacgcgcgtcgggctcgacatcggcaaggtgtgggtcgcggacgacggcgccgcggtggcggtctggaccacgccggagagcgtcgaagcgggggcggtgttcgccgagatcggcccgcgcatggccgagttgagcggttcccggctggccgcgcagcaacagatggaaggcctcctggcgccgcaccggcccaaggagcccgcgtggttcctggccaccgtcggcgtctcgcccgaccaccagggcaagggtctgggcagcgccgtcgtgctccccggagtggaggcggccgagcgcgccggggtgcccgccttcctggagacctccgcgccccgcaacctccccttctacgagcggctcggcttcaccgtcaccgccgacgtcgaggtgcccgaaggaccgcgcacctggtgcatgacccgcaagcccggtgcctga

SEQ ID NO: 1299 - DNA, 2643 bp, Artificial Sequence
  Synthetic Polynucloetide
atgaggccggcggacttgctgcagctggtgctgctgctcgacctgcccagggacctgggcggaatggggtgttcgtctccaccctgcgagtgccatcaggaggaggacttcagagtcacctgcaaggatattcaacgcatccccagcttaccgcccagtacgcagactctgaagcttattgagactcacctgagaactattccaagtcatgcattttctaatctgcccaatatttccagaatctacgtatctatagatgtgactctgcagcagctggaatcacactccttctacaatttgagtaaagtgactcacatagaaattcggaataccaggaacttaacttacatagaccctgatgccctcaaagagctccccctcctaaagttccttggcattttcaacactggacttaaaatgttccctgacctgaccaaagtttattccactgatatattctttattcttgaaattacagacaacccttacatgacgtcaatccctgtgaatgcttttcagggactatgcaatgaaaccttgacactgaagctgtacaacaatggctttacttcagtccaaggatatgctttcaatgggacaaagctggatgctgtttacctaaacaagaataaatacctgacagttattgacaaagatgcatttggaggagtatacagtggaccaagcttgctggacgtgtctcaaaccagtgtcactgcccttccatccaaaggcctggagcacctgaaggaactgatagcaagaaacacctggactcttaagaaacttccactttccttgagtttccttcacctcacacgggctgacctttcttacccaagccactgctgtgcttttaagaatcagaagaaaatcagaggaatccttgagtccttgatgtgtaatgagagcagtatgcagagcttgcgccagagaaaatctgtgaatgccttgaatagccccctccaccaggaatatgaagagaatctgggtgacagcattgttgggtacaaggaaaagtccaagttccaggatactcataacaacgctcattattacgtcttctttgaagaacaagaggatgagatcattggttttggccaggagctcaaaaacccccaggaagagactctacaagcttttgacagccattatgactacaccatatgtggggacagtgaagacatggtgtgtacccccaagtccgatgagttcaacccgtgtgaagacataatgggcacgcgtggaggcagtggtgtcttcacactcgaagatttcgttggggactggcgacagacagccggctacaacctggaccaagtccttgaacagggaggtgtgtccagtttgtttcagaatctcggggtgtccgtaactccgatccaaaggattgtcctgagcggtgaaaatgggctgaagatcgacatccatgtcatcatcccgtatgaaggtctgagcggcgaccaaatgggccagatcgaaaaaatttttaaggtggtgtaccctgtggatgatcatcactttaaggtgatcctgcactatggcacactggtaatcgacggggttacgccgaacatgatcgactatttcggacggccgtatgaaggcatcgccgtgttcgacggcaaaaagatcactgtaacagggaccctgtggaacggcaacaaaattatcgacgagcgcctgatcaaccccgacggctccctgctgttccgagtaaccatcaacggagtgaccggctggcggctgtgcgaacgcattctggcgctcgagggaggcagctggagccaccctcagtttgaaaaagactacaaagacgatgacgataagggatcagattacaaggatgatgatgacaaggggtcagattataaagacgacgatgataaagggagcgactacaaggacgacgatgacaaggcctggtcccatccccagttcgagaaacaccatcaccaccaccatcatcacactagtggctccggcgagggcagaggaagtctactaacctgcggagatgtggaagaaaatcctggcccacatatgaccgagtacaagcccacggtgcgcctcgccacccgcgacgacgtccccagggccgtacgcaccctcgccgccgcgttcgccgactaccccgccacgcgccacaccgtcgatccggaccgccacatcgagcgggtcaccgagctgcaagaactcttcctcacgcgcgtcgggctcgacatcggcaaggtgtgggtcgcggacgacggcgccgcggtggcggtctggaccacgccggagagcgtcgaagcgggggcggtgttcgccgagatcggcccgcgcatggccgagttgagcggttcccggctggccgcgcagcaacagatggaaggcctcctggcgccgcaccggcccaaggagcccgcgtggttcctggccaccgtcggcgtctcgcccgaccaccagggcaagggtctgggcagcgccgtcgtgctccccggagtggaggcggccgagcgcgccggggtgcccgccttcctggagacctccgcgccccgcaacctccccttctacgagcggctcggcttcaccgtcaccgccgacgtcgaggtgcccgaaggaccgcgcacctggtgcatgacccgcaagcccggtgcctga

SEQ ID NO: 1300 - DNA, 2487 bp, Artificial Sequence
  Synthetic Polynucloetide
atgcgaccctccgggacggccggggcagcgctcctggcgctgctggctgcgctctgcccggcgagtcgggctctggaggaaaagaaaggtaattatgtggtgacagatcacggctcgtgcgtccgagcctgtggggccgacagctatgagatggaggaagacggcgtccgcaagtgtaagaagtgcgaagggccttgccgcaaagtgtgtaacggaataggtattggtgaatttaaagactcactctccataaatgctacgaatattaaacacttcaaaaactgcacctccatcagtggcgatctccacatcctgccggtggcatttaggggtgactccttcacacatactcctcctctggatccacaggaactggatattctgaaaaccgtaaaggaaatcacagggtttttgctgattcaggcttggcctgaaaacaggacggacctccatgcctttgagaacctagaaatcatacgcggcaggaccaagcaacatggtcagttttctcttgcagtcgtcagcctgaacataacatccttgggattacgctccctcaaggagataagtgatggagatgtgataatttcaggaaacaaaaatttgtgctatgcaaatacaataaactggaaaaaactgtttgggacctccggtcagaaaaccaaaattataagcaacagaggtgaaaacagctgcaaggccacaggccaggtctgccatgccttgtgctcccccgagggctgctggggcccggagcccagggactgcgtctcttgccggaatgtcagccgaggcagggaatgcgtggacaagtgcaaccttctggagggtgagccaagggagtttgtggagaactctgagtgcatacagtgccacccagagtgcctgcctcaggccatgaacatcacctgcacaggacggggaccagacaactgtatccagtgtgcccactacattgacggcccccactgcgtcaagacctgcccggcaggagtcatgggagaaaacaacaccctggtctggaagtacgcagacgccggccatgtgtgccacctgtgccatccaaactgcacctacggatgcacgcgtggaggcagtggtgtcttcacactcgaagatttcgttggggactggcgacagacagccggctacaacctggaccaagtccttgaacagggaggtgtgtccagtttgtttcagaatctcggggtgtccgtaactccgatccaaaggattgtcctgagcggtgaaaatgggctgaagatcgacatccatgtcatcatcccgtatgaaggtctgagcggcgaccaaatgggccagatcgaaaaaatttttaaggtggtgtaccctgtggatgatcatcactttaaggtgatcctgcactatggcacactggtaatcgacggggttacgccgaacatgatcgactatttcggacggccgtatgaaggcatcgccgtgttcgacggcaaaaagatcactgtaacagggaccctgtggaacggcaacaaaattatcgacgagcgcctgatcaaccccgacggctccctgctgttccgagtaaccatcaacggagtgaccggctggcggctgtgcgaacgcattctggcgctcgagggaggcagctggagccaccctcagtttgaaaaagactacaaagacgatgacgataagggatcagattacaaggatgatgatgacaaggggtcagattataaagacgacgatgataaagggagcgactacaaggacgacgatgacaaggcctggtcccatccccagttcgagaaacaccatcaccaccaccatcatcacactagtggctccggcgagggcagaggaagtctactaacctgcggagatgtggaagaaaatcctggcccacatatgaccgagtacaagcccacggtgcgcctcgccacccgcgacgacgtccccagggccgtacgcaccctcgccgccgcgttcgccgactaccccgccacgcgccacaccgtcgatccggaccgccacatcgagcgggtcaccgagctgcaagaactcttcctcacgcgcgtcgggctcgacatcggcaaggtgtgggtcgcggacgacggcgccgcggtggcggtctggaccacgccggagagcgtcgaagcgggggcggtgttcgccgagatcggcccgcgcatggccgagttgagcggttcccggctggccgcgcagcaacagatggaaggcctcctggcgccgcaccggcccaaggagcccgcgtggttcctggccaccgtcggcgtctcgcccgaccaccagggcaagggtctgggcagcgccgtcgtgctccccggagtggaggcggccgagcgcgccggggtgcccgccttcctggagacctccgcgccccgcaacctccccttctacgagcggctcggcttcaccgtcaccgccgacgtcgaggtgcccgaaggaccgcgcacctggtgcatgacccgcaagcccggtgcctga

SEQ ID NO: 1301 - DNA, 2082 bp, Artificial Sequence
  Synthetic Polynucloetide
atggctggttccccaacatgcctcaccctcatctatatcctttggcagctcacagggtcagcagcctctggacccgtgaaagagctggtcggttccgttggtggggccgtgactttccccctgaagtccaaagtaaagcaagttgactctattgtctggaccttcaacacaacccctcttgtcaccatacagccagaagggggcactatcatagtgacccaaaatcgtaatagggagagagtagacttcccagatggaggctactccctgaagctcagcaaactgaagaagaatgactcagggatctactatgtggggatatacagctcatcactccagcagccctccacccaggagtacgtgctgcatgtctacgagcacctgtcaaagcctaaagtcaccatgggtctgcagagcaataagaatggcacctgtgtgaccaatctgacatgctgcatggaacatggggaagaggatgtgatttatacctggaaggccctggggcaagcagccaatgagtcccataatgggtccatcctccccatctcctggagatggggagaaagtgatatgaccttcatctgcgttgccaggaaccctgtcagcagaaacttctcaagccccatccttgccaggaagctctgtgaaggtgctgctgatgacccagattcctccatgacgcgtggaggcagtggtgtcttcacactcgaagatttcgttggggactggcgacagacagccggctacaacctggaccaagtccttgaacagggaggtgtgtccagtttgtttcagaatctcggggtgtccgtaactccgatccaaaggattgtcctgagcggtgaaaatgggctgaagatcgacatccatgtcatcatcccgtatgaaggtctgagcggcgaccaaatgggccagatcgaaaaaatttttaaggtggtgtaccctgtggatgatcatcactttaaggtgatcctgcactatggcacactggtaatcgacggggttacgccgaacatgatcgactatttcggacggccgtatgaaggcatcgccgtgttcgacggcaaaaagatcactgtaacagggaccctgtggaacggcaacaaaattatcgacgagcgcctgatcaaccccgacggctccctgctgttccgagtaaccatcaacggagtgaccggctggcggctgtgcgaacgcattctggcgctcgagggaggcagctggagccaccctcagtttgaaaaagactacaaagacgatgacgataagggatcagattacaaggatgatgatgacaaggggtcagattataaagacgacgatgataaagggagcgactacaaggacgacgatgacaaggcctggtcccatccccagttcgagaaacaccatcaccaccaccatcatcacactagtggctccggcgagggcagaggaagtctactaacctgcggagatgtggaagaaaatcctggcccacatatgaccgagtacaagcccacggtgcgcctcgccacccgcgacgacgtccccagggccgtacgcaccctcgccgccgcgttcgccgactaccccgccacgcgccacaccgtcgatccggaccgccacatcgagcgggtcaccgagctgcaagaactcttcctcacgcgcgtcgggctcgacatcggcaaggtgtgggtcgcggacgacggcgccgcggtggcggtctggaccacgccggagagcgtcgaagcgggggcggtgttcgccgagatcggcccgcgcatggccgagttgagcggttcccggctggccgcgcagcaacagatggaaggcctcctggcgccgcaccggcccaaggagcccgcgtggttcctggccaccgtcggcgtctcgcccgaccaccagggcaagggtctgggcagcgccgtcgtgctccccggagtggaggcggccgagcgcgccggggtgcccgccttcctggagacctccgcgccccgcaacctccccttctacgagcggctcggcttcaccgtcaccgccgacgtcgaggtgcccgaaggaccgcgcacctggtgcatgacccgcaagcccggtgcctga

SEQ ID NO: 1302 - DNA, 1905 bp, Artificial Sequence
  Synthetic Polynucloetide
atgcagatcccacaggcgccctggccagtcgtctgggcggtgctacaactgggctggcggccaggatggttcttagactccccagacaggccctggaacccccccaccttctccccagccctgctcgtggtgaccgaaggggacaacgccaccttcacctgcagcttctccaacacatcggagagcttcgtgctaaactggtaccgcatgagccccagcaaccagacggacaagctggccgccttccccgaggaccgcagccagcccggccaggactgccgcttccgtgtcacacaactgcccaacgggcgtgacttccacatgagcgtggtcagggcccggcgcaatgacagcggcacctacctctgtggggccatctccctggcccccaaggcgcagatcaaagagagcctgcgggcagagctcagggtgacagagagaagggcagaagtgcccacagcccaccccagcccctcacccaggccagccggccagttccaaacgcgtggaggcagtggtgtcttcacactcgaagatttcgttggggactggcgacagacagccggctacaacctggaccaagtccttgaacagggaggtgtgtccagtttgtttcagaatctcggggtgtccgtaactccgatccaaaggattgtcctgagcggtgaaaatgggctgaagatcgacatccatgtcatcatcccgtatgaaggtctgagcggcgaccaaatgggccagatcgaaaaaatttttaaggtggtgtaccctgtggatgatcatcactttaaggtgatcctgcactatggcacactggtaatcgacggggttacgccgaacatgatcgactatttcggacggccgtatgaaggcatcgccgtgttcgacggcaaaaagatcactgtaacagggaccctgtggaacggcaacaaaattatcgacgagcgcctgatcaaccccgacggctccctgctgttccgagtaaccatcaacggagtgaccggctggcggctgtgcgaacgcattctggcgctcgagggaggcagctggagccaccctcagtttgaaaaagactacaaagacgatgacgataagggatcagattacaaggatgatgatgacaaggggtcagattataaagacgacgatgataaagggagcgactacaaggacgacgatgacaaggcctggtcccatccccagttcgagaaacaccatcaccaccaccatcatcacactagtggctccggcgagggcagaggaagtctactaacctgcggagatgtggaagaaaatcctggcccacatatgaccgagtacaagcccacggtgcgcctcgccacccgcgacgacgtccccagggccgtacgcaccctcgccgccgcgttcgccgactaccccgccacgcgccacaccgtcgatccggaccgccacatcgagcgggtcaccgagctgcaagaactcttcctcacgcgcgtcgggctcgacatcggcaaggtgtgggtcgcggacgacggcgccgcggtggcggtctggaccacgccggagagcgtcgaagcgggggcggtgttcgccgagatcggcccgcgcatggccgagttgagcggttcccggctggccgcgcagcaacagatggaaggcctcctggcgccgcaccggcccaaggagcccgcgtggttcctggccaccgtcggcgtctcgcccgaccaccagggcaagggtctgggcagcgccgtcgtgctccccggagtggaggcggccgagcgcgccggggtgcccgccttcctggagacctccgcgccccgcaacctccccttctacgagcggctcggcttcaccgtcaccgccgacgtcgaggtgcccgaaggaccgcgcacctggtgcatgacccgcaagcccggtgcctga

SEQ ID NO: 1303 - DNA, 1890 bp, Artificial Sequence
  Synthetic Polynucloetide
atggcctgtctgggcttccagagacacaaggcccagctcaacctggctaccagaacctggccttgtactctgctgttcttcctgctgttcatccccgtgttctgcaaggccatgcatgtggctcagcctgctgtggtgctggcctctagtagaggaatcgccagcttcgtgtgcgagtacgcctctcctggaaaggccactgaagtgcgcgtgaccgttctgagacaggccgatagccaagtgaccgaagtgtgcgccgccacctacatgatgggcaacgagctgaccttcctggacgacagcatctgtaccggcaccagcagcggcaatcaagtgaacctgaccatccagggcctgagagctatggacaccggcctgtacatctgcaaggtggaactgatgtaccctcctccttactacctcggcatcggcaacggcacccaaatctacgtgatcgaccccgagccttgtcctgacagcgatttcacgcgtggaggcagtggtgtcttcacactcgaagatttcgttggggactggcgacagacagccggctacaacctggaccaagtccttgaacagggaggtgtgtccagtttgtttcagaatctcggggtgtccgtaactccgatccaaaggattgtcctgagcggtgaaaatgggctgaagatcgacatccatgtcatcatcccgtatgaaggtctgagcggcgaccaaatgggccagatcgaaaaaatttttaaggtggtgtaccctgtggatgatcatcactttaaggtgatcctgcactatggcacactggtaatcgacggggttacgccgaacatgatcgactatttcggacggccgtatgaaggcatcgccgtgttcgacggcaaaaagatcactgtaacagggaccctgtggaacggcaacaaaattatcgacgagcgcctgatcaaccccgacggctccctgctgttccgagtaaccatcaacggagtgaccggctggcggctgtgcgaacgcattctggcgctcgagggaggcagctggagccaccctcagtttgaaaaagactacaaagacgatgacgataagggatcagattacaaggatgatgatgacaaggggtcagattataaagacgacgatgataaagggagcgactacaaggacgacgatgacaaggcctggtcccatccccagttcgagaaacaccatcaccaccaccatcatcacactagtggctccggcgagggcagaggaagtctactaacctgcggagatgtggaagaaaatcctggcccacatatgaccgagtacaagcccacggtgcgcctcgccacccgcgacgacgtccccagggccgtacgcaccctcgccgccgcgttcgccgactaccccgccacgcgccacaccgtcgatccggaccgccacatcgagcgggtcaccgagctgcaagaactcttcctcacgcgcgtcgggctcgacatcggcaaggtgtgggtcgcggacgacggcgccgcggtggcggtctggaccacgccggagagcgtcgaagcgggggcggtgttcgccgagatcggcccgcgcatggccgagttgagcggttcccggctggccgcgcagcaacagatggaaggcctcctggcgccgcaccggcccaaggagcccgcgtggttcctggccaccgtcggcgtctcgcccgaccaccagggcaagggtctgggcagcgccgtcgtgctccccggagtggaggcggccgagcgcgccggggtgcccgccttcctggagacctccgcgccccgcaacctccccttctacgagcggctcggcttcaccgtcaccgccgacgtcgaggtgcccgaaggaccgcgcacctggtgcatgacccgcaagcccggtgcctga

SEQ ID NO: 1304 - DNA, 1872 bp, Artificial Sequence
  Synthetic Polynucloetide
atggccttaccagtgaccgccttgctcctgccgctggccttgctgctccacgccgccaggccgctgttcaaccaggaagtgcagatccccctgaccgagagctactgcggcccctgccccaagaactggatctgctacaagaacaactgctaccagttcttcgacgagagcaagaattggtacgagagccaggcttcctgcatgagccagaacgccagcctgctgaaggtgtacagcaaagaggaccaggatctgctgaagctggtcaagagctaccactggatgggcctggtgcacatccccaccaacggctcttggcagtgggaggacggcagcatcctgagccccaacctgctgaccatcatcgagatgcagaagggcgactgcgccctgtacgccagcagcttcaagggctacatcgagaactgctccacccccaacacctacatctgtatgcagcggaccgtgacgcgtggaggcagtggtgtcttcacactcgaagatttcgttggggactggcgacagacagccggctacaacctggaccaagtccttgaacagggaggtgtgtccagtttgtttcagaatctcggggtgtccgtaactccgatccaaaggattgtcctgagcggtgaaaatgggctgaagatcgacatccatgtcatcatcccgtatgaaggtctgagcggcgaccaaatgggccagatcgaaaaaatttttaaggtggtgtaccctgtggatgatcatcactttaaggtgatcctgcactatggcacactggtaatcgacggggttacgccgaacatgatcgactatttcggacggccgtatgaaggcatcgccgtgttcgacggcaaaaagatcactgtaacagggaccctgtggaacggcaacaaaattatcgacgagcgcctgatcaaccccgacggctccctgctgttccgagtaaccatcaacggagtgaccggctggcggctgtgcgaacgcattctggcgctcgagggaggcagctggagccaccctcagtttgaaaaagactacaaagacgatgacgataagggatcagattacaaggatgatgatgacaaggggtcagattataaagacgacgatgataaagggagcgactacaaggacgacgatgacaaggcctggtcccatccccagttcgagaaacaccatcaccaccaccatcatcacactagtggctccggcgagggcagaggaagtctactaacctgcggagatgtggaagaaaatcctggcccacatatgaccgagtacaagcccacggtgcgcctcgccacccgcgacgacgtccccagggccgtacgcaccctcgccgccgcgttcgccgactaccccgccacgcgccacaccgtcgatccggaccgccacatcgagcgggtcaccgagctgcaagaactcttcctcacgcgcgtcgggctcgacatcggcaaggtgtgggtcgcggacgacggcgccgcggtggcggtctggaccacgccggagagcgtcgaagcgggggcggtgttcgccgagatcggcccgcgcatggccgagttgagcggttcccggctggccgcgcagcaacagatggaaggcctcctggcgccgcaccggcccaaggagcccgcgtggttcctggccaccgtcggcgtctcgcccgaccaccagggcaagggtctgggcagcgccgtcgtgctccccggagtggaggcggccgagcgcgccggggtgcccgccttcctggagacctccgcgccccgcaacctccccttctacgagcggctcggcttcaccgtcaccgccgacgtcgaggtgcccgaaggaccgcgcacctggtgcatgacccgcaagcccggtgcctga

SEQ ID NO: 1305 - DNA, 3594 bp, Artificial Sequence
  Synthetic Polynucloetide
atggccttaccagtgaccgccttgctcctgccgctggccttgctgctccacgccgccaggccgttcgaaaaatcctccaatgaagctactaacattactccaaagcataatatgaaagcatttttggatgaattgaaagctgagaacatcaagaagttcttatataattttacacagataccacatttagcaggaacagaacaaaactttcagcttgcaaagcaaattcaatcccagtggaaagaatttggcctggattctgttgagctagcacattatgatgtcctgttgtcctacccaaataagactcatcccaactacatctcaataattaatgaagatggaaatgagattttcaacacatcattatttgaaccacctcctccaggatatgaaaatgtttcggatattgtaccacctttcagtgctttctctcctcaaggaatgccagagggcgatctagtgtatgttaactatgcacgaactgaagacttctttaaattggaacgggacatgaaaatcaattgctctgggaaaattgtaattgccagatatgggaaagttttcagaggaaataaggttaaaaatgcccagctggcaggggccaaaggagtcattctctactccgaccctgctgactactttgctcctggggtgaagtcctatccagatggttggaatcttcctggaggtggtgtccagcgtggaaatatcctaaatctgaatggtgcaggagaccctctcacaccaggttacccagcaaatgaatatgcttataggcgtggaattgcagaggctgttggtcttccaagtattcctgttcatccaattggatactatgatgcacagaagctcctagaaaaaatgggtggctcagcaccaccagatagcagctggagaggaagtctcaaagtgccctacaatgttggacctggctttactggaaacttttctacacaaaaagtcaagatgcacatccactctaccaatgaagtgacaagaatttacaatgtgataggtactctcagaggagcagtggaaccagacagatatgtcattctgggaggtcaccgggactcatgggtgtttggtggtattgaccctcagagtggagcagctgttgttcatgaaattgtgaggagctttggaacactgaaaaaggaagggtggagacctagaagaacaattttgtttgcaagctgggatgcagaagaatttggtcttcttggttctactgagtgggcagaggagaattcaagactccttcaagagcgtggcgtggcttatattaatgctgactcatctatagaaggaaactacactctgagagttgattgtacaccgctgatgtacagcttggtacacaacctaacaaaagagctgaaaagccctgatgaaggctttgaaggcaaatctctttatgaaagttggactaaaaaaagtccttccccagagttcagtggcatgcccaggataagcaaattgggatctggaaatgattttgaggtgttcttccaacgacttggaattgcttcaggcagagcacggtatactaaaaattgggaaacaaacaaattcagcggctatccactgtatcacagtgtctatgaaacatatgagttggtggaaaagttttatgatccaatgtttaaatatcacctcactgtggcccaggttcgaggagggatggtgtttgagctagccaattccatagtgctcccttttgattgtcgagattatgctgtagttttaagaaagtatgctgacaaaatctacagtatttctatgaaacatccacaggaaatgaagacatacagtgtatcatttgattcacttttttctgcagtaaagaattttacagaaattgcttccaagttcagtgagagactccaggactttgacaaaagcaacccaatagtattaagaatgatgaatgatcaactcatgtttctggaaagagcatttattgatccattagggttaccagacaggcctttttataggcatgtcatctatgctccaagcagccacaacaagtatgcaggggagtcattcccaggaatttatgatgctctgtttgatattgaaagcaaagtggacccttccaaggcctggggagaagtgaagagacagatttatgttgcagccttcacagtgcaggcagctgcagagactttgagtgaagtagccacgcgtggaggcagtggtgtcttcacactcgaagatttcgttggggactggcgacagacagccggctacaacctggaccaagtccttgaacagggaggtgtgtccagtttgtttcagaatctcggggtgtccgtaactccgatccaaaggattgtcctgagcggtgaaaatgggctgaagatcgacatccatgtcatcatcccgtatgaaggtctgagcggcgaccaaatgggccagatcgaaaaaatttttaaggtggtgtaccctgtggatgatcatcactttaaggtgatcctgcactatggcacactggtaatcgacggggttacgccgaacatgatcgactatttcggacggccgtatgaaggcatcgccgtgttcgacggcaaaaagatcactgtaacagggaccctgtggaacggcaacaaaattatcgacgagcgcctgatcaaccccgacggctccctgctgttccgagtaaccatcaacggagtgaccggctggcggctgtgcgaacgcattctggcgctcgagggaggcagctggagccaccctcagtttgaaaaagactacaaagacgatgacgataagggatcagattacaaggatgatgatgacaaggggtcagattataaagacgacgatgataaagggagcgactacaaggacgacgatgacaaggcctggtcccatccccagttcgagaaacaccatcaccaccaccatcatcacactagtggctccggcgagggcagaggaagtctactaacctgcggagatgtggaagaaaatcctggcccacatatgaccgagtacaagcccacggtgcgcctcgccacccgcgacgacgtccccagggccgtacgcaccctcgccgccgcgttcgccgactaccccgccacgcgccacaccgtcgatccggaccgccacatcgagcgggtcaccgagctgcaagaactcttcctcacgcgcgtcgggctcgacatcggcaaggtgtgggtcgcggacgacggcgccgcggtggcggtctggaccacgccggagagcgtcgaagcgggggcggtgttcgccgagatcggcccgcgcatggccgagttgagcggttcccggctggccgcgcagcaacagatggaaggcctcctggcgccgcaccggcccaaggagcccgcgtggttcctggccaccgtcggcgtctcgcccgaccaccagggcaagggtctgggcagcgccgtcgtgctccccggagtggaggcggccgagcgcgccggggtgcccgccttcctggagacctccgcgccccgcaacctccccttctacgagcggctcggcttcaccgtcaccgccgacgtcgaggtgcccgaaggaccgcgcacctggtgcatgacccgcaagcccggtgcctga

SEQ ID NO: 1306 - DNA, 1635 bp, Artificial Sequence
  Synthetic Polynucloetide
atggccttaccagtgaccgccttgctcctgccgctggccttgctgctccacgccgccaggccgttcgaaatgttgcagatggctgggcagtgctcccaaaatgaatattttgacagtttgttgcatgcttgcataccttgtcaacttcgatgttcttctaatactcctcctctaacatgtcagcgttattgtaatgcaagtgtgaccaattcagtgaaaggaacgaatgcgacgcgtggaggcagtggtgtcttcacactcgaagatttcgttggggactggcgacagacagccggctacaacctggaccaagtccttgaacagggaggtgtgtccagtttgtttcagaatctcggggtgtccgtaactccgatccaaaggattgtcctgagcggtgaaaatgggctgaagatcgacatccatgtcatcatcccgtatgaaggtctgagcggcgaccaaatgggccagatcgaaaaaatttttaaggtggtgtaccctgtggatgatcatcactttaaggtgatcctgcactatggcacactggtaatcgacggggttacgccgaacatgatcgactatttcggacggccgtatgaaggcatcgccgtgttcgacggcaaaaagatcactgtaacagggaccctgtggaacggcaacaaaattatcgacgagcgcctgatcaaccccgacggctccctgctgttccgagtaaccatcaacggagtgaccggctggcggctgtgcgaacgcattctggcgctcgagggaggcagctggagccaccctcagtttgaaaaagactacaaagacgatgacgataagggatcagattacaaggatgatgatgacaaggggtcagattataaagacgacgatgataaagggagcgactacaaggacgacgatgacaaggcctggtcccatccccagttcgagaaacaccatcaccaccaccatcatcacactagtggctccggcgagggcagaggaagtctactaacctgcggagatgtggaagaaaatcctggcccacatatgaccgagtacaagcccacggtgcgcctcgccacccgcgacgacgtccccagggccgtacgcaccctcgccgccgcgttcgccgactaccccgccacgcgccacaccgtcgatccggaccgccacatcgagcgggtcaccgagctgcaagaactcttcctcacgcgcgtcgggctcgacatcggcaaggtgtgggtcgcggacgacggcgccgcggtggcggtctggaccacgccggagagcgtcgaagcgggggcggtgttcgccgagatcggcccgcgcatggccgagttgagcggttcccggctggccgcgcagcaacagatggaaggcctcctggcgccgcaccggcccaaggagcccgcgtggttcctggccaccgtcggcgtctcgcccgaccaccagggcaagggtctgggcagcgccgtcgtgctccccggagtggaggcggccgagcgcgccggggtgcccgccttcctggagacctccgcgccccgcaacctccccttctacgagcggctcggcttcaccgtcaccgccgacgtcgaggtgcccgaaggaccgcgcacctggtgcatgacccgcaagcccggtgcctga

SEQ ID NO: 1307 - skipped

SEQ ID NO: 1308 - DNA, 597 bp, Artificial Sequence
  Synthetic Polynucloetide
atgaccgagtacaagcccacggtgcgcctcgccacccgcgacgacgtccccagggccgtacgcaccctcgccgccgcgttcgccgactaccccgccacgcgccacaccgtcgatccggaccgccacatcgagcgggtcaccgagctgcaagaactcttcctcacgcgcgtcgggctcgacatcggcaaggtgtgggtcgcggacgacggcgccgcggtggcggtctggaccacgccggagagcgtcgaagcgggggcggtgttcgccgagatcggcccgcgcatggccgagttgagcggttcccggctggccgcgcagcaacagatggaaggcctcctggcgccgcaccggcccaaggagcccgcgtggttcctggccaccgtcggcgtctcgcccgaccaccagggcaagggtctgggcagcgccgtcgtgctccccggagtggaggcggccgagcgcgccggggtgcccgccttcctggagacctccgcgccccgcaacctccccttctacgagcggctcggcttcaccgtcaccgccgacgtcgaggtgcccgaaggaccgcgcacctggtgcatgacccgcaagcccggtgcc

SEQ ID NO: 1309 - DNA, 396 bp, Artificial Sequence
  Synthetic Polynucloetide
atggccaagcctttgtctcaagaagaatccaccctcattgaaagagcaacggctacaatcaacagcatccccatctctgaagactacagcgtcgccagcgcagctctctctagcgacggccgcatcttcactggtgtcaatgtatatcattttactgggggaccttgtgcagaactcgtggtgctgggcactgctgctgctgcggcagctggcaacctgacttgtatcgtcgcgatcggaaatgagaacaggggcatcttgagcccctgcggacggtgccgacaggtgcttctcgatctgcatcctgggatcaaagccatagtgaaggacagtgatggacagccgacggcagttgggattcgtgaattgctgccctctggttatgtgtgggagggc

SEQ ID NO: 1310 - DNA, 516 bp, Artificial Sequence
  Synthetic Polynucloetide
atgggcaacgaggccagctaccctctggagatgtgctcccacttcgacgccgacgagatcaagcggctgggcaagcgcttcaagaagctggacctggacaacagcggcagcctgagcgtggaggagtttatgtctctgcccgagctgcagcagaaccccctggtgcagcgcgtgatcgacatcttcgacaccgacggcaacggcgaggtggacttcaaggagttcatcgagggcgtgagccagttcagcgtgaagggcgacaaggagcagaagctgcggttcgccttccgcatctacgatatggataaagatggctatatttctaatggcgagctgttccaggtgctgaagatgatggtgggcaacaataccaagctggccgatacccagctgcagcagatcgtggacaagaccatcatcaacgccgacaaggacggcgacggcagaatcagcttcgaggagttctgtgccgtggtgggaggcctggatattcacaaaaaaatggtggtggacgtg

SEQ ID NO: 1311 - DNA, 1071 bp, Artificial Sequence
  Synthetic Polynucloetide
atgctgctgctcgtgaccagcctgctgctgtgcgaactgccccaccctgcctttctgctgatcccccggaaagtgtgcaacggcatcggcatcggagagttcaaggacagcctgagcatcaacgccaccaacatcaagcacttcaagaactgcaccagcatcagcggcgacctgcacatcctgcccgtggcctttagaggcgacagcttcacccacacccccccactggaccctcaggaactggacatcctgaaaaccgtgaaagagatcaccggatttctgctgattcaggcttggcccgagaaccggaccgatctgcacgccttcgagaacctggaaatcatccggggcaggaccaagcagcacggccagttttctctggccgtggtgtccctgaacatcaccagcctgggcctgcggagcctgaaagaaatcagcgacggggatgtgattatcagcggcaacaagaacctgtgctacgccaacaccatcaactggaagaagctgttcggcacctccggccagaaaacaaagatcatcagcaaccggggcgagaacagctgcaaggccacaggacaagtgtgccacgccctgtgtagccctgagggctgttggggacccgagcccagagattgcgtgtcctgccggaatgtgtccagaggccgcgagtgcgtggacaagtgcaacctgctggaaggcgagccccgcgagtttgtggaaaacagcgagtgcatccagtgccaccccgagtgtctgccccaggccatgaatatcacctgtaccggcagaggccccgacaactgtatccagtgcgcccactacatcgacggcccccactgcgtgaaaacctgtccagctggcgtgatgggagagaacaacaccctcgtgtggaagtacgccgacgccggccatgtgtgccacctgtgtcaccccaactgcacctacggctgtacaggccctggcctggaaggctgccctaccaacggacccaagatccccagcattgccaccggcatggtgggagcattgctgctgctgctggtggtggccctgggcatcggcctgtttatg

SEQ ID NO: 1312 - DNA, 1272 bp, Artificial Sequence
  Synthetic Polynucloetide
atgcgaccctccgggacggccggggcagcgttcctggcgctgctggctgcgctctgcccggcgagtcgggctctggaggaaaagaaaggtaattatgtggtgacagatcacggctcgtgcgtccgagcctgtggggccgacagctatgagatggaggaagacggcgtccgcaagtgtaagaagtgcgaagggccttgccgcaaagtgtgtaacggaataggtattggtgaatttaaagactcactctccataaatgctacgaatattaaacacttcaaaaactgcacctccatcagtggcgatctccacatcctgccggtggcatttaggggtgactccttcacacatactcctcctctggatccacaggaactggatattctgaaaaccgtaaaggaaatcacagggtttttgctgattcaggcttggcctgaaaacaggacggacctccatgcctttgagaacctagaaatcatacgcggcaggaccaagcaacatggtcagttttctcttgcagtcgtcagcctgaacataacatccttgggattacgctccctcaaggagataagtgatggagatgtgataatttcaggaaacaaaaatttgtgctatgcaaatacaataaactggaaaaaactgtttgggacctccggtcagaaaaccaaaattataagcaacagaggtgaaaacagctgcaaggccacaggccaggtctgccatgccttgtgctcccccgagggctgctggggcccggagcccagggactgcgtctcttgccggaatgtcagccgaggcagggaatgcgtggacaagtgcaaccttctggagggtgagccaagggagtttgtggagaactctgagtgcatacagtgccacccagagtgcctgcctcaggccatgaacatcacctgcacaggacggggaccagacaactgtatccagtgtgcccactacattgacggcccccactgcgtcaagacctgcccggcaggagtcatgggagaaaacaacaccctggtctggaagtacgcagacgccggccatgtgtgccacctgtgccatccaaactgcacctacggatgcactgggccaggtcttgaaggctgtccaacgaatgggcctaagatcccgtccatcgccactgggatggtgggggccctcctcttgctgctggtggtggccctggggatcggcctcttcatgcgaaggcgccacatcgttcggaagcgcacgctgcggaggctgctgcaggagagggagcttgtggagcct

SEQ ID NO: 1313 - DNA, 999 bp, Artificial Sequence
  Synthetic Polynucloetide
atgccccctcccagactgctgttcttcctgctgttcctgacccctatggaagtgcggcccgaggaacccctggtcgtgaaagtggaagagggcgacaacgccgtgctccagtgtctgaagggcacctccgatggccctacccagcagctgacatggtccagagagagccccctgaagcccttcctgaagctgtctctgggcctgcctggcctgggcatccacatgaggccactggctatctggctgttcatcttcaacgtgtcccagcagatgggcggcttctacctgtgtcagcctggccccccaagcgagaaagcctggcagcctggctggaccgtgaacgtggaaggatctggcgagctgttccggtggaacgtgtccgatctgggcggcctgggatgcggcctgaagaacagaagcagcgaaggccccagcagccccagcggcaaactgatgagccccaagctgtacgtgtgggccaaggaccggcccgagatttgggaaggcgagcctccttgcctgccccccagagatagcctgaaccagagcctgagccaggacctgacaatggcccctggcagcacactgtggctgagctgtggcgtgccacccgactctgtgtccagaggccctctgagctggacccacgtgcaccccaagggacctaagagcctgctgagcctggaactgaaggacgacagacccgccagagatatgtgggtcatggaaaccggcctgctgctgcctagagccacagcccaggatgccggcaagtattactgccaccggggcaacctgaccatgagcttccacctggaaatcaccgccagacccgtgctgtggcactggctgctgagaaccggcggatggaaagtgtccgccgtgaccctggcctacctgatcttctgcctgtgctccctcgtgggcatcctgcatctccagcgggctctggtgctgcggcggaagagaaagagaatgaccgaccccacccggcggttc

SEQ ID NO: 1314 - DNA, 315 bp, Artificial Sequence
  Synthetic Polynucloetide
atggccttaccagtgaccgccttgctcctgccgctggccttgctgctccacgccgccaggccgttcgaaatgttgcagatggctgggcagtgctcccaaaatgaatattttgacagtttgttgcatgcttgcataccttgtcaacttcgatgttcttctaatactcctcctctaacatgtcagcgttattgtaatgcaagtgtgaccaattcagtgaaaggaacgaatgcgattctctggacctgtttgggactgagcttaataatttctttggcagttttcgtgctaatgtttttgctaaggaagataaactct

SEQ ID NO: 1315 - DNA, 564 bp, Artificial Sequence
  Synthetic Polynucloetide
atggccacttacgaggttctctgtgaggtggcgcggaaactgggcacggatgacagggaagtggtattgttcctcctaaacgtgttcatacctcaacccacactggcccaattaattggagctcttagagctttaaaggaggagggcaggttaacgtttcccctgttagcggaatgtctgtttcgtgcaggtcgcagagacctcttgcgcgacctgcttcacttagacccgcgttttttagagcgccacctagcgggcacaatgagttatttcagcccttatcagctcactgttctccacgtagacggggagctgtgtgcgagggatattaggtctttgatatttttaagcaaggacactatagggtctcgcagcacaccacagacattcttacactgggtgtactgtatggaaaacttagacctactgggtcccactgacgtggatgccctaatgtcaatgcttagatctttgtcaagagtagacctacagcgccaagtgcaaaccctaatgggccttcacctttccggcccatcacactcccaacactatcgccatacacca

SEQ ID NO: 1316 - DNA, 723 bp, Artificial Sequence
  Synthetic Polynucloetide
atgtccgactccaaggaggtccctagccttccatttttgcgacacttgctcgaagagttggacagccatgaggacagcttgctgctgtttctgtgtcacgacgcggccccgggctgcacgacggtcacgcaagctttgtgctcgcttagccaacagcgcaagctgaccctcgcggctctggtcgagatgctctacgtgctgcagcgtatggatcttctcaagagccgcttcgggctcagcaaggagggggccgagcaattgctgggcacaagctttctcacgcgctaccgcaagctcatggtttgcgtgggtgaggagctcgactcgagcgagctacgcgctctacgcttgttcgcgtgcaacctgaatccgagcctgagcacggcgctttctgagagcagccgctttgtcgagcttgtactcgcgcttgaaaacgtaggactcgtctcgccatcgagtgtttccgtgcttgcggacatgttgcgcactcttcggcgcctcgatttgtgccagcagcttgttgagtacgaacaacaagagcaagccaggtaccgttactgttacgcggcctcgccctcattgccagttcgtacgttacgtcgggggcacggcgcgagtgaacacgagcagctgtgcatgcccgtgcaagaatcctctgacagccccgagctgctgcgcacgcccgtacaagaatcctccagcgacagccccgagcaaacgact

SEQ ID NO: 1317 - DNA, 564 bp, Artificial Sequence
  Synthetic Polynucloetide
atggctacctacgaggtgctgtgcgaggtggcaagaaagctgggcaccgacgacagagaagtggtgctgttcctgctgaacgtgttcatccctcagcctacactggcccagctgatcggtgcactgagagccctgaaagaggaaggccggctgacctttcctctgctggccgaatgcctgttcagagccggaagaagggatctgctgcgggacctgctgcatctggaccccagatttctggaaagacacctggccggcaccatgagctacttcagcccttaccagctgaccgtgctgcacgttgacggcgaactgtgcgccagagatattcggagcctgatcttcctgagcaaggacaccatcggcagccggtctacccctcagacatttctgcactgggtgtactgcatggaaaacctggacctgctcggccccacagatgtggatgccctgatgtccatgctgagaagcctgagcagagtggacctccagagacaggtgcagacactgatgggactgcacctgagcggacctagccacagccagcactacagacacacccct

SEQ ID NO: 1318 - DNA, 1200 bp, Artificial Sequence
  Synthetic Polynucloetide
atgctggaaggcgtgcaggtggaaaccatcagccctggcgacggcagaaccttccctaagaggggccagacctgcgtggtgcactacaccggaatgctggaagatggcaagaaggtggacagcagccgggaccggaacaagcccttcaagttcatgctgggcaagcaggaagtgatccggggctgggaagagggcgtggcccagatgtctgtgggccagagagccaagctgaccatctcccccgattacgcctacggcgctacaggccaccctggcatcattcctccacacgccacactggtgttcgacgtggaactgctgaagctggaaagcggcggaggcagcggagtggatggcttcggagatgtgggagccctggaaagcctgagaggcaacgccgacctggcctacatcctgagcatggaaccttgcggccactgcctgattatcaacaacgtgaacttctgccgcgagagcggcctgagaaccagaaccggcagcaacatcgactgcgagaagctgcggcggagattcagcagcctgcacttcatggtggaagtgaagggcgacctgaccgccaagaaaatggtgctggccctgctggaactggcccagcaggatcatggcgctctggactgctgtgtggtcgtgatcctgagccacggctgccaggcttcccatcttcagttccctggcgctgtgtacggcaccgatggctgtcctgtgtccgtggaaaagatcgtgaacatcttcaacggcaccagctgccccagcctgggcggaaagcccaagctgttctttattcaagcctgtggcggcgagcagaaggaccacggctttgaggtggcctccaccagccctgaggatgagagccctggcagcaaccctgagcctgacgccaccccattccaggaaggactgcggaccttcgaccagctggacgccatctctagcctgcccacccccagcgacatcttcgtgtcctacagcaccttccccggctttgtgtcctggcgggaccctaagagcggctcttggtacgtggaaaccctggacgacatctttgagcagtgggctcacagcgaggacctccagagcctgctgctgagagtggctaacgccgtgtccgtgaagggcatctacaagcagatgcctggctgcttcaacttcctgcggaagaagctgtttttcaagaccagc

SEQ ID NO: 1319 - DNA, 810 bp, Artificial Sequence
  Synthetic Polynucloetide
atggattggatatggaggatactttttctcgtgggggcagcaaccggggctcattccgaggttcagttggtcgaatcaggcgggggcctcgtccaacccggcggaagcctgcggctgtcttgcgcagcaagtggtagtgtgttcaagatcaacgttatggcctggtatcgccaggctccgggaaaagggagagagctggttgcggggatcattagcggtggctccaccagctacgctgacagtgtgaagggaaggttcactatatcacgcgacaacgcaaagaatacattgtacctccagatgaatagcttgcggcccgaagacacggcagtctactattgtgcctttatcacaacagagagcgactatgacctgggccgccggtattgggggcagggaacccttgtgaccgtttcatccggcggaggcggaagtggaggcggaggatctggcggcggaggctctgaggtgcagctcgtggaatcaggcggaggtcttgtacagccaggaaattctcttcggctgtcttgcgccgcgagcgggttcaccttcagcagcttcggaatgagctgggtaagacaggcaccggggaaaggcctggagtgggtgagctcaatcagtgggagcgggtcagataccctgtacgcggattccgtgaagggcagattcacaatctctcgggacaatgctaagacaacactttaccttcagatgaactctctgcgacccgaggataccgctgtctactactgtacaataggaggttctctgtccagaagttctcaagggacactggtgaccgtctccagc

SEQ ID NO: 1320 - DNA, 738 bp, Artificial Sequence
  Synthetic Polynucloetide
atggccctgcctgtgacagctctgctgctgcctctggcactgctgctgcacgccgccagacctgagatcgtgctgacacagagccctgccaccctgtctctgagccctggcgaaagagccaccctgagctgtagagccagccagagcgtgtccagctacctggcctggtatcagcagaagcccggccaggctccccggctgctgatctacgatgccagcaatagagccaccggcatccccgccagattttccggctctggcagcggcaccgacttcaccctgaccatcgaggacttcgccgtgtactactgccagcagagcaccttcggccagggcaccaaggtggaaatcaagggcggaggcggatctggcggcggaggatctgggggaggcggctctcaggtgtacctggtggaaagcggagggggcgtggtgcagcctggaagaagcctgagactgagctgtgccgccagcggcttcaccttcagcaactacggaatgcactgggtgcgccaggcccctggcaaaggactggaatgggtggccctgatttggtacgacggcagcaacaagtattacgccgacagcgtgaagggccggttcaccatcagccgggacaacagcaagaacaccctgtacctccagatgaccagcctgcgggtggaagataccgccgtgtattattgcgccagcaacgtggaccactggggccagggaacactcgtgaccgtgtctagc

SEQ ID NO: 1321 - DNA, 759 bp, Artificial Sequence
  Synthetic Polynucloetide
atggccctgcctgtgacagctctgctgctgcctctggcactgctgctgcacgccgccagacctgagatcgtgctgacacagagccctgccaccctgtctctgagccctggcgaaagagccaccctgagctgtagagccagccagagcgtgtccagctacctggcctggtatcagcagaagcccggccaggctccccggctgctgatctacgatgccagcaatagagccaccggcatccccgccagattttccggctctggcagcggcaccgacttcaccctgaccatcagctccctggaacccgaggacttcgccgtgtactactgccagcagagcagcaactggccccggacctttggacagggcaccaaggtggaaatcaagggcggaggcggatctggcggcggaggatctgggggaggcggctctcaggtgcagctggtggaaagtgggggaggatggcagcctggcagaagcctgagactggactgcaaggccagcggcatcaccttcagcaacagcggaatgcactgggtgcgccaggcccctggaaagggactggaatgggtggccgtgatctatgacggcagcaagcggtactacgccgacagcgtgaagggccggttcatcagccgggacaacagcaagaataccctgttcctccagatgaacagcctgcgggccgaggacacagccgtgtattattgcgccaccaacgacgactactggggccagggaacactcgtgaccgtgtcctct

SEQ ID NO: 1322 - DNA, 789 bp, Artificial Sequence
  Synthetic Polynucloetide
atggccctgcctgtgacagctctgctgctgcctctggcactgctgctgcacgccgccagacctgagatcgtgctgacacagagccctggcacactgtcactgtctccaggcgaaagagccacactgagctgtagagcctctcagagcgtgggcagctcttacctggcttggtatcagcagaagcccggacaggctcccagactgctgatctacggcgctttcagcagagccacaggcatccccgatagattttctggcagcggctccggcaccgacttcaccctgacaatcagcagactggaacccgaggacttcgccgtgtactactgtcagcagtacggcagcagcccttggacctttggacagggcaccaaggtggaaatcaagagaggcggaggcggaagtggaggcggaggatctggcggcggaggctctcaagtgcagctggttgaatcaggtggcggcgttgtgcagcctggcagaagtctgagactgtcttgtgccgccagcggcttcaccttcagcagctacacaatgcactgggtccgacaggcccctggcaaaggactggaatgggtcacctttatcagctacgacggcaacaacaagtattacgccgacagcgtgaagggcagattcaccatctccagagacaacagcaagaacaccctgtacctccagatgaacagcctgagagccgaggacaccgccatctactactgcgccagaacaggatggctgggacccttcgattattggggccagggcacactcgtgaccgtgtcatct

SEQ ID NO: 1323 - DNA, 1128 bp, Artificial Sequence
  Synthetic Polynucloetide
atggccctgcctgtgacagctctgctgctgcctctggcactgctgctgcacgccgccagacctgagatcgtgctgacacagagccctgccaccctgtctctgagccctggcgaaagagccaccctgagctgtagagccagccagagcgtgtccagctacctggcctggtatcagcagaagcccggccaggctccccggctgctgatctacgatgccagcaatagagccaccggcatccccgccagattttccggctctggcagcggcaccgacttcaccctgaccatcgaggacttcgccgtgtactactgccagcagagcaccttcggccagggcaccaaggtggaaatcaagggcggaggcggatctggcggcggaggatctgggggaggcggctctcaggtgtacctggtggaaagcggagggggcgtggtgcagcctggaagaagcctgagactgagctgtgccgccagcggcttcaccttcagcaactacggaatgcactgggtgcgccaggcccctggcaaaggactggaatgggtggccctgatttggtacgacggcagcaacaagtattacgccgacagcgtgaagggccggttcaccatcagccgggacaacagcaagaacaccctgtacctccagatgaccagcctgcgggtggaagataccgccgtgtattattgcgccagcaacgtggaccactggggccagggaacactcgtgaccgtgtctagcggcggaggcggaagtggaggcggaggatctggcggcggaggctctgaggtgcagctcgtggaatcaggcggaggtcttgtacagccaggaaattctcttcggctgtcttgcgccgcgagcgggttcaccttcagcagcttcggaatgagctgggtaagacaggcaccggggaaaggcctggagtgggtgagctcaatcagtgggagcgggtcagataccctgtacgcggattccgtgaagggcagattcacaatctctcgggacaatgctaagacaacactttaccttcagatgaactctctgcgacccgaggataccgctgtctactactgtacaataggaggttctctgtccagaagttctcaagggacactggtgaccgtctccagc

SEQ ID NO: 1324 - DNA, 1149 bp, Artificial Sequence
  Synthetic Polynucloetide
atggccctgcctgtgacagctctgctgctgcctctggcactgctgctgcacgccgccagacctgagatcgtgctgacacagagccctgccaccctgtctctgagccctggcgaaagagccaccctgagctgtagagccagccagagcgtgtccagctacctggcctggtatcagcagaagcccggccaggctccccggctgctgatctacgatgccagcaatagagccaccggcatccccgccagattttccggctctggcagcggcaccgacttcaccctgaccatcagctccctggaacccgaggacttcgccgtgtactactgccagcagagcagcaactggccccggacctttggacagggcaccaaggtggaaatcaagggcggaggcggatctggcggcggaggatctgggggaggcggctctcaggtgcagctggtggaaagtgggggaggatggcagcctggcagaagcctgagactggactgcaaggccagcggcatcaccttcagcaacagcggaatgcactgggtgcgccaggcccctggaaagggactggaatgggtggccgtgatctatgacggcagcaagcggtactacgccgacagcgtgaagggccggttcatcagccgggacaacagcaagaataccctgttcctccagatgaacagcctgcgggccgaggacacagccgtgtattattgcgccaccaacgacgactactggggccagggaacactcgtgaccgtgtcctctggcggaggcggaagtggaggcggaggatctggcggcggaggctctgaggtgcagctcgtggaatcaggcggaggtcttgtacagccaggaaattctcttcggctgtcttgcgccgcgagcgggttcaccttcagcagcttcggaatgagctgggtaagacaggcaccggggaaaggcctggagtgggtgagctcaatcagtgggagcgggtcagataccctgtacgcggattccgtgaagggcagattcacaatctctcgggacaatgctaagacaacactttaccttcagatgaactctctgcgacccgaggataccgctgtctactactgtacaataggaggttctctgtccagaagttctcaagggacactggtgaccgtctccagc

SEQ ID NO: 1325 - DNA, 1179 bp, Artificial Sequence
  Synthetic Polynucloetide
atggccctgcctgtgacagctctgctgctgcctctggcactgctgctgcacgccgccagacctgagatcgtgctgacacagagccctggcacactgtcactgtctccaggcgaaagagccacactgagctgtagagcctctcagagcgtgggcagctcttacctggcttggtatcagcagaagcccggacaggctcccagactgctgatctacggcgctttcagcagagccacaggcatccccgatagattttctggcagcggctccggcaccgacttcaccctgacaatcagcagactggaacccgaggacttcgccgtgtactactgtcagcagtacggcagcagcccttggacctttggacagggcaccaaggtggaaatcaagagaggcggaggcggaagtggaggcggaggatctggcggcggaggctctcaagtgcagctggttgaatcaggtggcggcgttgtgcagcctggcagaagtctgagactgtcttgtgccgccagcggcttcaccttcagcagctacacaatgcactgggtccgacaggcccctggcaaaggactggaatgggtcacctttatcagctacgacggcaacaacaagtattacgccgacagcgtgaagggcagattcaccatctccagagacaacagcaagaacaccctgtacctccagatgaacagcctgagagccgaggacaccgccatctactactgcgccagaacaggatggctgggacccttcgattattggggccagggcacactcgtgaccgtgtcatctggcggaggcggaagtggaggcggaggatctggcggcggaggctctgaggtgcagctcgtggaatcaggcggaggtcttgtacagccaggaaattctcttcggctgtcttgcgccgcgagcgggttcaccttcagcagcttcggaatgagctgggtaagacaggcaccggggaaaggcctggagtgggtgagctcaatcagtgggagcgggtcagataccctgtacgcggattccgtgaagggcagattcacaatctctcgggacaatgctaagacaacactttaccttcagatgaactctctgcgacccgaggataccgctgtctactactgtacaataggaggttctctgtccagaagttctcaagggacactggtgaccgtctccagc

SEQ ID NO: 1326 - DNA, 777 bp, Artificial Sequence
  Synthetic Polynucloetide
atggactggatttggcgcatccttttccttgtcggcgctgctaccggcgcgcattctgagattgtactgactcagtctcccgctactctgtccctttcccccggcgaacgcgcgaccctctcatgctcagccagcatctctgtgtcttacatgtattggtatcagcaaaagcctgggcaagcgccaagactgctgatatacgacatgtccaacctggcaagcggcatcccggcgagattctccggatctggctcagggaccgattttacgctcactatcagttccttggagcctgaggatttcgcggtgtattactgtatgcagtggagcggttatccttacacatttggaggcggaactaaagtggagataaagggcggtggcggttcaggtggagggggaagcggtggtggtggctcagaggtgcaactcgtggagtccggtggcggtctggtgcagccaggggggtccttgcgcctgagctgcgccgcttctgggtttacgttttccccattcgctatgtcctgggtccggcaggcgcccggtaaaggtctggaatgggtggcaaagatttccccaggggggtcttggacttattactccgacaccgtgacaggtcgatttaccatcagcagggataacgccaaaaacagcctctacctccagatgaactccttgcgagccgaagataccgccgtctattactgtgccaggcagctgtggggatactacgcgctggacatttgggggcagggaacaactgtgactgtatcctca

SEQ ID NO: 1327 - DNA, 141 bp, Artificial Sequence
  Synthetic Polynucloetide
atggactggatttggcgcatccttttccttgtcggcgctgctaccggcgcgcattctggccacagaccactggacaagaagcgggaagaggcgccctccctgcgcccagctcctccacccatcagtgggggtggctacaga

SEQ ID NO: 1328 - DNA, 903 bp, Artificial Sequence
  Synthetic Polynucloetide
atgactagaggagtgcaggtggagactatctccccaggagacgggcgcaccttccccaagcgcggccagacctgcgtggtgcactacaccgggatgcttgaagatggaaagaaagttgattcctcccgggacagaaacaagccctttaagtttatgctaggcaagcaggaggtgatccgaggctgggaagaaggggttgcccagatgagtgtgggtcagagagccaaactgactatatctccagattatgcctatggtgccactgggcacccaggcatcatcccaccacatgccactctcgtcttcgatgtggagcttctaaaactggaagggatccacatggccacttacgaggttctctgtgaggtggcgcggaaactgggcacggatgacagggaagtggtattgttcctcctaaacgtgttcatacctcaacccacactggcccaattaattggagctcttagagctttaaaggaggagggcaggttaacgtttcccctgttagcggaatgtctgtttcgtgcaggtcgcagagacctcttgcgcgacctgcttcacttagacccgcgttttttagagcgccacctagcgggcacaatgagttatttcagcccttatcagctcactgttctccacgtagacggggagctgtgtgcgagggatattaggtctttgatatttttaagcaaggacactatagggtctcgcagcacaccacagacattcttacactgggtgtactgtatggaaaacttagacctactgggtcccactgacgtggatgccctaatgtcaatgcttagatctttgtcaagagtagacctacagcgccaagtgcaaaccctaatgggccttcacctttccggcccatcacactcccaacactatcgccatacacca

SEQ ID NO: 1329 - DNA, 1224 bp, Artificial Sequence
  Synthetic Polynucloetide
atgggcgtccaagtcgaaaccattagtcccggcgatggcagaacatttcctaaaaggggacaaacatgtgtcgtccattatacaggcatgttggaggacggcaaaaaggtggacagtagtagagatcgcaataaacctttcaaattcatgttgggaaaacaagaagtcattaggggatgggaggagggcgtggctcaaatgtccgtcggccaacgcgctaagctcaccatcagccccgactacgcatacggcgctaccggacatcccggaattattccccctcacgctaccttggtgtttgacgtcgaactgttgaagctcgggactagaggagtgcaggtggagactatctccccaggagacgggcgcaccttccccaagcgcggccagacctgcgtggtgcactacaccgggatgcttgaagatggaaagaaagttgattcctcccgggacagaaacaagccctttaagtttatgctaggcaagcaggaggtgatccgaggctgggaagaaggggttgcccagatgagtgtgggtcagagagccaaactgactatatctccagattatgcctatggtgccactgggcacccaggcatcatcccaccacatgccactctcgtcttcgatgtggagcttctaaaactggaagggatccacatggccacttacgaggttctctgtgaggtggcgcggaaactgggcacggatgacagggaagtggtattgttcctcctaaacgtgttcatacctcaacccacactggcccaattaattggagctcttagagctttaaaggaggagggcaggttaacgtttcccctgttagcggaatgtctgtttcgtgcaggtcgcagagacctcttgcgcgacctgcttcacttagacccgcgttttttagagcgccacctagcgggcacaatgagttatttcagcccttatcagctcactgttctccacgtagacggggagctgtgtgcgagggatattaggtctttgatatttttaagcaaggacactatagggtctcgcagcacaccacagacattcttacactgggtgtactgtatggaaaacttagacctactgggtcccactgacgtggatgccctaatgtcaatgcttagatctttgtcaagagtagacctacagcgccaagtgcaaaccctaatgggccttcacctttccggcccatcacactcccaacactatcgccatacacca

SEQ ID NO: 1330 - DNA, 2946 bp, Artificial Sequence
  Synthetic Polynucloetide
atggccttaccagtgaccgccttgctcctgccgctggccttgctgctccacgccgccaggccggaggtgcagctggttgaatctggcggaggactggttcagcctggcggatctctgagactgtcctgcacattttccggcggcaccttcagcagctacacaatgggctggttcagacaggcccctggcaaagaacgggaatttgtggccgaagtccgatggggcggagtgaccacatacagcaacagcctgaaggacagattcagcatcagcgaggacagcgtgaagaacgccgtgtacctccagatgaactccctgaagcctgaggacacagccgtgtactattgtgccgctgtgcggcagatgtacatgaccgtggtgcctgattattggggccagggcacactggtcacagtgtctagcagcggcggaggcggatctgacatccagatgacacagagccctagcagcctgtctgccagcgtgggagacagagtgaccatcacatgcaaggccagcgaccacatcaacaactggctggcctggtatcagcagaagcctggcaaggcccctaagctgctgatctacggcgctaccacactggaaacaggcgtgcccagcagattttctggcagcggctctggcaccgacttcaccctgacaatatccagcctccagcctgaggacttcgccacctactactgtcagcagagctggaacaccccttggacattcggccagggcaccaaggtggaaatcaagagactcgaggacctgaagaacgtgttcccacctgaggtggccgtgttcgagcctagcgaggccgagatcagccacacccagaaagccaccctcgtgtgcctggctaccggcttctaccccgaccatgtggaactgtcttggtgggtcaacggcaaagaggtgcacagcggcgtgtgtaccgacccccagccactgaaagaacagcccgccctgaacgacagccggtactgcctgagcagcagactgagagtgtccgccaccttctggcagaacccccggaaccacttcagatgccaggtgcagttctacggcctgagcgagaacgacgagtggacccaggacagagccaagcccgtgacccagatcgtgtctgccgaagcctggggcagagccgattgcggctttaccagcgagagctaccagcagggcgtgctgagcgccaccatcctgtacgagatcctgctgggcaaggccaccctgtacgccgtgctggtgtctgccctggtgctgatggctatggtcaagcggaaggacagccggggaagggccaagcgatctggatctggagcaacaaacttctcactactcaaacaagcaggtgacgtggaggagaatcccgggcctactagtatggactggatttggcgcatccttttccttgtcggcgctgctaccggcgcgcattccttcgaagaagttcagctggttgaatctggcggcggactggttcaacctggcggatctctgagactgagctgtgccgcctctggctacgcctttagcagctactgggtcaactgggttcgacaggcccctggcaaaggactggaatgggtcgcccaaatctatcccggcgacggcgacaccaactacaacggcaagttcaagggcagattcaccatcagccgggacaacagcaagaacaccctgtacctccagatgaactccctgagagccgaggacaccgccgtgtactattgtgccagatccatcaccaccgtcgtgggctgcgctatggattattggggccagggaaccctggtcaccgtgtcctctacgcgtatccagaaccctgatcctgccgtgtaccagctgcgggatagcaagagcagcgacaagagcgtgtgtctgttcaccgacttcgacagccagaccaacgtgtcccagagcaaggactccgacgtgtacatcaccgataagtgcgtgctggacatgcggagcatggacttcaagagcaactccgccgtggcctggtccaacaagtccgatttcgcctgcgccaacgccttcaacaacagcattatccccgaggacacattcttcccaagccccgagagcagctgcgacgtgaagctggtggaaaagagcttcgagacagacaccaacctgaacttccagaacctgagcgtgatcggcttcagaatcctgctgctgaaagtggccggctttaacctgctgatgaccctgcggctgtggtccagccgcgccaagagaagcggatctggcgtgaagcagaccctgaatttcgacctgctgaagctggctggcgacgtggaatccaacccaggcccttctagaggccatatgaccgagtacaagcccacggtgcgcctcgccacccgcgacgacgtccccagggccgtacgcaccctcgccgccgcgttcgccgactaccccgccacgcgccacaccgtcgatccggaccgccacatcgagcgggtcaccgagctgcaagaactcttcctcacgcgcgtcgggctcgacatcggcaaggtgtgggtcgcggacgacggcgccgcggtggcggtctggaccacgccggagagcgtcgaagcgggggcggtgttcgccgagatcggcccgcgcatggccgagttgagcggttcccggctggccgcgcagcaacagatggaaggcctcctggcgccgcaccggcccaaggagcccgcgtggttcctggccaccgtcggcgtctcgcccgaccaccagggcaagggtctgggcagcgccgtcgtgctccccggagtggaggcggccgagcgcgccggggtgcccgccttcctggagacctccgcgccccgcaacctccccttctacgagcggctcggcttcaccgtcaccgccgacgtcgaggtgcccgaaggaccgcgcacctggtgcatgacccgcaagcccggtgcctga

SEQ ID NO: 1331 - DNA, 1764 bp, Artificial Sequence
  Synthetic Polynucloetide
atggccttaccagtgaccgccttgctcctgccgctggccttgctgctccacgccgccaggccggacatccagatgacacagagccctagcagcctgtctgccagcgtgggagacagagtgaccatcacatgcaaggccagcgaccacatcaacaactggctggcctggtatcagcagaagcctggacaggcccctaagctgctgatctacggcgctaccacactggaaacaggcgtgcccagcagattttctggcagcggctctggcaccgactacaccctgacaatatccagcctccagcctgaggacttcgccacctactactgtcagcagagctggaacaccccttggacattcggccagggcaccaagctggaaatcaagagactcgaggccgagatcagccacacccagaaagccaccctcgtgtgcctggctaccggcttctaccccgaccatgtggaactgtcttggtgggtcaacggcaaagaggtgcacagcggcgtgtgtaccgacccccagccactgaaagaacagcccgccctgaacgacagccggtactgcctgagcagcagactgagagtgtccgccaccttctggcagaacccccggaaccacttcagatgccaggtgcagttctacggcctgagcgagaacgacgagtggacccaggacagagccaagcccgtgacccagatcgtgtctgccgaagcctggggcagagccgattgcggctttaccagcgagagctaccagcagggcgtgctgagcgccaccatcctgtacgagatcctgctgggcaaggccaccctgtacgccgtgctggtgtctgccctggtgctgatggctatggtcaagcggaaggacagccggggaagggccaagcgatctggatctggagcaacaaacttctcactactcaaacaagcaggtgacgtggaggagaatcccgggcctactagtatggactggatttggcgcatccttttccttgtcggcgctgctaccggcgcgcattccttcgaacaagttcagcttcaacagcctggcgctgagctggtcaaacctggcgcttctgtgaagatgagctgcaaagccagcggctacgccttcagcagctactggatcaactggatgaagcagaaacccggccagggactcgaatggatcggccaaatctatcccggcgacggcgacaccaactacaacggcaagttcaagggcagagccacactgaccgccgatacctctagcagcacagcctacatgcagctgagcagcctgaccagcgaagatagcgccgtgtacttctgtgcccggtccatcacaacagtcgtgggctgcgctatggactattggggccagggaacaagcgtgaccgtgtctagtacgcgtgacaagagcgtgtgtctgttcaccgacttcgacagccagaccaacgtgtcccagagcaaggactccgacgtgtacatcaccgataagtgcgtgctggacatgcggagcatggacttcaagagcaactccgccgtggcctggtccaacaagtccgatttcgcctgcgccaacgccttcaacaacagcattatccccgaggacacattcttcccaagccccgagagcagctgcgacgtgaagctggtggaaaagagcttcgagacagacaccaacctgaacttccagaacctgagcgtgatcggcttcagaatcctgctgctgaaagtggccggctttaacctgctgatgaccctgcggctgtggtccagc

SEQ ID NO: 1332 - DNA, 2274 bp, Artificial Sequence
  Synthetic Polynucloetide
atggccttaccagtgaccgccttgctcctgccgctggccttgctgctccacgccgccaggccggaagtgcaggttttggagtctggcggaggactggttcagcctggcggatctctgagactgtcttgtgccgccagcggcttcaccttcagcaactttgccatgagctgggtccgacaggcccctggcaaaggacttgaatgggtgtccacaatcagcggcagcgccggcacaacagattacgccgattctgtgaagggcagattcaccatcagccgggacaacagcaagaaaaccctgtacctccagatgaacagcctgcgcgtggaagataccgccgtgtactactgtgccgatggcagaggccccttcttcgattatcgcggccagggcacactggtcaccgtttcttctggtaccggcggaggcggatctggcggcggaggtagcggtggcggaggatctgaattcgacatccagatgacacagagccctagcagcctgtctgccagcgtgggagacagagtgaccatcacatgcaaggccagcgaccacatcaacaactggctggcctggtatcagcagaagcctggacaggcccctaagctgctgatctacggcgctaccacactggaaacaggcgtgcccagcagattttctggcagcggctctggcaccgactacaccctgacaatatccagcctccagcctgaggacttcgccacctactactgtcagcagagctggaacaccccttggacattcggccagggcaccaagctggaaatcaagagactcgaggacctgaagaacgtgttcccacctgaggtggccgtgttcgagcctagcgaggccgagatcagccacacccagaaagccaccctcgtgtgcctggctaccggcttctaccccgaccatgtggaactgtcttggtgggtcaacggcaaagaggtgcacagcggcgtgtgtaccgacccccagccactgaaagaacagcccgccctgaacgacagccggtactgcctgagcagcagactgagagtgtccgccaccttctggcagaacccccggaaccacttcagatgccaggtgcagttctacggcctgagcgagaacgacgagtggacccaggacagagccaagcccgtgacccagatcgtgtctgccgaagcctggggcagagccgattgcggctttaccagcgagagctaccagcagggcgtgctgagcgccaccatcctgtacgagatcctgctgggcaaggccaccctgtacgccgtgctggtgtctgccctggtgctgatggctatggtcaagcggaaggacagccggggaagggccaagcgatctggatctggagcaacaaacttctcactactcaaacaagcaggtgacgtggaggagaatcccgggcctactagtatggactggatttggcgcatccttttccttgtcggcgctgctaccggcgcgcattccttcgaacaagttcagcttcaacagcctggcgctgagctggtcaaacctggcgcttctgtgaagatgagctgcaaagccagcggctacgccttcagcagctactggatcaactggatgaagcagaaacccggccagggactcgaatggatcggccaaatctatcccggcgacggcgacaccaactacaacggcaagttcaagggcagagccacactgaccgccgatacctctagcagcacagcctacatgcagctgagcagcctgaccagcgaagatagcgccgtgtacttctgtgcccggtccatcacaacagtcgtgggctgcgctatggactattggggccagggaacaagcgtgaccgtgtctagtacgcgtatccagaaccctgatcctgccgtgtaccagctgcgggatagcaagagcagcgacaagagcgtgtgtctgttcaccgacttcgacagccagaccaacgtgtcccagagcaaggactccgacgtgtacatcaccgataagtgcgtgctggacatgcggagcatggacttcaagagcaactccgccgtggcctggtccaacaagtccgatttcgcctgcgccaacgccttcaacaacagcattatccccgaggacacattcttcccaagccccgagagcagctgcgacgtgaagctggtggaaaagagcttcgagacagacaccaacctgaacttccagaacctgagcgtgatcggcttcagaatcctgctgctgaaagtggccggctttaacctgctgatgaccctgcggctgtggtccagc

SEQ ID NO: 1333 - DNA, 987 bp, Artificial Sequence
  Synthetic Polynucloetide
atggccttaccagtgaccgccttgctcctgccgctggccttgctgctccacgccgccaggccggacgtgcagatgatccagacccccgatagcctggccgtgtccctgggacagagagccaccatctcttgcagagccagcgagagcgtggacaactacggcatcagcttcatgcactggtatcagcagaagcccggccagagccccaagctgctgatctacagagcctccaacctggaaagcggcatccccgccagattttccggcagcggcagcagaaccgacttcaccctgaccatcaaccccgtggaaaccgacgacgtggcaacctactactgccagcagaacaacaaggacccccccacctttggcggaggcaccaagctggaaatcaagggcggaggcggaagtggaggcggaggatctggcggcggaggctctgggggaggcggctctcaggtgcaactccagcagtctggcgctgagcttgtgaagcctggggccagcgtgaagattagctgcaaggccagcggctacgccttcagcagctactggatgaactgggtcaagcagcggcctggcaagggcctggaatggatcggccaaatctaccccggcgacggcgacaccacctacaacggcaagttcaagggcaaggccaccctgacagccgacaagagcagcagcaccgtgtacatgcaactgaacagcctgaccagcgaggacagcgccgtgtacttctgcgtgcggtactactacggcagctccggctacttcgactattggggccagggcaccacactgaccgtgtcctctacgcgtggaggcggatctatggaccctgatctcgaaattgaggccgcctttctggaacgcgagaacactgccctggaaaccagggtcgcagagctgagacagagagtgcagagactgcggaacagagtgtctcagtaccgcaccagatatggcccactcggcggaggtaaa

SEQ ID NO: 1334 - DNA, 960 bp, Artificial Sequence
  Synthetic Polynucloetide
atggccttaccagtgaccgccttgctcctgccgctggccttgctgctccacgccgccaggccggacgtgcagatgatccagacccccagcagcctgtctgccagcctgggcgatagagtgaccatcagctgtcgggccagccaggacatcggcaactacctgaactggtatcagcagaaacccgacggcaccgtgaagctgctgatctactacaccagcagactgcacagcggcgtgcccagcagattttctggcagcggctctggcaccgagtacagcctgaccatctccaacctggaacaggaagatattgctacctacttctgtcagcaaggcagcgccctgccccctacatttggcggcggaacaaagctggaaatcaacggcggaggcggaagtggaggcggaggatctggcggcggaggctctgctctccagctccagcagtctggcgcagaactcgtgcggcctggcgcttctgtgaccctgagctgtaaagccagcggctacaccttcaccgactacgagatgcactgggtcaagcagacccctgtgcacggcctggaatggatcggagccatcgaccctgagacaggcggcaccgcctacaaccagaagttcgagggcaaggccatcctgaccgccgacaagagcagcagcacagcctacatggaactgcggagcctgacctccgaggacagccccgtgtactactgtgccagacggcggtactacggcagcagctccttcgactattggggccagggcaccaccctgaccgtgtctagtacgcgtggaggcggatctatggaccctgatctcgaaattgaggccgcctttctggaacgcgagaacactgccctggaaaccagggtcgcagagctgagacagagagtgcagagactgcggaacagagtgtctcagtaccgcaccagatatggcccactcggcggaggtaaa

SEQ ID NO: 1335 - DNA, 966 bp, Artificial Sequence
  Synthetic Polynucloetide
atggccttaccagtgaccgccttgctcctgccgctggccttgctgctccacgccgccaggccggacatcgtgctgacacagagccctgccaccctgtctctgagccctggcgatagagccaccatcagctgtagagccagcgagagcgtgaccatcctgggcagccacctgatctactggtatcagcagaagcccggccagccccccagactgctgattcagctggcctccaatgtgcagaccggcgtgccagccagattttccggcagcggcagcagaaccgacttcaccctgaccatcagcagcgtggaacccgaggacttcgccgtgtactactgcctccagagccggaccatccccagaacattcggccagggcaccaagctggaaatcaagagaggcggaggcggaagtggaggcggaggatctggcggcggaggctctcaggtgcagctggtgcagtctggccccgaagtgaagaaacccggcgagtccgtgaagatcagctgcaaggccagcggctacaccttccggcactacagcatgaactgggtcaagcaggccccaggccagggcctgaagtggatgggcagaatcaacaccgagagcggcgtgcccatctacgccgacgacttcaagggccggttcagcttcaccgtggacaccagcgccagcaccgcctacctggaaatctccagcctgaccagcgaggataccgccgtgtatttctgctccaacgactacctgtacagcctggatttctggggccagggaaccaccctgacagtgtcctctacgcgtggaggcggatctatggaccctgatctcgaaattgaggccgcctttctggaacgcgagaacactgccctggaaaccagggtcgcagagctgagacagagagtgcagagactgcggaacagagtgtctcagtaccgcaccagatatggcccactcggcggaggtaaa

SEQ ID NO: 1336 - DNA, 966 bp, Artificial Sequence
  Synthetic Polynucloetide
atggccttaccagtgaccgccttgctcctgccgctggccttgctgctccacgccgccaggccggacatccagatgacccagagccctagctcactgagcgccagcgtgggcgacagggtgaccattacctgctccgccagccaggacatcagcaactacctgaactggtaccagcagaagcccggcaaggcccccaagctgctgatctactacacctccaacctgcactccggcgtgcccagcaggttcagcggaagcggcagcggcaccgatttcaccctgaccatctccagcctgcagcccgaggacttcgccacctactactgccagcagtacaggaagctcccctggactttcggccagggcaccaaactggagatcaagcgtggcggaggcggaagtggaggcggaggatctggcggcggaggctctcaggtgcagctggtccagagcggcgccgaagtgaagaagcccggcagctccgtgaaagtgagctgcaaggccagcggcggcaccttcagcaactactggatgcactgggtgaggcaggcccccggacagggcctggagtggatgggcgccacctacaggggccacagcgacacctactacaaccagaagttcaagggccgggtgaccatcaccgccgacaagagcaccagcaccgcctacatggaactgagcagcctcaggagcgaggacaccgctgtgtattactgcgccaggggcgccatctacgacggctacgacgtgctggacaactggggccagggcacactggtgaccgtgtccagcacgcgtggaggcggatctatggaccctgatctcgaaattgaggccgcctttctggaacgcgagaacactgccctggaaaccagggtcgcagagctgagacagagagtgcagagactgcggaacagagtgtctcagtaccgcaccagatatggcccactcggcggaggtaaa

SEQ ID NO: 1337 - DNA, 981 bp, Artificial Sequence
  Synthetic Polynucloetide
atggccttaccagtgaccgccttgctcctgccgctggccttgctgctccacgccgccaggccggacatcgtgatgacccagagccccgatagcctggccgtgtctctgggagagagagccaccatcaactgcgagagcagccagagcctgctgaacagcggcaaccagaagaactacctgacctggtatcagcagaagcccggccagccccccaagcccctgatctattgggccagcaccagagaaagcggcgtgcccgatagattcagcggcagcggaagcggcaccgacttcaccctgaccatcagttctcttcaggccgaggacgtggccgtgtactactgccagaacgactacagctacccctacaccttcggccagggcaccaagctggaaatcaagagaggcggaggcggaagtggaggcggaggatctggcggcggaggctctgaagtgcagctggtgcagtctggggccgaagtgaagaagcctggcgagagcctgaagatcagctgcaagggcagcggctacagcttcaccgactactacatgaagtgggccagacagatgcccggcaagggcctggaatggatgggcgacatcatccccagcaacggggccaccttctacaaccagaaattcaagggccaagtgaccatctccgccgacaagagcatcagcaccacctacctccagtggtccagcctgaaggccagcgacaccgccatgtactattgcgccagaagccatctgctgcgggccagttggttcgcctattggggccagggaacaatggtcacagtgtccagcacgcgtggaggcggatctatggaccctgatctcgaaattgaggccgcctttctggaacgcgagaacactgccctggaaaccagggtcgcagagctgagacagagagtgcagagactgcggaacagagtgtctcagtaccgcaccagatatggcccactcggcggaggtaaa

SEQ ID NO: 1338 - DNA, 966 bp, Artificial Sequence
  Synthetic Polynucloetide
atggccttaccagtgaccgccttgctcctgccgctggccttgctgctccacgccgccaggccggacatccagatgacccagtctaccagttccctgagtgcatccctcggagacagggtgacgatcagttgcagcgcaagccaagggatcaataactatctgaactggtatcagcagaaaccggacggaacagtcgaactcctgatttattacaccagcacccttcagagtggcgtcccttcccggttcagtggctccggaagcgggaccgattactccctgaccatttctaatctggagccagaggacataggaacgtattattgccagcagtatagtaaactgccacgaacttttggaggggggacgaaactggagatcaaaggcggaggcggaagtggaggcggaggatctggcggcggaggctctcaggtgcaactccagcagtccggaagcgagcttatgatgccaggggcatcagtgaagatcagctgcaaggctactggctacaccttctctaattactggatagagtgggttaaacaaaggccagggcacggcctggaatggatcggcgagatcctgcctgggacaggccgaaccatttataacgagaagttcaaaggcaaggctactttcaccgcagatataagctctaatacagtgcaaatgcagctctcttccctgacaagtgaggatagtgccgtgtattattgcgcacgaagagattactatggaaatttttattacgctatggattattggggtcaaggaacaagtgtgaccgttagcagcacgcgtggaggcggatctatggaccctgatctcgaaattgaggccgcctttctggaacgcgagaacactgccctggaaaccagggtcgcagagctgagacagagagtgcagagactgcggaacagagtgtctcagtaccgcaccagatatggcccactcggcggaggtaaa

SEQ ID NO: 1339 - DNA, 951 bp, Artificial Sequence
  Synthetic Polynucloetide
atggccttaccagtgaccgccttgctcctgccgctggccttgctgctccacgccgccaggccggacatccagatgacccagagccctgccagcctgtccgtgtctgtgggcgagacagtgaccatcacctgtcgggccagcgagaacatctacagcaacctggcctggtatcagcagaagcagggcaagagcccccaactgctggtgtacgccgccaccaatctggccgatggcgtgcccagcagattttccggctctggcagcggcacccagtacagcctgaagatcaacagcctccagagcgaggacttcggcagctactactgccagcacttctggggcacctggacctttggaggaggcaccaccctggaaatcaagggcggaggcggaagtggaggcggaggatctggcggcggaggctctgaagtgcaactccagcagagcggccctgagcttgtgaagcctggcgcttccgtgaagatgagctgcaaggccagcggctacaccttcaccgactactacatgaagtggatgaagcagagccacggcaagtccctggaatggatcggcgacatcaaccccaacaacggcggcaccacctacaaccagaagttcaagggcaaggccaccctgaccgtggacaagagcagcagcaccgcctacatgcaactgaacagcctgaccagcgaggacagcgccgtgtactactgcgccagagactacggctacggctatttcgactactggggccagggcacaaccctgacagtgtcctctacgcgtggaggcggatctatggaccctgatctcgaaattgaggccgcctttctggaacgcgagaacactgccctggaaaccagggtcgcagagctgagacagagagtgcagagactgcggaacagagtgtctcagtaccgcaccagatatggcccactcggcggaggtaaa

SEQ ID NO: 1340 - DNA, 963 bp, Artificial Sequence
  Synthetic Polynucloetide
atggccttaccagtgaccgccttgctcctgccgctggccttgctgctccacgccgccaggccggacgagatcgtgctgacacagagccccgccaccctgtcactgtctccaggcgaaagagccaccctgagctgtagcgccagcagcagcgtgtcctacatgcactggtatcagcagaagcccggccaggcccccagactgctgatctacgataccagcaagctggcctccggcatccccgccagattttctggcagcggctccggcaccgacttcaccctgacaatcagcagcctggaacccgaggacgtggccgtgtactactgttttcaaggcagcgtgtaccccttcaccttcggccagggcaccaagctggaaatcaagagaggtggcggtggctcgggcggtggtgggtcgggtggcggcggatctcaggtgcagctccaggaatctggccctggcctcgtgaagcctagccagaccctgagcctgacctgtaccgtgtctggcggcagcatcagcacaagcggcatgggcgtgggctggatcagacagcaccctggcaagggcctggaatggatcggccacatttggtgggacgacgacaagcggtacaaccccgccctgaagtccagagtgaccatcagcgtggacaccagcaagaaccagttcagcctgaagctgagcagcgtgacagccgccgataccgccgtgtattattgcgcccggatggaactgtggtcctactacttcgactactggggccagggaaccctcgtgaccgtgtctagtacgcgtggaggcggatctatggaccctgatctcgaaattgaggccgcctttctggaacgcgagaacactgccctggaaaccagggtcgcagagctgagacagagagtgcagagactgcggaacagagtgtctcagtaccgcaccagatatggcccactcggcggaggtaaa

SEQ ID NO: 1341 - DNA, 960 bp, Artificial Sequence
  Synthetic Polynucloetide
atggccttaccagtgaccgccttgctcctgccgctggccttgctgctccacgccgccaggccggacatccagatgacacagactacatcctccctgtctgcctctctgggagacagagtcaccatcagttgcagggcaagtcaggacattagtaaatatttaaattggtatcagcagaaaccagatggaactgttaaactcctgatctaccatacatcaagattacactcaggagtcccatcaaggttcagtggcagtgggtctggaacagattattctctcaccattagcaacctggagcaagaagatattgccacttacttttgccaacagggtaatacgcttccgtacacgttcggaggggggaccaagctggagatcacaggtggcggtggctcgggcggtggtgggtcgggtggcggcggatctgaggtgaaactgcaggagtcaggacctggcctggtggcgccctcacagagcctgtccgtcacatgcactgtctcaggggtctcattacccgactatggtgtaagctggattcgccagcctccacgaaagggtctggagtggctgggagtaatatggggtagtgaaaccacatactataattcagctctcaaatccagactgaccatcatcaaggacaactccaagagccaagttttcttaaaaatgaacagtctgcaaactgatgacacagccatttactactgtgccaaacattattactacggtggtagctatgctatggactactggggtcaaggaacctcagtcaccgtctcctcaacgcgtggaggcggatctatggaccctgatctcgaaattgaggccgcctttctggaacgcgagaacactgccctggaaaccagggtcgcagagctgagacagagagtgcagagactgcggaacagagtgtctcagtaccgcaccagatatggcccactcggcggaggtaaa

SEQ ID NO: 1342 - DNA, 960 bp, Artificial Sequence
  Synthetic Polynucloetide
atggccttaccagtgaccgccttgctcctgccgctggccttgctgctccacgccgccaggccggagatcgtgatgacccagagccctgccaccctgtctctgagccctggcgaaagagccaccctgagctgtagagccagccaggacatcagcaagtacctgaactggtatcagcagaagcccggccaggcccccagactgctgatctaccacaccagcagactgcacagcggcatccccgccagattttctggctctggcagcggcaccgactacaccctgacaatcagcagcctccagcccgaggacttcgccgtgtacttctgtcagcaaggcaacaccctgccctacaccttcggccagggcaccaagctggaaatcaagggcggaggcggaagtggaggcggaggatctggcggcggaggctctcaggtgcaactccaggaatctggccctggcctcgtgaagcccagcgagacactgagcctgacctgtaccgtgtccggcgtgtccctgcctgactatggcgtgtcctggatcagacagccccctggcaagggcctggaatggatcggagtgatttggggcagcgaaaccacctactacaacagctccctgaagtccagagtgaccatctccaaggacaactccaagaaccaggtgtccctgaagctgagcagcgtgacagccgccgacaccgccgtgtattactgcgccaagcactactactacggcggcagctacgctatggactactggggccagggaaccctcgtgaccgtgtctagtacgcgtggaggcggatctatggaccctgatctcgaaattgaggccgcctttctggaacgcgagaacactgccctggaaaccagggtcgcagagctgagacagagagtgcagagactgcggaacagagtgtctcagtaccgcaccagatatggcccactcggcggaggtaaa

SEQ ID NO: 1343 - DNA, 966 bp, Artificial Sequence
  Synthetic Polynucloetide
atggccttaccagtgaccgccttgctcctgccgctggccttgctgctccacgccgccaggccggagatcgtgctgacacagagccctgccaccctgtctctgagccctggcgaaagagccaccctgagctgtagagccagccagagcgtgtccagctacctggcctggtatcagcagaagcccggccaggctccccggctgctgatctacgatgccagcaatagagccaccggcatccccgccagattttccggctctggcagcggcaccgacttcaccctgaccatcagctccctggaacccgaggacttcgccgtgtactactgccagcagcggagcaactggcccatcacattcggccagggcacccggctggaaatcaaaggcggaggcggaagtggaggcggaggatctggcggcggaggctctgaagtgcagctggtggaatcaggcggcggactggtgcagcctggcagaagcctgagactgagctgtgccgccagcggcttcaccttcaacgactacgccatgcactgggtgcgccaggcccctggaaaaggactggaatgggtgtccacaatcagctggaacagcggcagcatcggctacgccgatagcgtgaagggccggttcaccatcagccgggacaacgccaagaagtccctgtacctccagatgaacagcctgcgggccgaggacacagccctgtactattgcgccaaggacatccagtacggcaactactactacggcatggacgtgtggggccagggaaccaccgtgaccgtgtcatctacgcgtggaggcggatctatggaccctgatctcgaaattgaggccgcctttctggaacgcgagaacactgccctggaaaccagggtcgcagagctgagacagagagtgcagagactgcggaacagagtgtctcagtaccgcaccagatatggcccactcggcggaggtaaa

SEQ ID NO: 1344 - DNA, 975 bp, Artificial Sequence
  Synthetic Polynucloetide
atggccttaccagtgaccgccttgctcctgccgctggccttgctgctccacgccgccaggccggacatcgtgatgacccagacccccctgagcctgcctgtgacacctggcgagcctgccagcatctcctgcagaagcagcaagagcctgctgcacagcaacggcatcacctacctgtactggtatctgcagaaacccggccagagcccccaactgctgatctaccagatgagcaacctggtgtccggcgtgcccgacagattttctggcagcggctccggcaccgacttcaccctgaagatcagccgggtggaagccgaggacgtgggcgtgtactactgcgcccagaacctggaactgccctacacctttggcggcggaacaaaggtggaaatcaagcggggcggaggcggaagtggaggcggaggatctggcggcggaggctctcaggtgcaactggtgcagagcggagccgaagtgaaaaagcccggcagcagcgtgaaggtgtcctgcaaggccagcggctacgccttcagctactcctggatcaactgggtgcgccaggcccctggacagggcctggaatggatgggcagaatcttccccggcgacggcgacaccgactacaacggcaagttcaagggcagagtgaccatcaccgccgacaagagcaccagcaccgcctacatggaactgagcagcctgcggagcgaggataccgccgtgtactattgtgccagaaacgtgttcgacggctactggctggtgtactggggccagggaacacttgtgaccgtgtccagcacgcgtggaggcggatctatggaccctgatctcgaaattgaggccgcctttctggaacgcgagaacactgccctggaaaccagggtcgcagagctgagacagagagtgcagagactgcggaacagagtgtctcagtaccgcaccagatatggcccactcggcggaggtaaa

SEQ ID NO: 1345 - DNA, 978 bp, Artificial Sequence
  Synthetic Polynucloetide
atggccttaccagtgaccgccttgctcctgccgctggccttgctgctccacgccgccaggccggacatccagatgacccagagccccagcagcctgtctgccagcgtgggcgacagagtgaccatcacctgtcggagcagccagagcatcgtgcactccgtgggcaacaccttcctggaatggtatcagcagaagcccggcaaggcccccaagctgctgatctacaaggtgtccaacagattcagcggcgtgcccagcaggtttagcggctctggcagcggcaccgacttcaccctgaccatctctagcctccagcccgaggacttcgccacctactactgttttcaaggcagccagttcccctacaccttcggccagggaacaaaggtggaaatcaagcggggcggaggcggaagtggaggcggaggatctggcggcggaggctctgaagtgcaactggtggaaagcggaggcggcctggtgcagcctggcggatctctgagactgagctgtgccgccagcggctacgagttcagccggtcctggatgaactgggtgcgccaggcccctggcaagggactggaatgggtgggaagaatctaccccggcgacggcgacaccaactacagcggcaagttcaagggccggttcaccatcagcgccgacaccagcaagaacaccgcctacctccagatgaacagcctgcgggccgaggataccgccgtgtactactgtgccagagatggcagctcctgggactggtacttcgacgtgtggggacagggaacccttgtgaccgtgtccagcacgcgtggaggcggatctatggaccctgatctcgaaattgaggccgcctttctggaacgcgagaacactgccctggaaaccagggtcgcagagctgagacagagagtgcagagactgcggaacagagtgtctcagtaccgcaccagatatggcccactcggcggaggtaaa

SEQ ID NO: 1346 - DNA, 960 bp, Artificial Sequence
  Synthetic Polynucloetide
atggccttaccagtgaccgccttgctcctgccgctggccttgctgctccacgccgccaggccggagatcgtgctgacacagagccctggcaccctgagcctgtctccaggcgaaagagccacactgagctgtcgggcctctcagagcgtgggaggctacctggcttggtatcagcagaagccaggccaggcccccagactgctgatctacgacgccagcaatcgggccacaggcatccccgccagattttctggcagcggctccggcaccgacttcaccctgacaatcagcagcctggaacccgaggacttcgccgtgtactactgccagcagcggaacaactggccccccatgtacacattcggccagggcaccaagctggaaatcaagagaggcggaggcggaagtggaggcggaggatctggcggcggaggctctcaggtgcaactggtgcagagcggagccgaagtgaagaaacccggcagcagcgtgaaggtgtcctgcaaggcttccggcggcaccttcagcagctacgccatttcttgggtgcgccaggctcctggacagggcctggaatggatgggcggcatcatccctatcctgggcaccgccaactacgcccagaaattccagggcagagtgaccatcaccgccgacgagagcaccagcaccgcctacatggaactgagcagcctgcggagcgaggacacagccgtgtattattgcgccagatggggcggaggggccttcgacatttggggccagggaacaatggtcaccgtgtccagcacgcgtggaggcggatctatggaccctgatctcgaaattgaggccgcctttctggaacgcgagaacactgccctggaaaccagggtcgcagagctgagacagagagtgcagagactgcggaacagagtgtctcagtaccgcaccagatatggcccactcggcggaggtaaa

SEQ ID NO: 1347 - DNA, 951 bp, Artificial Sequence
  Synthetic Polynucloetide
atggccttaccagtgaccgccttgctcctgccgctggccttgctgctccacgccgccaggccggacatccagatgacccagagccccgccaccatcgagaacacaagcctgtctgccagcgtgggcgacagagtgaccatcacctgtagagccagccagggcatcagctcttggctgacctggtatcagcagaagcccgagaaggcccccaagagcctgatctacgccgccagctctctgcagtctggcgtgcccagcagattttccggcagcggctctggcaccgacttcaccctgacaatcagcagcctgcagcccgaggacttcgccacctactactgccagcagtacgacagctaccccatcaccttcggccagggcacccggctggaaatcaagggcggaggcggaagtggaggcggaggatctggcggcggaggctctcaggtgcaactgcagcagtggggagccggactgctgaagcctagcgagacactgagcctgacctgcgccgtgtacggcggcagcttcagcgcctactattggagctggatcagacagccccctggcaagggcctggaatggatcggcgacatcaatcacggcggaggcaccaactacaaccccagcctgaagtcccgcgtgaccatctccgtggacaccagcaagaaccagttctccctgaagctgaacagcgtgacagccgccgacacagccgtgtactactgtgccagcctgaccgcctattggggccagggatctcttgtgaccgtgtccagcacgcgtggaggcggatctatggaccctgatctcgaaattgaggccgcctttctggaacgcgagaacactgccctggaaaccagggtcgcagagctgagacagagagtgcagagactgcggaacagagtgtctcagtaccgcaccagatatggcccactcggcggaggtaaa

SEQ ID NO: 1348 - DNA, 963 bp, Artificial Sequence
  Synthetic Polynucloetide
atggccttaccagtgaccgccttgctcctgccgctggccttgctgctccacgccgccaggccggagatcgtgctgacccagagccctgatagcctggccgtgtctctgggcgagagagccaccatcaactgcaaggccagccagagcgtggacttcgacggcgacagctacctgaactggtatcagcagaagcccggccagccccccaaggtgctgatctatgccgccagcacactgcagagcggcgtgcccagcagattttctggcagcggctccggcaccgacttcaccctgaccatcaacagcctggaagccgaggacgccgccacctactactgccagcagagcaacgaggacccctggacctttggcggcggaacaaaggtggaaatcaagggcggaggcggaagtggaggcggaggatctggcggcggaggctctcaggtgcaactggtgcagtccggcgctgaagtgaagaaacctggggccagcgtgaaggtgtcctgcaaggtgtccggctacacctttaccgactactacattacctgggtgcgccaggcccctggacaggccctggaatggatgggctggatctaccccggcagcggcaacaccaagtacagccagaagttccagggcagattcgtgttcagcgtggacaccagcgccagcaccgcctacctgcaactgtctagcctgaaggccgaagataccgccgtgtactactgcgccaactacggcaactattggttcgcctattggggccagggaacccttgtgaccgtgtcctctacgcgtggaggcggatctatggaccctgatctcgaaattgaggccgcctttctggaacgcgagaacactgccctggaaaccagggtcgcagagctgagacagagagtgcagagactgcggaacagagtgtctcagtaccgcaccagatatggcccactcggcggaggtaaa

SEQ ID NO: 1349 - DNA, 957 bp, Artificial Sequence
  Synthetic Polynucloetide
atggccttaccagtgaccgccttgctcctgccgctggccttgctgctccacgccgccaggccggacatccagatgacccagagccccagcagcctgtctgccagcgtgggcgacagagtgaccatcacctgtagagccagccagggcatcagctcttggctggcctggtatcagcagaagcccgagaaggcccccaagagcctgatctacgccgcctctagtctccagagcggcgtgcccagcagattttctggcagcggctccggcaccgacttcaccctgacaatcagctccctccagcccgaggacttcgccacctactactgccagcagtacaacagctaccctcccacctttggcggaggcaccaaggtggaaatcaagggcggaggcggaagtggaggcggaggatctggcggcggaggctctgaagtgcaactggtgcagtctggcggagggctggtgcatcctgggggaagcctgagactgagctgtgccggctctggcttcgccttcagcagcagcaccatgcactggatcagacaggcccctggcaagggcctggaatggatcagcctgatcggaagcggagggggcatctactacggcgacagcgtgaagggccggttcaccatcagccgggacaacgccaagaacagcctgtacctccagatgaactccctgcgggccgaggacatggccgtgtactattgtgtgcggggctacttcgactgggtggactacttcgattactggggccagggcaccctcgtgaccgtgtcatctacgcgtggaggcggatctatggaccctgatctcgaaattgaggccgcctttctggaacgcgagaacactgccctggaaaccagggtcgcagagctgagacagagagtgcagagactgcggaacagagtgtctcagtaccgcaccagatatggcccactcggcggaggtaaa

SEQ ID NO: 1350 - DNA, 975 bp, Artificial Sequence
  Synthetic Polynucloetide
atggccttaccagtgaccgccttgctcctgccgctggccttgctgctccacgccgccaggccggacgtcgtgatgacccagagccctctgagcctgcctgtgacactgggacagcctgccagcatctcctgtcggagcagccagagcatcgtgcacagcgacggcaacacctacctggaatggtatcagcagcggccaggccagagccccagacggctgatctacaaggtgtccaacagattcagcggcgtgcccgacagattctccggcagcggctctggcaccgacttcaccctgaagatcagcagagtggaagccgaggacgtgggcgtgtactactgttttcaaggcagccacgccccctggacctttggcggaggaacaaaggtggaaatcaagggcggaggcggaagtggaggcggaggatctggcggcggaggctctgaagtgcaactggtggaatcaggcggcggactggtgcagcctggcggatctctgagactgagctgtgccgccagcggcttcaccttcagcagctacggaatgcactgggtgcgccaggcccctggcaaaggactggaatgggtggcctacatcaccaccagaagcagcaccatctactacgccgacagcgtgaagggccggttcaccatctccagagacaacgccaagaacagcctgtacctccagatgaactccctgcgggccgaggacaccgccgtgtactattgcaccagagagcccctgaccggctactacgctatggactattggggccagggcaccagcgtgaccgtgtctagtacgcgtggaggcggatctatggaccctgatctcgaaattgaggccgcctttctggaacgcgagaacactgccctggaaaccagggtcgcagagctgagacagagagtgcagagactgcggaacagagtgtctcagtaccgcaccagatatggcccactcggcggaggtaaa

SEQ ID NO: 1351 - DNA, 945 bp, Artificial Sequence
  Synthetic Polynucloetide
atggccttaccagtgaccgccttgctcctgccgctggccttgctgctccacgccgccaggccgcagatcgtgctgacacagagccctgccctgatgagcgccagccctggcgagaaagtgaccatgacctgtagcgccagcagcagcgtgcgctacatgtactggtatcagcagaagcccagaagcagccccaagccctggattcacctgaccagcaatctggcctctggcgtgcccgctagattttccggctctggcagcggcaccagctacagcctgaccatcagcagcatggaagccgaggacgccgccacctactactgccagcagtggtccagccaccccttcacatttggctccggcaccaagctggaaatcaagggcggaggcggaagtggaggcggaggatctggcggcggaggctctgatgtgcaactccaggaaagcggccctggccttgtgaagcctagccagagcctgtccctgacctgtaccgtgaccggcttcagcatcaccagcgactactcttggaactggatcagacagttccctggcaacaaactggaatggatgggctacatcagctactccggccacacctcctacaaccccagcctggaaagccggatctccatcaccagagacaccagcaagaaccagttcttcttgcaactgaacagcgtgaccaccgaggataccgccacatattactgtaccagaggcaactgggacgtggtgtactggggccagggcacacttgtgaccgtgtctgctacgcgtggaggcggatctatggaccctgatctcgaaattgaggccgcctttctggaacgcgagaacactgccctggaaaccagggtcgcagagctgagacagagagtgcagagactgcggaacagagtgtctcagtaccgcaccagatatggcccactcggcggaggtaaa

SEQ ID NO: 1352 - DNA, 972 bp, Artificial Sequence
  Synthetic Polynucloetide
atggccttaccagtgaccgccttgctcctgccgctggccttgctgctccacgccgccaggccggagatcgtgctgacacagagccctggaagcctggccgtgtctcctggcgagcgcgtgacaatgagctgcaagagcagccagagcgtgttcttcagcagctcccagaagaactacctggcctggtatcagcagatccccggccagagccccagactgctgatctactgggccagcaccagagaaagcggcgtgcccgatagattcaccggcagcggctctggcaccgacttcaccctgacaatcagcagcgtgcagcccgaggacctggctatctactactgccaccagtacctgagcagccggaccttcggccagggcaccaagctggaaatcaagagaggcggaggcggaagtggaggcggaggatctggcggcggaggctctcaggtgcaactgcagcagcctggcgctgaggtcgtgaagccaggcgcttccgtgaagatgtcctgcaaggccagcggctacaccttcaccagctactacatccactggatcaagcagacccctggacagggcctggaatgggtgggagtgatctaccccggcaacgacgacatcagctacaaccagaagttccagggcaaggccaccctgaccgccgacaagtctagcaccaccgcctacatgcaactgtccagcctgaccagcgaggacagcgccgtgtactactgcgccagagaagtgcggctgcggtacttcgatgtgtggggccagggaaccaccgtgaccgtgtcatctacgcgtggaggcggatctatggaccctgatctcgaaattgaggccgcctttctggaacgcgagaacactgccctggaaaccagggtcgcagagctgagacagagagtgcagagactgcggaacagagtgtctcagtaccgcaccagatatggcccactcggcggaggtaaa

SEQ ID NO: 1353 - DNA, 984 bp, Artificial Sequence
  Synthetic Polynucloetide
atggccttaccagtgaccgccttgctcctgccgctggccttgctgctccacgccgccaggccggacatcgtgatgacacagtcaccagatagcctcaccgtctccctgggggagcggaccaccattaattgtaaatccagccaaagcgtgctggactcaagcaagaacaagaatagcctcgcctggtatcagcagaagcccggtcagcctccaaagctgctgctttcttgggcctccaccagagagtccgggattcctgataggtttagtggttcaggctccggcacagattttactctgaccattgattctctccagccagaggattctgcaacttattactgccagcaaagcgcccactttcctataacttttggccagggaacccgacttgaaatcaagggcggaggcggaagtggaggcggaggatctggcggcggaggctctcaggtgcagctggtgcagagcggtgccgaagtgaagaaaccaggtgcatccgttaaagtttcatgtaaggctagtggatataccttcaccaattacggaatgaactgggtgaaacaggcccctggccagggactgaagtggatggggtggattaacacctacaccggggagccgacttatgcagacgactttaaggggcgggtcacgatgacctccgacacctccaccagtaccgcctacctggagctgcacaaccttaggtcagacgataccgccgtgtattactgtgcccgatggtcttggtccgacggatactatgtctacttcgactattggggccaggggaccacagttaccgtgtcctctacgcgtggaggcggatctatggaccctgatctcgaaattgaggccgcctttctggaacgcgagaacactgccctggaaaccagggtcgcagagctgagacagagagtgcagagactgcggaacagagtgtctcagtaccgcaccagatatggcccactcggcggaggtaaa

SEQ ID NO: 1354 - DNA, 984 bp, Artificial Sequence
  Synthetic Polynucloetide
atggccttaccagtgaccgccttgctcctgccgctggccttgctgctccacgccgccaggccggatgtgctgctgacccagagccctctgagcctgcctgtgacactgggacagcctgccagcatctcctgtcggagcagccagaccatcgtgcacagcaacggcaacacctacctggaatggttccagcagcggccaggccagagccccagactgctgatctaccaggtgtccaacagattcagcggcgtgcccgacagattctccggcagcggctctggcaccgacttcaccctgaagatcagccgggtggaagccgaggacgtgggcgtgtactactgttttcaaggcagccacgtgccccggacctttggcggaggaacaaaggtggaaatcaagagaggcggaggcggaagtggaggcggaggatctggcggcggaggctctcagatccaactggtgcagagcggcagcgagctgaagaaacctggggccagcgtgaaggtgtcctgcaaggccagcggctacacctttaccaactacggcatgaactgggtgcgccaggcccctggacagggcctgaaatggatgggctggatcaacaccaacaccggcgagcctaagtacgccgaagagttcaagggcagattcgccctgagcctggacaccagcgtgtccacagcctacctccagatcaacagcctgaaggccgaggataccgccgtgtacttctgcgccagaggctacggcaactacgccagaggggcttggctggcctattggggccagggaacactcgtgaccgtgtcctctacgcgtggaggcggatctatggaccctgatctcgaaattgaggccgcctttctggaacgcgagaacactgccctggaaaccagggtcgcagagctgagacagagagtgcagagactgcggaacagagtgtctcagtaccgcaccagatatggcccactcggcggaggtaaa

SEQ ID NO: 1355 - DNA, 969 bp, Artificial Sequence
  Synthetic Polynucloetide
atggccttaccagtgaccgccttgctcctgccgctggccttgctgctccacgccgccaggccggaccacatcgtgctgacccagagccctagcagcctgtctgccagcctgggcgacagagtgaccatcagctgtagagccagccaggacatcagcacctacctgaactggtatcagcagaaacccgacggcaccgtgaagctgctgatcttctacaccagcagactgcacgccggggtgcccagcagattttctggcagcggctctggcacccaccacagcctgaccatctccaacctggaacaggaagatattgctacctacttctgtcagcaaggcaacagcctgcccttcaccttcggcagcggcaccaagctggaaatcaagagaggcggaggcggaagtggaggcggaggatctggcggcggaggctctcaggtgcagctgaaagagagcggccctgagctggaaaagcctggggccagcgtgaagattagctgcaaggccagcggctacagcttcaccgcctacagcatgaactgggtcaagcagaacaacggcatgagcctggaatggatcggcagcatcgacccctactacggcgacaccaaatacgcccagaagttcaagggcaaggccaccctgaccgtggataaggccagcagcaccgcctacctccagctgaagtctctgaccagcgaggacagcgccgtgtactactgcgccagacggatgattaccaccggcgactggtacttcgacgtgtggggagccggaaccaccgtgacagtgtctagcacgcgtggaggcggatctatggaccctgatctcgaaattgaggccgcctttctggaacgcgagaacactgccctggaaaccagggtcgcagagctgagacagagagtgcagagactgcggaacagagtgtctcagtaccgcaccagatatggcccactcggcggaggtaaa

SEQ ID NO: 1356 - DNA, 969 bp, Artificial Sequence; identical to SEQ ID NO: 1355
  Synthetic Polynucloetide

SEQ ID NO: 1357 - DNA, 969 bp, Artificial Sequence
  Synthetic Polynucloetide
atggccttaccagtgaccgccttgctcctgccgctggccttgctgctccacgccgccaggccggacatcgtgatgacccagagccccgatagcctggccgtgtctctgggagagagagccaccatcaactgccgggccagcaagagcgtgtccaccagcggctacagcttcatgcactggtatcagcagaagcccggccagccccccaagctgctgatctacctggcctccaacctggaaagcggcgtgcccgatagattcagcggcagcggctctggcaccgacttcaccctgaccatcagttctcttcaggccgaggacgtggccgtgtactactgccagcacagcagagaggtgccctggacattcggccagggcacaaaggtggaaatcaagcggggcggaggcggaagtggaggcggaggatctggcggcggaggctctcaggtgcagctggtgcagtctggggccgaagtgaagaaacctggggccagcgtgaaggtgtcctgcaaggccagcggatacacctttaccaactacggcatgaactgggtgcgccaggcccctggacagggcctggaatggatgggctggatcaacacctacaccggcgagcccacatacgccgacgccttcaagggcagattcgccttcagcctggacaccagcacctccaccgcctacctccagatcaacagcctgcggagcgacgacaccgccgtgtattattgcgccagagattacggcgactacgggatggactattggggccagggaaccaccgtgaccgtgtcctctacgcgtggaggcggatctatggaccctgatctcgaaattgaggccgcctttctggaacgcgagaacactgccctggaaaccagggtcgcagagctgagacagagagtgcagagactgcggaacagagtgtctcagtaccgcaccagatatggcccactcggcggaggtaaa

SEQ ID NO: 1358 - DNA, 957 bp, Artificial Sequence
  Synthetic Polynucloetide
atggccttaccagtgaccgccttgctcctgccgctggccttgctgctccacgccgccaggccggacatcgtgatgacccagacccccctgaccctgagcgtgacaatcggacagcctgccagcatctcctgcaagagcagccagagcctgctggacagcgacggcaagacctacctgaactggctgctgcagaggccaggccagagccccgagagactgatctacctggtgtccaagctggactccggcgtgcccgatagattcacaggcagcggctccggcaccgacttcaccctgaagatcagccgggtggaagccgaggacctgggcgtgtactgttgttggcagggcacccacttcccttacaccttcggcggagggaccaaggtggaaatcaagggcggcggaggcggaagtggaggcggaggatctggcggcggaggctctcaggtgcaactgcagcagcctggcgctgaacttgtgcggccaggcgcctctgtgaagctgagctgtaaagccagcggctacaccttcaccagctactggatgaactgggtcaagcagcgcccaggccagggcctggaatggatcggaatgatcgaccccagcgacagcgagacacactacaaccacatcttcaaggacaaggccaccctgaccgtggacaagtccagcagcacagcctacctgcaactgtccagcctgaccagcgaggacagcgccgtgtactactgcgcccggaacctgtatctgtggggccagggaacaagcgtgaccgtgtctagcacgcgtggaggcggatctatggaccctgatctcgaaattgaggccgcctttctggaacgcgagaacactgccctggaaaccagggtcgcagagctgagacagagagtgcagagactgcggaacagagtgtctcagtaccgcaccagatatggcccactcggcggaggtaaa

SEQ ID NO: 1359 - DNA, 966 bp, Artificial Sequence
  Synthetic Polynucloetide
atggccttaccagtgaccgccttgctcctgccgctggccttgctgctccacgccgccaggccggacatccagttgacccagtcccccagctcactcagcgccagtgtgggggaccgggtgaccattacctgtaaagccagtcagagtgtggactatgagggggatagcttcctgaattggtatcagcagaagcctggcaaagccccaaagctgctgatctacgctgcatctaatctggagtcaggcgtgccttctaggttctccggtagtgggtctgggaccgatttcacattgaccatttcatccctccaacccgaggatttcgctacatattactgtcagcagtccaatgaggaccctctcacctttggccagggcaccaaagttgaaattaagagaggcggaggcggaagtggaggcggaggatctggcggcggaggctctgaagtccaacttgtggagtctggagggggcctggtgcagcccggcggctctctcagactgtcttgtgcggcaagcggctacaccttcagctcttactggatagaatgggtgaggcaggcacctggaaagggactggagtggattggagagattctgccaggagggggagatacaaattacaatgaaatcttcaaggggcgggccaccttttcagcggataccagcaagaatacagcttacctgcagatgaatagcctccgggcagaagataccgctgtttattattgcacgagacgggtgccaataagactggactattgggggcaagggactcttgtcaccgtcagttcaacgcgtggaggcggatctatggaccctgatctcgaaattgaggccgcctttctggaacgcgagaacactgccctggaaaccagggtcgcagagctgagacagagagtgcagagactgcggaacagagtgtctcagtaccgcaccagatatggcccactcggcggaggtaaa

SEQ ID NO: 1360 - DNA, 990 bp, Artificial Sequence
  Synthetic Polynucloetide
atggccttaccagtgaccgccttgctcctgccgctggccttgctgctccacgccgccaggccggacatcgtgatgagccagagccctagcagcctggccgtgtccgtgggcgagaaagtgaccatgagctgcaagagcagccagtccctgctgcacagcagcaaccagaagaactacctggcctggtatcagcagaagcccggccagtcccccaaggtgctgatctactgggccagcaccagagaaagcggcgtgcccgatagattcaccggcagcggctctggcaccgacttcaccctgaccatcaccagcgtgaagtccgaggacctggctgtgtactactgccagcagtattacagctacccctggaccttcggcggaggcacccggctggaaatcaaaagaggcggaggcggaagtggaggcggaggatctggcggcggaggctctgaagtgcaactccagcagagcgtggccgagcttgtgaagcctggcgcttccgtgaagatgtcctgcaaggtgtccggctacaccctgacagaccacaccatccactggatgaagcagcggcctgagcagggcctggaatggatcggctacatctaccccagggacggcatcaccggctacaacgagaagttcaagggcaaggccacactgaccgccgacaccagcagcagcacagcctacatgcaactgaacagcctgaccagcgaggacagcgccgtgtacttctgtgccagatggggctacagctacagaaactacgcctactactacgactactggggccagggcacaaccctgaccgtgtctagtacgcgtggaggcggatctatggaccctgatctcgaaattgaggccgcctttctggaacgcgagaacactgccctggaaaccagggtcgcagagctgagacagagagtgcagagactgcggaacagagtgtctcagtaccgcaccagatatggcccactcggcggaggtaaa

SEQ ID NO: 1361 - DNA, 981 bp, Artificial Sequence
  Synthetic Polynucloetide
atggccttaccagtgaccgccttgctcctgccgctggccttgctgctccacgccgccaggccggagatcgtgctgacacagagccctggcaccctgagcctgtctccaggcgaaagagccacactgagctgtcgggccagccagagcgtgtccagctcttacctggcctggtatcagcagaagcccggccaggctccccggctgctgatctacggaacaagcagcagagccaccggcatccccgacagattttctggcagcggctccggcaccgacttcaccctgacaatcagcagactggaacccgaggacttcgccgtgtactactgccagcagtacggcagcagccccttcacctttggcggaggcaccaaggtggaaatcaagagaggcggaggcggaagtggaggcggaggatctggcggcggaggctctcaggtgcaactccaggaatctggccccggactggctaagcccagcgagacactgagcctgacctgtaccgtgtccggcgacagcatcaccagctactactggtcctggatcagacagccccctggcaagggcctggaatggatcggctacatctactacagcggcagcaccaactacaaccccagcctgaagtccagagtgaccatcagcgtggacaccagcaagaaccagttctccctgaagctgagcagcgtgacagccgccgacaccgccgtgtattattgcgccagagatcagcggagaatcgccgctgccggcacccacttttacggcatggatgtgtggggccagggcaccaccgtgaccgtgtcatctacgcgtggaggcggatctatggaccctgatctcgaaattgaggccgcctttctggaacgcgagaacactgccctggaaaccagggtcgcagagctgagacagagagtgcagagactgcggaacagagtgtctcagtaccgcaccagatatggcccactcggcggaggtaaa

SEQ ID NO: 1362 - DNA, 951 bp, Artificial Sequence
  Synthetic Polynucloetide
atggccttaccagtgaccgccttgctcctgccgctggccttgctgctccacgccgccaggccggacatccagatgacccagagccccagcagcctgtctgccagcgtgggcgacagagtgaccatcacctgtagagccagccagagcatcagcctgtggctgaactggtatcagcagaagcccggcaaggcccccaagctgctgatctacgccgccagcacactccagagcggcgtgccaagcagattttccggcagcggctccggcaccgacttcaccctgacaatcagctccctccagcccgaggacttcgccacctactactgccagcagtactacaccagcccctacaccttcggccagggcaccaaggtggaaatcaagagaggcggaggcggaagtggaggcggaggatctggcggcggaggctctcaggtgcaactgctggaatctggcggcggactggtgcagcctggcggatctctgagactgagctgtgccgccagcggcttcaccttcagcagctacgccatgagctgggtgcgccaggcccctggaaaaggactggaatgggtgtccgtgatccggtccagcggcagcagcacctattacgccgatagcgtgaagggccggttcaccatcagccgggacaacagcaagaacaccctgtacctccagatgaacagcctgcgggccgaggacaccgccgtgtactattgtgctaggggaggcggctacttcgactactggggccagggaacactcgtgaccgtgtcctctacgcgtggaggcggatctatggaccctgatctcgaaattgaggccgcctttctggaacgcgagaacactgccctggaaaccagggtcgcagagctgagacagagagtgcagagactgcggaacagagtgtctcagtaccgcaccagatatggcccactcggcggaggtaaa

SEQ ID NO: 1363 - DNA, 960 bp, Artificial Sequence
  Synthetic Polynucloetide
atggccttaccagtgaccgccttgctcctgccgctggccttgctgctccacgccgccaggccggacatccagatgacccagagccccagcagcctgtctgccagcgtgggcgacagagtgaccatcacctgtagagccagccagagcatcagcagctacctgaactggtatcagcagaagcccggcaaggcccccaaactgctgatctacgccgtgtccacactccagagcggcgtgcccagcagattttctggcagcggctccggcaccgacttcaccctgacaatcagctccctccagcccgaggacttcgccacctactactgtcagcagagcggcaccttccctcccaccacatttggacagggcaccaaggtggaaatcaagagaggcggaggcggaagtggaggcggaggatctggcggcggaggctctcaggtgcaactgctggaatctggcggcggactggtgcagcctggcggatctctgagactgagctgtgccgccagcggcttcaccttcagcagccacggaatgcactgggtgcgccaggcccctggaaagggactggaatgggtgtccgtgatctccggcagcggcagcaataccggctacgccgatagcgtgaagggccggttcaccatcagccgggacaacagcaagaacaccctgtacctccagatgaacagcctgcgggccgaggacaccgccgtgtactattgtgccagacagtggggcagctacgccttcgattcttggggccagggcaccctcgtgaccgtgtcatctacgcgtggaggcggatctatggaccctgatctcgaaattgaggccgcctttctggaacgcgagaacactgccctggaaaccagggtcgcagagctgagacagagagtgcagagactgcggaacagagtgtctcagtaccgcaccagatatggcccactcggcggaggtaaa

SEQ ID NO: 1364 - DNA, 936 bp, Artificial Sequence
  Synthetic Polynucloetide
atggccttaccagtgaccgccttgctcctgccgctggccttgctgctccacgccgccaggccgatgacccagagccccaagttcctgctggtgtctgccggcgacagagtgaccctgacatgcaaggccagccagagcgtgaacaacgacgtgtactggtatcagcaggaacccggccagtcccccaagctgctgatctactgggccagcaccagagaaagcggcgtgcccgatagattcaccggcagcggctctggcaccgacttcaccctgacaatcagcagcgtgcaggccgaggacctggccgtgtactactgcaagcagagctacaacctgtacaccttcggcggaggcaccaagctggaaatcaagagaggcggcggaggatctggcggaggcggatctgggggcggaggctctgaatctggaagaggactggtgcagcctggcggcagcagaaagctgtcttgtgccgccagcggcttcaccttcagcaccagcggaatgcactgggtgcgccaggcccctgagaagggactggaatgggtggcctacatcagctccggcagcaccaccatctaccacgccgataccgtgaagggccggttcaccatcagccgggacaaccccaagaataccctgttcctccagatgaccagcctgcggagcgaggacaccgccatgtactattgctgcgccagaagcggccagttcggcaactacttcgactactggggccagggcaccaccctgaccgtgtcatctacgcgtggaggcggatctatggaccctgatctcgaaattgaggccgcctttctggaacgcgagaacactgccctggaaaccagggtcgcagagctgagacagagagtgcagagactgcggaacagagtgtctcagtaccgcaccagatatggcccactcggcggaggtaaa

SEQ ID NO: 1365 - DNA, 951 bp, Artificial Sequence
  Synthetic Polynucloetide
atggccttaccagtgaccgccttgctcctgccgctggccttgctgctccacgccgccaggccgcagagcccatctagcctggctgtgtctgccggcgagaaagtgaccatgagctgcaagagcagccagagcctgctgaacagccggacccggaagaactacctggcctggtatcagcagaagcccggccagagccccaagctgctgatctactgggccagcaccagagaaagcggcgtgcccgatagattcaccggctctggcagcggcaccgacttcaccctgacaatcagcagcgtgcaggccgaggacctggccgtgtactactgcaagcagagcaacctgtacaccttcggcggaggcaccaagctggaaatcaagggcggaggcggaagtggaggcggaggatctggcggcggaggctctcaggtgcagctggaagagtctggacccgagcttgtgaagcctggggccagcgtgaagctgtcctgtaaagccagcggctacaccttcaccgagtacatcatccactgggtcaagcagcggagcggccagggcctggaatggatcggctggttttaccctggctccggcagcatcaagtacaacgagaagttcaaggacaaggccaccctgaccgccgacaagtccagcagcaccgtgtacatggaactgagcggcctgaccagcgaggacagcgccgtgtatttctgcgccagacacgacggctacagctacttcgactattggggccagggcaccacactgaccgtgtcctctacgcgtggaggcggatctatggaccctgatctcgaaattgaggccgcctttctggaacgcgagaacactgccctggaaaccagggtcgcagagctgagacagagagtgcagagactgcggaacagagtgtctcagtaccgcaccagatatggcccactcggcggaggtaaa

SEQ ID NO: 1366 - DNA, 960 bp, Artificial Sequence
  Synthetic Polynucloetide
atggccttaccagtgaccgccttgctcctgccgctggccttgctgctccacgccgccaggccggacatccagatgacccagagccccagcagcctgtctgcctctctgggcgagagagtgtccctgacctgtcgggccacacaggaactgagcggctacctgtcttggctgcagcagaagcccgacggcaccatcaagcggctgatctacgccgccagcaccctggatagcggcgtgcccaagagattcagcggcaacagaagcggcagcgactacagcctgaccatcagctccctggaaagcgaggacttcgccgactactactgcctgcagtacgccatctacccctacaccttcggcggaggcaccaagctggaaatcaagggcggaggcggaagtggaggcggaggatctggcggcggaggctctgaggtgcaactgcagcagtctggccccgagcttgtgaagcctggcgcctccgtgaagatgagctgcaaggccagcggctacacctttaccagctacttcatccactgggtcaagcagaaacccggccagggcctggaatggatcggcttcatcaacccttacaacgacggcagcaagtacaacgagaagttcaagggcaaggccaccctgaccagcgacaagagcagcagcaccgcctacatggaactgtccagcctgacatccgaggacagcgccgtgtactactgcaccagggacgacggctactacggctacgccatggactactggggccagggaacaagcgtcaccgtgtcctctacgcgtggaggcggatctatggaccctgatctcgaaattgaggccgcctttctggaacgcgagaacactgccctggaaaccagggtcgcagagctgagacagagagtgcagagactgcggaacagagtgtctcagtaccgcaccagatatggcccactcggcggaggtaaa

SEQ ID NO: 1367 - DNA, 975 bp, Artificial Sequence
  Synthetic Polynucloetide
atggccttaccagtgaccgccttgctcctgccgctggccttgctgctccacgccgccaggccggacaccatcgtgctgacacagagccctgcttccctggccgtgtccctgggacagagagccaccatctcttgcagagccagcgagagcgtggacagctacggcaacagcttcatgcactggtatcagcagaagcccggccagccccccaagctgctgatctacctggcctccaacctggaaagcggcgtgcccgccagattttctggcagcggcagcagaaccgacttcaccctgaccatcgaccccgtggaagccgatgatgccgccacctactactgccagcagaacaactacgacccctggaccttcggcggaggcaccaagctggaaatcaagggcggaggcggaagtggaggcggaggatctggcggcggaggctctgaagtgcaactccagcagagcggccctgagcttgtgaagcctggcgcttccgtgaagatgagctgcaaggccagcggctacaccttcaccagctacgtgatgcactgggtcaagcagaaacctggacagggcctggaatggatcggctacatcaacccctacaacgacggcaccaagtacaacgagaagttcaagggcaaggccaccctgacaagcgacaccagcagcagcaccgcctacatggaactgaacagcctgaccagcgaggacagcgccgtgtacttctgcgccagacccatctacttcgacaacgactacttcgattactggggccagggcaccaccctgaaggtgtcctctacgcgtggaggcggatctatggaccctgatctcgaaattgaggccgcctttctggaacgcgagaacactgccctggaaaccagggtcgcagagctgagacagagagtgcagagactgcggaacagagtgtctcagtaccgcaccagatatggcccactcggcggaggtaaa

SEQ ID NO: 1368 - DNA, 957 bp, Artificial Sequence
  Synthetic Polynucloetide
atggccttaccagtgaccgccttgctcctgccgctggccttgctgctccacgccgccaggccggacatccagatgacccagagccccagcagcctgtctgccagcgtgggcgacagagtgaccatcacatgcaaggccagccaggacgtgggaatcgccgtggcctggtatcagcagaaacccggcaaggtgcccaagctgctgatctactgggccagcaccagacacaccggcgtgcccgatagattttccggcagcggctccggcaccgacttcaccctgacaatcagctccctccagcccgaggacgtggcaacctactactgccagcagtacagcagctacccctacaccttcggccagggcaccaaggtggaaatcaagggcggaggcggaagtggaggcggaggatctggcggcggaggctctgaagtgcaactggtggaatcaggcggcggactggtgcagcctggcggatctctgagactgagctgtgccgccagcggcttcgacttcagccggtactggatgagctgggtgcgccaggcccctggcaaaggactggaatggatcggcgagatcaaccccgacagcagcaccatcaactacgcccccagcctgaaggacaagttcatcatcagccgggacaacgccaagaacagcctgtacctccagatgaactccctgcgggccgaggacaccgccgtgtactattgcgccagacccgacggcaactactggtacttcgacgtgtggggccagggaaccctcgtgaccgtgtcatctacgcgtggaggcggatctatggaccctgatctcgaaattgaggccgcctttctggaacgcgagaacactgccctggaaaccagggtcgcagagctgagacagagagtgcagagactgcggaacagagtgtctcagtaccgcaccagatatggcccactcggcggaggtaaa

SEQ ID NO: 1369 - DNA, 960 bp, Artificial Sequence
  Synthetic Polynucloetide
atggccttaccagtgaccgccttgctcctgccgctggccttgctgctccacgccgccaggccggacatcgtgatgacccagagccagaagagcatgagcaccagcgtgggcgacagagtgagcatcacctgcaaggccagccaggacgtgatcaccggcgtggcctggtaccagcagaagcccggccagagccccaagctgctgatctacagcgccagctacagatacaccggcgtgcccgacagattcaccggcagcggcagcggcaccgacttcaccttcaccatcagcaacgtgcaggccgaggacctggccgtgtactactgccagcagcactacagcacccccctgaccttcggcgccggcaccaagctggagctgaagggcggaggcggaagtggaggcggaggatctggcggcggaggctctcaggtgcagctgcagcagcccggcgccgagctggtgagacccggcgccagcgtgaagctgagctgcaaggccagcggctacagcttcaccacctactggatgaactgggtgaagcagagacccggccagggcctggagtggatcggcatgatccaccccagcgacagcgagaccagactgaaccagaagttcaaggacaaggccaccctgaccgtggacaagagcagcagcaccgcctacatgcagctgagcagccccaccagcgaggacagcgccgtgtactactgcgccagaagcaccatgatcgccaccagagccatggactactggggccagggcaccagcgtgaccgtgagcagcacgcgtggaggcggatctatggaccctgatctcgaaattgaggccgcctttctggaacgcgagaacactgccctggaaaccagggtcgcagagctgagacagagagtgcagagactgcggaacagagtgtctcagtaccgcaccagatatggcccactcggcggaggtaaa

SEQ ID NO: 1370 - DNA, 978 bp, Artificial Sequence
  Synthetic Polynucloetide
atggccttaccagtgaccgccttgctcctgccgctggccttgctgctccacgccgccaggccgcagagcgtgctgacacagcctccatccgtgtctggcgctccaggccagagagtgaccatctcctgtaccggcagcggcagcaacatcggagccccctacgacgtgtcctggtatcagcaactgcctggcaccgcccccaagctgctgatctaccacaacaacaagcggcccagcggcgtgcccgatagattcagcggctctaagagcggcaccagcgccagcctggctatcactggactccaggccgaggacgaggccgactactactgtgccacagtggaagccggcctgagcggctctgtgtttggcggcggaacaaagctgaccgtgctgggagctggcggaggcggaagtggaggcggaggatctggcggcggaggctctcaggtgcaactggtgcagagcggagccgaagtgaagaaacctggggccagcgtgaaggtgtcctgcaaggtgtccggctacaccctgaccgagctgagcattcactgggtgcgccaggcccctggcaagggactggaatggatgggcggcttcgaccccgaagagaacgagatcgtgtacgcccagcggttccagggcagagtgacaatgaccgaggacaccagcaccgacaccgcctacatggaactgagcagcctgcggagcgaggataccgccgtgtactactgcgccatcgtgggcagcttcagccctctgacactgggcctgtggggccagggaactatggtcaccgtgtccagcacgcgtggaggcggatctatggaccctgatctcgaaattgaggccgcctttctggaacgcgagaacactgccctggaaaccagggtcgcagagctgagacagagagtgcagagactgcggaacagagtgtctcagtaccgcaccagatatggcccactcggcggaggtaaa

SEQ ID NO: 1371 - DNA, 978 bp, Artificial Sequence
  Synthetic Polynucloetide
atggccttaccagtgaccgccttgctcctgccgctggccttgctgctccacgccgccaggccgcagagcgtgctgacacagcctccatccgtgtctggcgctccaggccagagagtgaccatctcctgtaccggcagcggcagcaacatcggagccccctacgacgtgtcctggtatcagcaactgcctggcaccgcccccaagctgctgatctaccacaacaacaagcggcccagcggcgtgcccgatagattcagcggctctaagagcggcaccagcgccagcctggctatcactggactccaggccgaggacgaggccgactactactgccagagctacgacagcagcagcatcagcaccatcttcggcggaggcaccaagctgacagtgctgggagctggcggaggcggaagtggaggcggaggatctggcggcggaggctctcaggtgcaactggtgcagagcggagccgaagtgaagaaacctggggccagcgtgaaggtgtcctgcaaggtgtccggctacaccctgaccgagctgagcattcactgggtgcgccaggcccctggcaagggactggaatggatgggcggcttcgaccccgaagagaacgagatcgtgtacgcccagcggttccagggcagagtgacaatgaccgaggacaccagcaccgacaccgcctacatggaactgagcagcctgcggagcgaggataccgccgtgtactactgtgccatcgtgggcagcttcagcggaatcgcctacagaccttggggccagggcacaatggtcaccgtgtctagcacgcgtggaggcggatctatggaccctgatctcgaaattgaggccgcctttctggaacgcgagaacactgccctggaaaccagggtcgcagagctgagacagagagtgcagagactgcggaacagagtgtctcagtaccgcaccagatatggcccactcggcggaggtaaa

SEQ ID NO: 1372 - DNA, 972 bp, Artificial Sequence
  Synthetic Polynucloetide
atggccttaccagtgaccgccttgctcctgccgctggccttgctgctccacgccgccaggccggacatccagatgacccagagccccagcagcctgtctgccagcgtgggcgacagagtgaccatcacctgtagcgccagcagcagcgtgtcctacatgtactggtatcagcagaagcccggcaaggcccccaagctgctgatctacctgaccagcaatctggcctccggcgtgcccagcagattttctggcagcggctccggcaccgacttcaccctgacaatcagctccctccagcccgaggacttcgccacctactactgtcagcagtggcggagcaaccccttcaccttcggccagggcaccaagctggaaatcaagagaggcggaggcggaagtggaggcggaggatctggcggcggaggctctcagatcaccctgaaagagtccggccccaccctcgtgaagcctacccagaccctgacactgacctgcaccttcagcggcttcagcctgagcacaagcggcatgggcgtgggctggatcagacagcctcctggaaaggccctggaatggctggcccacatttggtgggacgacgtgaagcggtacagccccagcctgaagtcccggctgaccattaccaaggacaccagcaagaaccaggtggtgctgaccatgacaaacatggaccccgtggacaccgccacatattactgcgcccggatcgtgtccttcgacaacgacgtggtgtccgctatggactactggggccagggaaccctcgtgaccgtgtctagtacgcgtggaggcggatctatggaccctgatctcgaaattgaggccgcctttctggaacgcgagaacactgccctggaaaccagggtcgcagagctgagacagagagtgcagagactgcggaacagagtgtctcagtaccgcaccagatatggcccactcggcggaggtaaa

SEQ ID NO: 1373 - DNA, 957 bp, Artificial Sequence
  Synthetic Polynucloetide
atggccttaccagtgaccgccttgctcctgccgctggccttgctgctccacgccgccaggccggagatcgtgatgacccagagccctgccaccctgtccgtgtctccaggcgaaagagccaccctgagctgcaaggcttcccagagcgtgtccaacgacgtcgtgtggtatcagcagaagcccggccaggcccccagactgctgatctactacgccagcaacagatacaccggcatccccgccagattcagcggctctggcagcggcaccgagttcaccctgacaatcagcagcctccagagcgaggacttcgccgtgtactactgtcagcaggactacaccagcccctggaccttcggccagggcaccaagctggaaatcaagagaggcggaggcggaagtggaggcggaggatctggcggcggaggctctcaggtgcaactggtgcagagcggagccgaagtgaagaaacctggggccagcgtgaaggtgtcctgcaaggccagcggctacacctttaccaactacggcatgaactgggtgcgccaggctcctggacagggcctggaatggatgggctggatcaacacctacaccggcgagcccacctacgccgacgacttcaagggcagagtgaccatgaccaccgacaccagcacctccaccgcctacatggaactgcggagcctgagaagcgacgacaccgccgtgtattattgcgcccggatcggcgacagcagccccagcgattattggggccagggaaccctcgtgaccgtgtcctctacgcgtggaggcggatctatggaccctgatctcgaaattgaggccgcctttctggaacgcgagaacactgccctggaaaccagggtcgcagagctgagacagagagtgcagagactgcggaacagagtgtctcagtaccgcaccagatatggcccactcggcggaggtaaa

SEQ ID NO: 1374 - DNA, 957 bp, Artificial Sequence
  Synthetic Polynucloetide
atggccttaccagtgaccgccttgctcctgccgctggccttgctgctccacgccgccaggccggacatcctgctgacccagagccccgtgatcctgtccgtgtctcctggcgagagagtgtccttcagctgtcgggccagccagagcatcggcaccaacatccactggtatcagcagcggaccaacggcagccccagactgctgattaagtacgccagcgagtccatcagcggcatccccagcagattttccggcagcggctccggcaccgacttcaccctgagcatcaacagcgtggaaagcgaggacattgccgactactactgccagcagaacaacaactggcccaccaccttcggagccggcaccaagctggaactgaagggcggaggcggaagtggaggcggaggatctggcggcggaggctctcaggtgcagctgaagcagagcggacctggcctggtgcagcctagccagagcctgtccatcacctgtaccgtgtccggcttcagcctgaccaactacggcgtgcactgggtgcgccagagccctggaaaaggactggaatggctgggagtgatttggagcggcggcaacaccgactacaacacccccttcaccagcagactgtctatcaacaaggacaacagcaagagccaggtgttcttcaagatgaacagcctccagagcaacgacaccgccatctactactgtgctagagccctgacctactatgactacgagttcgcctactggggccagggcacactcgtgacagtgtctgctacgcgtggaggcggatctatggaccctgatctcgaaattgaggccgcctttctggaacgcgagaacactgccctggaaaccagggtcgcagagctgagacagagagtgcagagactgcggaacagagtgtctcagtaccgcaccagatatggcccactcggcggaggtaaa

SEQ ID NO: 1375 - DNA, 957 bp, Artificial Sequence
  Synthetic Polynucloetide
atggccttaccagtgaccgccttgctcctgccgctggccttgctgctccacgccgccaggccggagatccagctggtgcagagcggagccgaagtgaagaagcctggcgagagcctgcggatcagctgcaagggcagcggcttcaacatcgaggactactacatccactgggtgcgccagatgcccggcaagggcctggaatggatgggcagaatcgaccccgagaacgacgagactaagtacggccccatcttccagggccacgtgaccatcagcgccgacaccagcatcaacaccgtgtacctccagtggtccagcctgaaggccagcgacaccgccatgtactactgcgcctttagaggcggcgtgtactggggccagggcaccacagtgacagtgtctagcggcggaggcggaagtggaggcggaggatctggcggcggaggctctgatgtcgtgatgacccagagccccgacagcctggctgtgtctctgggagagagagccaccatcaactgcaagtccagccagtccctgctggacagcgacggcaagacctacctgaactggctccagcagaagcccggccagccccccaagagactgatctccctggtgtccaagctggactccggcgtgcccgatagattttccggctctggcagcggcaccgacttcaccctgacaatcagctcccttcaggccgaggacgtggccgtgtactattgctggcagggcacacacttccccggcacctttggcggaggcaccaaggtggaaatcaagacgcgtggaggcggatctatggaccctgatctcgaaattgaggccgcctttctggaacgcgagaacactgccctggaaaccagggtcgcagagctgagacagagagtgcagagactgcggaacagagtgtctcagtaccgcaccagatatggcccactcggcggaggtaaa

SEQ ID NO: 1376 - DNA, 981 bp, Artificial Sequence
  Synthetic Polynucloetide
atggccttaccagtgaccgccttgctcctgccgctggccttgctgctccacgccgccaggccggagctgcagatgacccagagccctagcagcctgtctgccagcgtgggcgacagagtgaccatcacctgtagagccagccagagcatcagcagctacctgaactggtatcagcagaagcccggccagccccccaaactgctgatctactgggccagcaccagagaaagcggcgtgcccgatagattcagcggcagcgagagcggcaccaactacaccctgaccatcagctccctgcagcccgaggacttcgccacctacttttgccagcagagcgacagcctgcccatcacctttggacagggcacccggctggacattcagggcggaggcggaagtggaggcggaggatctggcggcggaggctctgaggtgcaactgctggaatctgggggcggagtggtgcagcctggcagaagcctgagactgagctgtgccgccagcggcttcaccttcagctcctacggaatgcactgggtgcgccaggcccctggcaaaggactggaatgggtggccgtgatctcctacgacggcagcaacaagtactacgccgacagcgtgaagggccggttcaccatcagccgggacaacagcaagaacaccctgtacctgcagatgaacagcctgcgggccgaggacaccgccgtgtactactgcgccaaggatatgggctggggcagcggctggcggccttactactactacggcatggacgtgtggggccagggcaccaccgtgacagtgtcatctacgcgtggaggcggatctatggaccctgatctcgaaattgaggccgcctttctggaacgcgagaacactgccctggaaaccagggtcgcagagctgagacagagagtgcagagactgcggaacagagtgtctcagtaccgcaccagatatggcccactcggcggaggtaaa

SEQ ID NO: 1377 - DNA, 978 bp, Artificial Sequence
  Synthetic Polynucloetide
atggccttaccagtgaccgccttgctcctgccgctggccttgctgctccacgccgccaggccggagcttgtgatgacccagagccccagcagcctgacagtgacagccggcgagaaagtgaccatgagctgcaagagcagccagagcctgctgaacagcggcaaccagaagaactacctgacctggtatcagcagaagcccggccagccccccaagctgctgatctactgggccagcaccagagaaagcggcgtgcccgatagattcaccggctctggcagcggcaccgacttcaccctgacaatcagcagcgtgcaggccgaggacctggccgtgtactactgccagaacgactacagctaccccctgaccttcggagccggcaccaagctggaaatcaagggcggaggcggaagtggaggcggaggatctggcggcggaggctctgaagtgcagctgctggaacagtctggcgccgaacttgtgcggcctggcaccagcgtgaagatcagctgtaaagccagcggctacgccttcaccaactactggctgggctgggtcaagcagaggcctggacacggcctggaatggatcggcgacatctttcccggctccggcaacatccactacaacgagaagttcaagggcaaggccaccctgaccgccgacaagtctagcagcaccgcctacatgcagctgtccagcctgacctttgaggacagcgccgtgtatttctgtgcccggctgcggaactgggacgagcccatggattattggggccagggcaccaccgtgaccgtgtctagtacgcgtggaggcggatctatggaccctgatctcgaaattgaggccgcctttctggaacgcgagaacactgccctggaaaccagggtcgcagagctgagacagagagtgcagagactgcggaacagagtgtctcagtaccgcaccagatatggcccactcggcggaggtaaa

SEQ ID NO: 1378 - DNA, 972 bp, Artificial Sequence
  Synthetic Polynucloetide
atggccttaccagtgaccgccttgctcctgccgctggccttgctgctccacgccgccaggccggacatccaaatgacacagagtccttctagtttgagtgcgagcgtgggggacagggtgaccattacctgcagggccagccagagcataagctcataccttaattggtaccagcaaaaaccaggtaaggcccctaagctcctgatctacgcggcctcttcacttcaatctggggtcccttcccgcttcagtggctccggcagcggcaccgacttcacgctcactatatcaagtctgcagcctgaggatctcgccacctattactgtcaacaaagttattccacccctttcacctttggaccgggcacgaaagtggatattaagggcggaggcggaagtggaggcggaggatctggcggcggaggctctgtgcacgaggtccagcttgtgcagtccggggcagaggtcaagaagcctggttctagcgtaaaagtgagttgcaaagcctcaggtgggacattttcatcctacgcgatcagttgggttagacaggctcctggtcaagggctggaatggatgggcggaattattccaatcttcggaacagcgaattacgcgcagaagttccagggtagagtaaccatcactgctgacaagtccacctccaccgcatacatggaattgtctagtctccggagcgaggatacggcggtgtattattgtgctacgttcgccctgtttggcttccgcgaacaggctttcgacatctgggggcagggcacgacagtcacggttagtagtacgcgtggaggcggatctatggaccctgatctcgaaattgaggccgcctttctggaacgcgagaacactgccctggaaaccagggtcgcagagctgagacagagagtgcagagactgcggaacagagtgtctcagtaccgcaccagatatggcccactcggcggaggtaaa

SEQ ID NO: 1379 - DNA, 954 bp, Artificial Sequence
  Synthetic Polynucloetide
atggccttaccagtgaccgccttgctcctgccgctggccttgctgctccacgccgccaggccgtacatccacgtgacacagagccctagcagcctgtccgtgtccatcggcgatagagtgaccatcaactgccagacctctcaaggcgtgggcagcgacctgcactggtatcagcacaaacctggcagagcccctaagctgctgatccaccatgccagctctgtggaagatggcgtgcccagcagattttccggcaccggatttcacaccagcttcaacctgacaatcaacgacctccaggccgacgacatcggcacctactactgtcaagtgctccagagcttcggcagaggcagcagactggatacaaaaggcggaggcggaagtggaggcggaggatctggcggcggaggctctagggcacacctggtgcagtctggcaccgccatgaagaaacctggcgcttccgtcagagtgtcctgtcagacaagcggctacaccttcacagcccacatcctgttctggttcagacaggccccaggcagaggactggaatgggtcggatggatcaagccccagtacggggccgtgaatttcggcggaggcttcagagacagagtgaccctgaccagggacgtgtaccgggaaatcgcctacatggacatccggggcctgaagcctgatgacaccgccgtgtactactgcgccagggatagaagctacggcgacagctcttgggctctcgatgcttggggacagggcacaacagtggtggtgtctgctacgcgtggaggcggatctatggaccctgatctcgaaattgaggccgcctttctggaacgcgagaacactgccctggaaaccagggtcgcagagctgagacagagagtgcagagactgcggaacagagtgtctcagtaccgcaccagatatggcccactcggcggaggtaaa

SEQ ID NO: 1380 - DNA, 969 bp, Artificial Sequence
  Synthetic Polynucloetide
atggccttaccagtgaccgccttgctcctgccgctggccttgctgctccacgccgccaggccggacatcgtgctgacccagagccctctgagcctggccgtgtctctgggacagcctgccatcatcagctgcaaggccagccagagcgtgtcctttgccggcacctctctgatgcactggtatcaccagaagcccggccagcagcccagactgctgatctacagagccagcaacctggaagccggcgtgcccgatagattttccggcagcggcagcaagaccgacttcaccctgaccatcagccccgtggaagccgaagatgccgccacctactactgccagcagagcagagagtacccctacaccttcggcggaggcaccaagctggaaatcaagaggggcggaggcggaagtggaggcggaggatctggcggcggaggctctcaggtccaactggtgcagagcggagccgaggtcgtgaagcctggcgcttccgtgaagattagctgcaaagccagcggctacacctttaccggctactttatgaactgggtcaagcagagccctggccagagcctggaatggatcggcagaatccacccctacgacggcgacaccttctacaaccagaagttccagggcaaggccaccctgacagtggacaagagcagcaacaccgcccacatggaactgctgagcctgaccagcgaggacttcgccgtgtactactgcaccagatacgacggcagccgggctatggactattggggccagggcaccaccgtgaccgtgtctagtacgcgtggaggcggatctatggaccctgatctcgaaattgaggccgcctttctggaacgcgagaacactgccctggaaaccagggtcgcagagctgagacagagagtgcagagactgcggaacagagtgtctcagtaccgcaccagatatggcccactcggcggaggtaaa

SEQ ID NO: 1381 - DNA, 957 bp, Artificial Sequence
  Synthetic Polynucloetide
atggccttaccagtgaccgccttgctcctgccgctggccttgctgctccacgccgccaggccggacgttgtgatgacccagacccccctgagcctgcctgtgacacctggcgaacctgccagcatcagctgtcggagcagccagagcctggtgcacagaaacggcaacacctacctgcactggtatctccagaagcccggccagagccccaagctgctgatccacaaggtgtccaacagattcagcggcgtgcccgacagattctccggcagcggctctggcaccgacttcaccctgaagatcagccgggtggaagccgaggacctgggcgtgtacttctgtagccagagcacccatgtgccccccctgacatttggagccggcaccaagctggaactgaagggcggaggcggaagtggaggcggaggatctggcggcggaggctctgaagtgcagctggtgcagtctggcgctgaggtggaaaagcctggggccagcgtgaagattagctgcaaggccagcggcagcagcttcaccggctacaacatgaactgggtgcgccagaacatcggcaagagcctggaatggatcggagccatcgacccctactacggcggcaccagctacaaccagaagttcaagggcagagccaccctgaccgtggacaagagcaccagcaccgcctacatgcacctgaagtccctgcggagcgaggacaccgccgtgtactactgtgtgtccggcatggaatattggggccagggcaccagcgtgaccgtgtctagtacgcgtggaggcggatctatggaccctgatctcgaaattgaggccgcctttctggaacgcgagaacactgccctggaaaccagggtcgcagagctgagacagagagtgcagagactgcggaacagagtgtctcagtaccgcaccagatatggcccactcggcggaggtaaa

SEQ ID NO: 1382 - DNA, 951 bp, Artificial Sequence
  Synthetic Polynucloetide
atggccttaccagtgaccgccttgctcctgccgctggccttgctgctccacgccgccaggccggagatcgtgatgacccagacccctgccaccctgtctgtgtctgccggcgagagagtgaccattacctgcaaggccagccagagcgtgtccaacgacgtgacctggtatcagcagaagcccggccaggcccccagactgctgatctacagcgccagcaacagatacagcggcgtgcccgccagattttccggcagcggctacggcaccgagttcaccttcaccatcagcagcgtgcagagcgaggacttcgccgtgtacttctgtcagcaagactacagcagcttcggccagggcaccaagctggaaatcaagaggggcggaggcggaagtggaggcggaggatctggcggcggaggctctcaggtgcagctggtggaatctggacctggcgtggtgcagcctggcagaagcctgagaatcagctgtgccgtgtccggcttcagcgtgaccaactacggcgtgcactgggtgcgccagccacctggaaaaggactggaatggctgggcgtgatctgggctggcggcatcaccaactacaacagcgccttcatgtcccggctgaccatctccaaggacaacagcaagaacaccgtgtacctccagatgaacagcctgcgggccgaggacaccgccatgtactactgtgcttccagaggcggccactacggctacgccctggattattggggccagggaaccctcgtgaccgtgtcctctacgcgtggaggcggatctatggaccctgatctcgaaattgaggccgcctttctggaacgcgagaacactgccctggaaaccagggtcgcagagctgagacagagagtgcagagactgcggaacagagtgtctcagtaccgcaccagatatggcccactcggcggaggtaaa

SEQ ID NO: 1383 - DNA, 960 bp, Artificial Sequence
  Synthetic Polynucloetide
atggccttaccagtgaccgccttgctcctgccgctggccttgctgctccacgccgccaggccggacatccagatgacccagaccgccagcagcctgcctgcctctctgggcgacagagtgaccatctcctgtagcgccagccaggacatcagcaactacctgaactggtatcagcagaaacccgacggcaccgtgaagctgctgatcttctacagcagcaacctgcacagcggcgtgcccagcagattttctggcggcggaagcggcaccgactacagcctgaccatcagcaatctggaacccgaggacattgccacctacttttgccaccagtacagcaagctgccctggacctttggcggaggcaccaagctggaaatcaagagaggcggaggcggaagtggaggcggaggatctggcggcggaggctctgaagtgaccctggtggaaagcggcggagacttcgtgaagcctggcggctctctgaaggtgtcctgtgccgccagcggcttcgcctttagccactacgccatgagctgggtgcgccagacccctgccaagagactggaatgggtggcctacatcagcagcggcggctccggcacctactactccgatagcgtgaagggccggttcaccatcagccgggacaacgccaagaacaccctgtacctccagatgcggagcctgcggagcgaggacagcgccatgtatttctgcaccagagtgaagctgggcacctattacttcgactcttggggccagggcaccaccctgaccgtgtcatctacgcgtggaggcggatctatggaccctgatctcgaaattgaggccgcctttctggaacgcgagaacactgccctggaaaccagggtcgcagagctgagacagagagtgcagagactgcggaacagagtgtctcagtaccgcaccagatatggcccactcggcggaggtaaa

SEQ ID NO: 1384 - DNA, 966 bp, Artificial Sequence
  Synthetic Polynucloetide
atggccttaccagtgaccgccttgctcctgccgctggccttgctgctccacgccgccaggccgcagttcgtgctgacccagagcccttctgcctctgctgccctgggagcctctgccaagctgacctgtacactgagcagcgcccacaagacctacaccatcgactggtatcagcagcagaagggaaaggcccccagatacctgatccaagtgaagtccgacggcacctacacaaaggccaccggcgtgcccgatagattcagcggcagtagcagcggagccgatagatacctgattatccccagcgtgcaggccgacgacgaggccgattactactgcggcaccgattacaccggcggctacgtgttcggcggaggcacacaactgaccgtgacaggcggaggcggaagtggaggcggaggatctggcggcggaggctctgagcaactgaaagagtctggcggcggactgttcaagcccaccgataccctgaccctgacctgcaccgtgtccggcttcagcctgagctactacggcgtgaactgggtgcgccaggcccctggcaatggcctggaatggatcggcacaatcggcggcagcggcgacacctactatgcctcttgggccaagtccagaagcaccatcatcagaaacaccaacgagaacaccgtgaccctgaagatgaccagcctgacagccgccgacaccgccacctacttttgcgtcagatacgccaacatcggctacgagtatttcaacgtgtggggacccggcaccctcgtgaccgtgtcatctacgcgtggaggcggatctatggaccctgatctcgaaattgaggccgcctttctggaacgcgagaacactgccctggaaaccagggtcgcagagctgagacagagagtgcagagactgcggaacagagtgtctcagtaccgcaccagatatggcccactcggcggaggtaaa

SEQ ID NO: 1385 - DNA, 963 bp, Artificial Sequence
  Synthetic Polynucloetide
atggccttaccagtgaccgccttgctcctgccgctggccttgctgctccacgccgccaggccggacatccagatgacccagagccccagcagcctgtctgccagcgtgggcgacagagtgaccatcacctgtagagccagccagggcatcagctcttggctggcctggtatcagcagaagcccgagaaggcccccaagagcctgatctacgccgcctctagtctccagagcggcgtgcccagcagattttctggcagcggctccggcaccgacttcaccctgacaatcagctccctccagcccgaggacttcgccacctactactgccagcagtacaacagctacccccccacctttggcggaggcaccaaggtggaaatcaagggcggaggcggaagtggaggcggaggatctggcggcggaggctctgaagtgcaactggtggaatcaggcggcggactggtgcagcctggcgagtctctgagactgagctgtgtggcctccggcttcaccttcagccggtacaagatgaactgggtgcgccaggcccctggcaagggactggaatgggtgtcctacatcagccgcagcggcagagacatctactacgccgacagcgtgaagggccggttcaccatcagcagagacaacgccaagaacagcctgtacctccagatgaactccctgcgggacgaggacaccgccgtgtactactgtgccggaaccgtgaccacctattactacttcggcatggacgtgtggggccacggcaccaccgtgacagtgtcatctacgcgtggaggcggatctatggaccctgatctcgaaattgaggccgcctttctggaacgcgagaacactgccctggaaaccagggtcgcagagctgagacagagagtgcagagactgcggaacagagtgtctcagtaccgcaccagatatggcccactcggcggaggtaaa

SEQ ID NO: 1386 - DNA, 960 bp, Artificial Sequence
  Synthetic Polynucloetide
atggccttaccagtgaccgccttgctcctgccgctggccttgctgctccacgccgccaggccgcagtctgtggtcacacagccacctagcatgtctgccgctccaggccagcaagtgaccatctcttgtagcggcggcaacagcaacatcgagcggaactacgtgtcctggtatctgcaactgcctggcacagcccctaagctggtcatcttcgacaacgacagacggcccagcggcatccccgatagattttctggcagcaagagcggcaccagcgccacactgggaattaccggacttcagacaggcgacgaggccgactactactgtggcacatgggactctagcctgagaggctgggttttcggcggaggcacaaagctgacagtgcttggtggcggaggcggaagtggaggcggaggatctggcggcggaggctctgaagtgcagctcgttgagtctggcggcggactgattcaacctggcggaagcctgagactgagctgtgccgcttccggcttcaccttcagcaactacgccatgaactgggttcgacaggcccctggcaaaggactggaatgggtgtccaccatcaacggcagaggcagcagcaccatctacgccgattctgtgaagggcagattcaccatcagccgggacaacagcaagaacaccctgtacctccagatgaactccctgagagccgaggacaccgccacctattactgtgcccggtacatcagcagaggactgggcgattcttggggccagggcacactggttacagtgacgcgtggaggcggatctatggaccctgatctcgaaattgaggccgcctttctggaacgcgagaacactgccctggaaaccagggtcgcagagctgagacagagagtgcagagactgcggaacagagtgtctcagtaccgcaccagatatggcccactcggcggaggtaaa

SEQ ID NO: 1387 - DNA, 963 bp, Artificial Sequence
  Synthetic Polynucloetide
atggccttaccagtgaccgccttgctcctgccgctggccttgctgctccacgccgccaggccgcagtctgtgctgacacagcctccatctgcctctggcacacctggacagagagtgaccatcagctgtagcggcagcagaagcaacgtcggcggcaactacgtgttctggtatcagcaggtcccaggcgctacccctaagctgctgatctacagaagcaatcagcggcctagcggcgtgcccgatagatttgccggaagcaagagcggcagctctgccagccttgccatctctggactgagaagcgaggacgaggccgactactactgtgccacctgggatgatagcctgagcggcttcgtgtttggcaccggcaccaaagtgacagtgcttggtggcggaggcggaagtggaggcggaggatctggcggcggaggctctgaagttcagctggttgaatctggcggcggactggttaagcctggcggatctctgagactgtcttgtgccgccagcggcttcaccttcagcgattactacatgagctggatcagacaggcccctggcaaaggactggaatgggtgtcctacatcagcagcagcggctccaccatctactacgccgatagcgtgaagggcagattcaccatcagccgggacaacgccaagaacagcctgtacctccagatgaactccctgagagccgaggacaccgccgtgtactattgcgccagaggctacggcaaagcctacgatcaatggggccagggcacactggtcaccgtttcttctacgcgtggaggcggatctatggaccctgatctcgaaattgaggccgcctttctggaacgcgagaacactgccctggaaaccagggtcgcagagctgagacagagagtgcagagactgcggaacagagtgtctcagtaccgcaccagatatggcccactcggcggaggtaaa

SEQ ID NO: 1388 - DNA, 960 bp, Artificial Sequence
  Synthetic Polynucloetide
atggccttaccagtgaccgccttgctcctgccgctggccttgctgctccacgccgccaggccggacatccagatgacccagagccccagcagcctgtctgccagcgtgggcgacagagtgaccatcacctgtagagccagccaggacgtgaacaccgccgtggcctggtatcagcagaagcctggcaaggcccccaagctgctgatctacagcgccagcttcctggaaagcggcgtgcccagcagattcagcggaagcagaagcggcaccgacttcaccctgaccatcagctccctccagcccgaggacttcgccacctactactgccagcagcactacaccacccctcccaccttcggccagaccaaggtggaaatcaagagaggcggaggcggaagtggaggcggaggatctggcggcggaggctctgaagtgcaactggtggaatctggcggcggactggtgcagcctggcggatctctgagactgagctgtgccgccagcggcttcaacatcaaggacacctacatccactgggtgcgccaggcccctggaaagggactggaatgggtggcccggatctaccccaccaacggctacaccagatacgccgacagcgtgaagggccggttcaccatcagcgccgacaccagcaagaataccgcctacctccagatgaacagcctgcgggccgaggataccgccgtgtactactgctcaagatggggaggcgacggcttctacgctatggacgtgtggggccagggcacccttgtgaccgtgtcatctacgcgtggaggcggatctatggaccctgatctcgaaattgaggccgcctttctggaacgcgagaacactgccctggaaaccagggtcgcagagctgagacagagagtgcagagactgcggaacagagtgtctcagtaccgcaccagatatggcccactcggcggaggtaaa

SEQ ID NO: 1389 - DNA, 999 bp, Artificial Sequence
  Synthetic Polynucloetide
atggccttaccagtgaccgccttgctcctgccgctggccttgctgctccacgccgccaggccgcagtctgccctgacacagcctcctagcgcctctggctctcccggccagagcatcaccatcagctgtaccggcaccagcaacaacttcgtgtcctggtatcagcagcacgccggcaaggcccccaagctcgtgatctacgacgtgaacaagcggcccagcggcgtgcccgatagattcagcggcagcaagagcggcaacaccgccagcctgacagtgtctggcctccagaccgatgacgaggccgtgtactactgcggcagcctcgtgggcaactgggacgtgatctttggcggaggcaccaagctgaccgtgctgggcggaggcggaagtggaggcggaggatctggcggcggaggctctcagccccagctccaggaatctggccccacactggtggaagccagcgagacactgagcctgacctgtgccgtgtccggcgattctaccgccgcctgcaatagcttctggggctgggtgcgccagcctcctggaaagggactggaatgggtgggaagcctgagccactgcgccagctattggaaccggggctggacctaccacaaccccagcctgaagtccagactgaccctggccctggacacccccaagaacctggtgttcctgaagctgaacagcgtgacagccgccgacaccgccacctactactgtgccagatttggcggcgaggtgctgcggtacaccgactggcctaaacctgcctgggtggacctgtggggcagaggaacactcgtgaccgtgtccagcacgcgtggaggcggatctatggaccctgatctcgaaattgaggccgcctttctggaacgcgagaacactgccctggaaaccagggtcgcagagctgagacagagagtgcagagactgcggaacagagtgtctcagtaccgcaccagatatggcccactcggcggaggtaaa

SEQ ID NO: 1390 - DNA, 984 bp, Artificial Sequence
  Synthetic Polynucloetide
atggccttaccagtgaccgccttgctcctgccgctggccttgctgctccacgccgccaggccggagctggtgctgacacagagccctggcaccctgtctctgtctgccggcgaaagagccaccctgagctgtagagccagccagagcgtgtcctctggcagcctggcttggtatcagcagaagccaggccaggcccccagactgctgatctacggcgcttctaccagagccaccggcatccccgatagattcagcggctctggctccggcaccgacttcaccctgacaatcggcagactggaacccgaggacctggccgtgtactactgccagcagtacggcaccagcccctacacattcggccagggcaccaagctggaaatcggcggaggcggaagtggaggcggaggatctggcggcggaggctctctggaacagagcggagccgaagtgaagaaacccggcagcagcgtgcaggtgtcctgcaaagcaagcggcggcaccttctctatgtacggcttcaactgggtgcgccaggctcctggacacggcctggaatggatgggcggcatcatccccatcttcggcacctccaactacgcccagaaattccggggcagagtgaccttcaccgccgaccaggccacaagcaccgcctacatggaactgaccaacctgcggagcgacgacaccgccgtgtattattgcgccagagacttcggccccgactgggaggatggcgacagctacgatggcagcggcagaggcttcttcgacttctggggccagggaacccttgtgaccgtgtcctcaacgcgtggaggcggatctatggaccctgatctcgaaattgaggccgcctttctggaacgcgagaacactgccctggaaaccagggtcgcagagctgagacagagagtgcagagactgcggaacagagtgtctcagtaccgcaccagatatggcccactcggcggaggtaaa

SEQ ID NO: 1391 - DNA, 924 bp, Artificial Sequence
  Synthetic Polynucloetide
atggccttaccagtgaccgccttgctcctgccgctggccttgctgctccacgccgccaggccggacatccagatgacccagagccccagcagcctgtctgccagcgtgggcgacagagtgaccatcacctgtcaggccagccaggacatcaacaactacctgaactggtatcagcagaagcccggcaaggcccccaagctgctgatctacgacgccagcaatctgcagaccggcgtgcccagcagattttccggctctggcagcggcaccgacttcaccttcaccatcgaggacattgccacctactactgccagcagtacaccttcggccctggcaccaaggtggacatcaaaggcggaggcggaagtggaggcggaggatctggcggcggaggctctgaagtgcaactgctggaatctggcggcggactggtgcagcctggcggatctctgagactgagctgtgccgccagcggcttcacctttagctggtacagcatgacctgggtgcgccaggcccctggcaaaggactggaatgggtgtccagcatcgtgccctggggcgatttcacccagtacgccgatagcgtgaagggccggttcaccatcagccgggacaacagcaagaacaccctgtacctgcagatgaacagcctgcgggccgaggacaccgccgtgtactattgtgccaagggacctggctggggcagcttcgatctgtggggcagaggaacccttgtgaccgtgtccagcacgcgtggaggcggatctatggaccctgatctcgaaattgaggccgcctttctggaacgcgagaacactgccctggaaaccagggtcgcagagctgagacagagagtgcagagactgcggaacagagtgtctcagtaccgcaccagatatggcccactcggcggaggtaaa

SEQ ID NO: 1392 - DNA, 954 bp, Artificial Sequence
  Synthetic Polynucloetide
atggccttaccagtgaccgccttgctcctgccgctggccttgctgctccacgccgccaggccggacatccagatgacccagagccccagcagcctgtctgccagcgtgggcgacagagtgaccatcacctgtaccgccagcctgagcgtgtccagcacctacctgcactggtatcagcagaagcccggcagcagccccaagctgtggatctacagcaccagcaacctggcctccggcgtgcccagcagattttctggcagcggctctggcaccagctacaccctgaccatcagctccctccagcccgaggacttcgccacctactactgccaccagtaccacagaagccccctgacctttggcggaggcaccaaggtggaaatcaagagaggcggaggcggaagtggaggcggaggatctggcggcggaggctctgaagtgcaactggtggaatctggcggcggactggtgcagcctggcggatctctgagactgagctgtgccgccagcggcttcagcctgaccaaatacggcgtgcactgggtgcgccaggcccctggaaaaggactggaatgggtgggagtgaagtgggctggcggctccaccgactacaacagcgccctgatgagccggttcaccatcagcaaggacaacgccaagaacagcctgtacctccagatgaactccctgcgggccgaggacaccgccgtgtactactgtgccagagatcaccgggacgctatggactactggggccagggaacactcgtgaccgtgtcctctacgcgtggaggcggatctatggaccctgatctcgaaattgaggccgcctttctggaacgcgagaacactgccctggaaaccagggtcgcagagctgagacagagagtgcagagactgcggaacagagtgtctcagtaccgcaccagatatggcccactcggcggaggtaaa

SEQ ID NO: 1393 - DNA, 966 bp, Artificial Sequence
  Synthetic Polynucloetide
atggccttaccagtgaccgccttgctcctgccgctggccttgctgctccacgccgccaggccggacatccagatgacccagagccccagcagcctgtctgccagcgtgggcgacagagtgaccatcacatgcaaggccagccaggacgtgggaacagccgtggcctggtatcagcagaagcctggcaaggcccccaagctgctgatctacagcgccagctacagatccaccggcgtgcccagcagattttccggctctggcagcggcaccgacttcaccctgaccatctctagcctccagcccgaggacttcgccacctactactgccagcaccactactccgccccctggacatttggcggaggcaccaaggtggaaatcaagggcggaggcggaagtggaggcggaggatctggcggcggaggctctgaagtgcaactggtggaatcaggcggcggactggtgcagcctggcggatctctgagactgagctgtgccgccagcggcttcaccttcagcagaaacggcatgagctgggtgcgccaggcccctggaaaaggactggaatgggtggcaaccgtgtccagcggcggcagctacatctactacgccgacagcgtgaagggccggttcaccatctccagagacaacgccaagaacagcctgtacctccagatgaactccctgcgggccgaggacaccgccgtgtactattgtgccagacagggcaccaccgccctggctaccagattcttcgatgtgtggggccagggcaccctcgtgaccgtgtcatctacgcgtggaggcggatctatggaccctgatctcgaaattgaggccgcctttctggaacgcgagaacactgccctggaaaccagggtcgcagagctgagacagagagtgcagagactgcggaacagagtgtctcagtaccgcaccagatatggcccactcggcggaggtaaa

SEQ ID NO: 1394 - DNA, 954 bp, Artificial Sequence
  Synthetic Polynucloetide
atggccttaccagtgaccgccttgctcctgccgctggccttgctgctccacgccgccaggccggacatccagatgacccagagcttcagcagcctgagcgccagcgtgggcgacagagtgaccatcacctgtagagccagccaggacatcagcaactacctgaactggtatcagcagaagcccggcaaggcccccaagctgctgatctactacaccagcagactgcacagcggcgtgcccagcagattttctggcagcggctccggcaccgactacaccctgacaatcagctccctgcagcccgaggacttcgctacctacttctgtcagcaaggcaacaccctgccctggacctttggcggaggcaccaagctggaaatcaagagaggcggaggcggaagtggaggcggaggatctggcggcggaggctctgaagtgcaactggtgcagtccggcggagggctggtgcagagcggaggatctctgagactgagctgcagagccagcggctacaccttcacccggtactggatgctgtgggtgcgccagaggccaggcaagggactggaatgggtggccgagatcaacccccggaacgaccggaccaactacaacgagaagttcaagacccggttcaccatcagcgtggacagaagcaagaacaccctgtacctgcagatggacagcctgcgggccgaggataccgccgtgtacttttgtgctctgggaggcggctacgctatggactactggggccagggaacccttgtgaccgtgtcctctacgcgtggaggcggatctatggaccctgatctcgaaattgaggccgcctttctggaacgcgagaacactgccctggaaaccagggtcgcagagctgagacagagagtgcagagactgcggaacagagtgtctcagtaccgcaccagatatggcccactcggcggaggtaaa

SEQ ID NO: 1395 - DNA, 954 bp, Artificial Sequence
  Synthetic Polynucloetide
atggccttaccagtgaccgccttgctcctgccgctggccttgctgctccacgccgccaggccggacatccagatgacccagagcccccctagcctgtctgcctctgtgggcggcaaagtgaccatcacatgcaaggccagccaggacatcgaccgctacatggcctggtatcaggacaagcccggcaagggacccaagctgctgatccacgataccagcaccctccagcccggcatccccagcagattttctggcagcggctccggcagagactacagcttcagcatcagcaacctggaacccgaggacattgccacctactactgcctccagtacgacaacctgtggaccttcggcggaggcaccaagctggaaatcaagagaggcggaggcggaagtggaggcggaggatctggcggcggaggctctcaggtgcaactggtgcagagcggagccgagcttgtgaagcctggcgcttccgtgaagatgagctgcaaagccagcggctacatcttcaccaactacaacatccactgggtcaagaagtccccaggccagggcctggaatggatcggagccatctaccccggaaacggcgacgccccttacagccagaagttccaggacagagccaccctgaccgccgacaccagcagcagcaccacctacatggaactgagcagcctgaccagcgaggacagcgccgtgtactattgcgtgcgggccaactgggatgtggccttcgcctattggggccagggcacactggtgtccgtgtcctctacgcgtggaggcggatctatggaccctgatctcgaaattgaggccgcctttctggaacgcgagaacactgccctggaaaccagggtcgcagagctgagacagagagtgcagagactgcggaacagagtgtctcagtaccgcaccagatatggcccactcggcggaggtaaa

SEQ ID NO: 1396 - DNA, 957 bp, Artificial Sequence
  Synthetic Polynucloetide
atggccttaccagtgaccgccttgctcctgccgctggccttgctgctccacgccgccaggccggacatccagatgacccagagccctgccagcctgtctgcctctgtgggcgagacagtgaccatcacctgtcgggtgtccggcaacatccacaactacctggcctggtatcagcagaagcagggcaagagcccccaactgctggtgtacaacgccaagaccctggccgatggcgtgcccagcagattttctggctctggcagcggcacccagtacagcctgaagatcaacagcctccagcccgaggacttcggcagctactactgccagcacttctggtccaacccctacaccttcggcggaggcaccaagctggaaatcaagggcggaggcggaagtggaggcggaggatctggcggcggaggctctcaggtgcaactccagcagtctggcgcttccgtgaaggtgtcctgcaaggccagcgaactcgtgcggcctggcacaggctacgccttcaccaattacctgatcgagtgggtcaagcagaggcccggacagggcctggaatggatcggagtgattaacccaggcagcggcggcaccaactacaacgagaagttcaagggcaaggccaccctgaccgccgacaagagcagcagcacagcctacatgcaactgagcagcctgaccagcgacgacagcgccgtgtacttctgcgcccggtacagaagctacgactggtacttcgacgtgtggggagccggcaccaccgtgacagtgtcatctacgcgtggaggcggatctatggaccctgatctcgaaattgaggccgcctttctggaacgcgagaacactgccctggaaaccagggtcgcagagctgagacagagagtgcagagactgcggaacagagtgtctcagtaccgcaccagatatggcccactcggcggaggtaaa

SEQ ID NO: 1397 - DNA, 957 bp, Artificial Sequence
  Synthetic Polynucloetide
atggccttaccagtgaccgccttgctcctgccgctggccttgctgctccacgccgccaggccggacatccagatgacacagtctccggcgtcactgtccgcctccgtgggggagactgtgactattatttgtagggcatcagttaacatctactcttatttggcctggtaccagcagaagcaaggcaagagtcctcagctgctggtgtataatgcgaagatcctggcagagggcgtgccgagccggttctccggcagcggctcaggtacccaattttccctcaagatcaattcactgcagccagaggactttggcagttactattgtcaacaccactacggcacattcactttcgggtccggtacaaaattggagattaagcgaggcggaggcggaagtggaggcggaggatctggcggcggaggctctcaggtacagttgaaagaaagcgggcctggactggtagcgccttcccaatctctctccatcacgtgcaccatctctggcttctccctgacttcctatggagttcactgggtgaggcagccccccggcaagggactggaatggctggtcgtcatctggtccgacgggtccacaacctacaactccgctctgaaaagtcggctctctatttctaaagataatagcaagagccaggtgtttctgaaaatgaactctctgcagaccgatgatacggccatttactactgcgcttcacactatggctcaaccttggcattcgcttcctggggccacggaacactggtgaccgtttccgcagccacgcgtggaggcggatctatggaccctgatctcgaaattgaggccgcctttctggaacgcgagaacactgccctggaaaccagggtcgcagagctgagacagagagtgcagagactgcggaacagagtgtctcagtaccgcaccagatatggcccactcggcggaggtaaa

SEQ ID NO: 1398 - DNA, 981 bp, Artificial Sequence
  Synthetic Polynucloetide
atggccttaccagtgaccgccttgctcctgccgctggccttgctgctccacgccgccaggccggacattgtgatgacccagtctcacaaattcatgtccacatcagtaggagacagggtcagcgtcacctgcaaggccagtcagaatgtgggtaataatgtagcctggtatcaacagaaaccagggcaatctcctaaagtactgatttactcggcatcctaccggtacagtggagtccctgatcgcttcacaggcagtggatctgggacagatttcactctcaccatcagtaatgtgcagtctgaagacttggcagagtatttctgtcagcaatataacacctatccattcacgttcggctcggggacaaagttggaaataaaaggcggaggcggaagtggaggcggaggatctggcggcggaggctctgaggtacagctggaggaaagcggtggaggactggtgcaacctggagggtctatgaagctctcttgcgtagcttctgggttcacgttctccaattactggatgaactgggtgcggcagtcccccgagaaaggcctggaatgggtagcagaaattcggttcaagtcccataactatgctacacactttgccgagtctgtcaaaggccggttcactattagtcgagacgacagcaagtcttcagtctacctgcagatgaataacttgcgggcagaggacacaggtatctactactgcaccaggagaatcggcaactccgactatgactggtggtactttgacgtctggggagcaggcaccagcgtgacggtgagttcagcctcaacgcgtggaggcggatctatggaccctgatctcgaaattgaggccgcctttctggaacgcgagaacactgccctggaaaccagggtcgcagagctgagacagagagtgcagagactgcggaacagagtgtctcagtaccgcaccagatatggcccactcggcggaggtaaa

SEQ ID NO: 1399 - DNA, 957 bp, Artificial Sequence
  Synthetic Polynucloetide
atggccttaccagtgaccgccttgctcctgccgctggccttgctgctccacgccgccaggccggacatccagatgacccagagcagcagcagcttcagcgtgtccctgggcgacagagtgaccatcacatgcaaggccagcgaggacatctacatccggctggcctggtatcagcagaagcccggcaacgcccccagactgctgattagcgccgccacctctctggaaaccggcatccccagcagattctccggctctggcagcggcgaggactacaccctgacaatcaccagcctccagaccgaggacgtggcaacctactactgccagcagtattggaccaccccctggacctttggcggaggcaccaagctggaaatcaagagaggcggaggcggaagtggaggcggaggatctggcggcggaggctctgatgtgcagctccaggaatctggccccggactcgtgaagcctagccagagcctgagcctgacatgcaccgtgaccggctacagcatcaccatcgactacacctggaactggatcagacagttccccggcaacaaactggaatggatgggctacatcacctacagcggcagcaccgactacaaccccagcctgaagtccagaagctccatcaccagagacacctctatgaaccagttcttcttgcagctgaacagcgtgaccaccgaggacaccgccacctactattgcgccagactgggcagaagatacgccctggactattggggccagggcaccagcgtgacagtgtcctctacgcgtggaggcggatctatggaccctgatctcgaaattgaggccgcctttctggaacgcgagaacactgccctggaaaccagggtcgcagagctgagacagagagtgcagagactgcggaacagagtgtctcagtaccgcaccagatatggcccactcggcggaggtaaa

SEQ ID NO: 1400 - DNA, 954 bp, Artificial Sequence
  Synthetic Polynucloetide
atggccttaccagtgaccgccttgctcctgccgctggccttgctgctccacgccgccaggccggatgtgcagctccaggaaagcggccctggcctcgtgaagcctagccagagcctgagcctgacatgcaccgtgaccggctacagcatcaccagcgactacacctggaactggatcagacagttccccggcaacaagctggaatggatgggctacatcacctacagcggcagcaccagctacaaccccagcctgaagtcccggaactccatcaccagagacaccagcaagaaccagttcttcttgcagctgaacagcgtgaccaccgaggacaccgccacctactactgcgccagactgggcagacggtacaccatggactattggggccagggcacctccgtgaccgtgtctagcggaggcggaggaagtggcggcggaggatctgggggaggcggaagcgatatccagatgacccagtccagcagcagcttcagcgtgtccctgggcgacagagtgaccatcacctgtatggcctccgaggacatctacatccggctggcctggtatcagcagaagcccggcaacgcccccagactgctgattagcgccgccacctctctggaaaccggcgtgccaagcagattcagcggctctggcagcggcaaggactacaccctgagcatcacctccttgcagaccgaggacgtgggcacctactattgccagcagtattggagcagcccctggacctttggcggaggcacaaagctggaaatcaacacgcgtggaggcggatctatggaccctgatctcgaaattgaggccgcctttctggaacgcgagaacactgccctggaaaccagggtcgcagagctgagacagagagtgcagagactgcggaacagagtgtctcagtaccgcaccagatatggcccactcggcggaggtaaa

SEQ ID NO: 1401 - DNA, 954 bp, Artificial Sequence
  Synthetic Polynucloetide
atggccttaccagtgaccgccttgctcctgccgctggccttgctgctccacgccgccaggccggacatccagatgacccagagcagcagcagcttcagcgtgagcctgggcgacagagtgaccatcacctgcatggccagcgaggacatctacatcagactggcctggtaccagcagaagcccggcaacgcccccagactgctgatcagcgccgccaccagcctggagaccggcgtgcccagcagattcagcggcagcggcagcggcaaggactacaccctgagcatcaccagcctgcagaccgaggacgtgggcacctactactgccagcagtactggagcagcccctggaccttcggcggcggcaccaagctggagatcaacggcggaggcggaagtggaggcggaggatctggcggcggaggctctgacgtgcagctgcaggagagcggccccggcctggtgaagcccagccagagcctgagcctgacctgcaccgtgaccggctacagcatcaccagcgactacacctggaactggatcagacagttccccggcaacaagctggagtggatgggctacatcacctacagcggcagcaccagctacaaccccagcctgaagagcagaaacagcatcaccagagacaccagcaagaaccagttcttcctgcagctgaacagcgtgaccaccgaggacaccgccacctactactgcgccagactgggcagaagatacacaatggactactggggccagggcaccagcgtgaccgtgagcagcacgcgtggaggcggatctatggaccctgatctcgaaattgaggccgcctttctggaacgcgagaacactgccctggaaaccagggtcgcagagctgagacagagagtgcagagactgcggaacagagtgtctcagtaccgcaccagatatggcccactcggcggaggtaaa

SEQ ID NO: 1402 - DNA, 960 bp, Artificial Sequence
  Synthetic Polynucloetide
atggccttaccagtgaccgccttgctcctgccgctggccttgctgctccacgccgccaggccggaccagatcgtgctgacccagtcccccgctattatgtccgcatcaccgggcgaaaaagtgacgatctcctgtagcgcttcatctagcgtctcctacatgtattggtatcaacagaaacctgggtctagcccaaagccgtggatctacagaaccagtaaccttgccagtggggtgccagcccgcttcagcggtagtggcagtggaacttcctatagcctcacaataagcaacatggaggctgaagatgccgctgcctattactgccagcagtaccacagttacccaaccacgttcggcgggggaactaagctcgaagtaaaaggcggaggcggaagtggaggcggaggatctggcggcggaggctctgaggtgcagctggtggaatctgggggcggcctggtccaacctaagggatcactcaagctctcttgtgcggccagcggattctctttcaatacctatgctatgaattgggtgagacaggcgcccggaaagggcctcgaatggatagcccatatccggtcaaaatcaaacaatttcgcaacctactatgcggactccgtgaaggaccgattttccatctcccgagatgcctccgagaatattctgttcctgcagatgaataacctcaagacagaggacaccgccatgtactactgtgtgcgccagggcggtgactttcccatggattactgggggcaggggaccagcgtgaccgtgagctctacgcgtggaggcggatctatggaccctgatctcgaaattgaggccgcctttctggaacgcgagaacactgccctggaaaccagggtcgcagagctgagacagagagtgcagagactgcggaacagagtgtctcagtaccgcaccagatatggcccactcggcggaggtaaa

SEQ ID NO: 1403 - DNA, 963 bp, Artificial Sequence
  Synthetic Polynucloetide
atggccttaccagtgaccgccttgctcctgccgctggccttgctgctccacgccgccaggccggacatccagatgacccagagccccagcagcctgtctgccagcgtgggcgacagagtgaccatcacctgtagagccagccagagcatcagcagctacctgaactggtatcagcagaagcccggcaaggcccccaaactgctgatctacgacgccagcaacctggaaaccggcgtgcccagcagattttccggcagcggctctggcaccgacttcaccttcaccatcagctccctccagcccgaggacattgccacctactactgccagcagtacgacaacctgcccctgacctttggcggaggcaccaaggtggacatcaagagaggcggaggcggaagtggaggcggaggatctggcggcggaggctctcaggtgcaactggtggaatctggcggcggagtggtgcagcctggcagaagcctgagactgagctgtgccgccagcggcttcacctttagcagctacgccatgcactgggtgcgccaggcccctggaaaaggcctggaatgggtggccgtgatctcctacgacggctccaacaagtattacgccgacagcgtgaagggccggttcaccatctccagagacaacagcaagaacaccctgtacctccagatgaacagcctgcgggccgaggacaccgccgtgtactattgtgccagggctcacaacagcagctcttggagcttcgactactggggccagggcaccctcgtgaccgtgtcatctacgcgtggaggcggatctatggaccctgatctcgaaattgaggccgcctttctggaacgcgagaacactgccctggaaaccagggtcgcagagctgagacagagagtgcagagactgcggaacagagtgtctcagtaccgcaccagatatggcccactcggcggaggtaaa

SEQ ID NO: 1404 - DNA, 990 bp, Artificial Sequence
  Synthetic Polynucloetide
atggccttaccagtgaccgccttgctcctgccgctggccttgctgctccacgccgccaggccggacgtcgtgatgacccagagccctctgagcctgcctgtgtccctgggcgatcaggccagcatctcctgcagatccagccagagactggtgcacagcaacggcaacacctacctgcactggtatctgcagaagcccggccagagccccaagctgctgatctaccgggtgtccaacagattccccggcgtgcccgatagattcagcggctctggcagcggcaccgacttcaccctgaagatcagccgggtggaagccgaggacctgggcatctatttctgcagccagagcacccacgtgccctacacctttggcggaggcaccaagctggaaatcaagcggggcggaggcggaagtggaggcggaggatctggcggcggaggctctgaagtgcggctgcagcagtctggccccgacctgattaagcctggggccagcgtgaagatgagctgcaaggccagcggctacaccttcaccggctacgtgatgcactgggtcaagcagaggccaggccagggcctggaatggatcggcttcatcaacccctacaacgacgacatccagagcaacgagcggttccggggcaaggccaccctgaccagcgataagagcagcaccaccgcctacatggaactgagcagcctgacctccgaggacagcgccgtgtactactgtgctaggggagccggctacaacttcgacggggcctacagattcttcgacttttggggccagggcaccacactgaccgtgtcctctacgcgtggaggcggatctatggaccctgatctcgaaattgaggccgcctttctggaacgcgagaacactgccctggaaaccagggtcgcagagctgagacagagagtgcagagactgcggaacagagtgtctcagtaccgcaccagatatggcccactcggcggaggtaaa

SEQ ID NO: 1405 - DNA, 963 bp, Artificial Sequence
  Synthetic Polynucloetide
atggccttaccagtgaccgccttgctcctgccgctggccttgctgctccacgccgccaggccgagctacgagctgacccagcctcctagcgtgtccgtgtctcctggacagaccgccaccatctcttgcagcggcgatcaactgggcgggaagtacggccactggtatcagaagaagcccggccagagccccgtgctggtgctgtaccaggacagaaaacggcctgccggcatccccgagagattcagcggaagcagcagcggcaacaccatcaccctgaccatcagcggcacccaggccgtggatgaggccgactactactgccaggcttgggacaccaatctgggcggcgtgttcggcggaggcaccaaagtgacagtgctgggacagggcggaggcggaagtggaggcggaggatctggcggcggaggctctcaggtgcaactggtggaaagcggagccgaagtgaagaaacctggggccagcgtgaaggtgtcctgcaaggccagcggctacacctttaccggctactacatgcactgggtgcgccaggctccaggccagggactggaatggatgggccggatcaaccccaatagcggcggcaccaactacgcccagaaattccagggcagagtgaccatgaccagagacaccagcatcagcaccgcctacatggaactgagccggctgagaagcgacgacaccgccgtgtactactgcgccagccctagaggcagaggcagcgccttcgatatttggggccagggcacactcgtgaccgtgtcctctacgcgtggaggcggatctatggaccctgatctcgaaattgaggccgcctttctggaacgcgagaacactgccctggaaaccagggtcgcagagctgagacagagagtgcagagactgcggaacagagtgtctcagtaccgcaccagatatggcccactcggcggaggtaaa

SEQ ID NO: 1406 - DNA, 972 bp, Artificial Sequence
  Synthetic Polynucloetide
atggccttaccagtgaccgccttgctcctgccgctggccttgctgctccacgccgccaggccgaacttcatgctgacccagccccacagcgtgtccgagagccctggcaagaccgtgaccatctcctgcaccagaagcagcggctctatcgccagcaaatacgtgcagtggtatcagcagaggcccggcagcagccctaccaccgtgatctacgaggacaaccagaggcctagcggcgtgcccgatagattcagcggcagcatcgacaccagcagcaacagcgccagcctgaccatcagcggcctgagaacagaggacgaggccgactactactgccacagctacgacagcaacaaccactccgtgttcggcggaggcaccaaagtgacagtgctgggacagggcggaggcggaagtggaggcggaggatctggcggcggaggctctgaagtgcaactggtggaaagcgggggaggcgtggtgcagccaggcggatctctgagactgagctgtgccgccagcggcttcaccttcagcagctacgccatgagctgggtgcgccaggcccctggaaaaggcctggaatgggtgtccgccatctctggctctggcggcagcacctactacgccgatagcgtgaagggccggttcagcatcagccgggacaacagcaagaacaccctgtacctccagatgaacagcctgcgggccgaggacaccgccgtgtactactgtgccagaaccagaagctccggggccttcgacatctggggccagggaacactcgtgaccgtgtcctctacgcgtggaggcggatctatggaccctgatctcgaaattgaggccgcctttctggaacgcgagaacactgccctggaaaccagggtcgcagagctgagacagagagtgcagagactgcggaacagagtgtctcagtaccgcaccagatatggcccactcggcggaggtaaa

SEQ ID NO: 1407 - DNA, 960 bp, Artificial Sequence
  Synthetic Polynucloetide
atggccttaccagtgaccgccttgctcctgccgctggccttgctgctccacgccgccaggccggacatccagatgaaccagagccccagcagcctgagcgccagcctgggcgataccatcaccatcacctgtcacgccagccagaacatcaacgtgtggctgagctggtatcagcagaagcccggcaacatccccaagctgctgatctacaaggccagcaacctgcacaccggcgtgcccagcagattttctggcagcggctctggcaccggcttcaccattaccatcagctccctccagcccgaggacattgccacctactactgccagcagggccagagctacccctggacatttggcggaggcaccaagctggaaatcaagagaggcggaggcggaagtggaggcggaggatctggcggcggaggctctgaagtgcaactccagcagagcggcccagagcttgtgaagcctggcgcttccgtgaagattagctgcaaagccagcggctacagcttcaccggctacttcatgaactgggtcaagcagagccacggcaagagcctggagtacatcggcagattcaacccctacaacggcgagacactgtacaaccagaagttcaagggcaaggccaccctgaccgtggacaagagcagcagcaccgtgcacatggaactgctgagcgtgaccagcgaggacagcgccgtgtactactgtggcagaagcggcaacgacgacgctatggactattggggccagggcaccagcgtgaccgtgtctagtgctacgcgtggaggcggatctatggaccctgatctcgaaattgaggccgcctttctggaacgcgagaacactgccctggaaaccagggtcgcagagctgagacagagagtgcagagactgcggaacagagtgtctcagtaccgcaccagatatggcccactcggcggaggtaaa

SEQ ID NO: 1408 - DNA, 951 bp, Artificial Sequence
  Synthetic Polynucloetide
atggccttaccagtgaccgccttgctcctgccgctggccttgctgctccacgccgccaggccggacatcctgctgacacagagccccgccatcctgtccgtgtctccaggcgagagagtgtcctttagctgccgggccagccagaacatcggcaccagcatccactggtatcagcagcggaccaacggcagccccagactgctgattaagtacgccagcgagtccgtgtccggcatccccagcagattttctggcagcggctccggcaccgacttcaccctgagcatcaacagcgtggaaagcgaggacattgccgactactactgccagcacaccaatagctggcccaccacctttggcggaggcaccaagctggaaatcaagagaggcggaggcggaagtggaggcggaggatctggcggcggaggctctcaggtgcaactccagcagtccgacgccgagcttgtgaagcctggcgcttccgtgaagattagctgcaaggccagcggctacaccttcaccgaccacgccattcactgggtcaagcagaagcccgagcagggcctggaatggatcggctacttcagccccggcaacggcgacatcaagtacaacgagaagttcaagggcaaggccaccctgaccgccgacaagagcagcagcacagcctacatgcaactgaacagcctgaccagcgaggactccgccgtgtacttctgcaagcggagctacggcaactacgactactggggccagggcaccacactgaccgtgtctagtacgcgtggaggcggatctatggaccctgatctcgaaattgaggccgcctttctggaacgcgagaacactgccctggaaaccagggtcgcagagctgagacagagagtgcagagactgcggaacagagtgtctcagtaccgcaccagatatggcccactcggcggaggtaaa

SEQ ID NO: 1409 - DNA, 966 bp, Artificial Sequence
  Synthetic Polynucloetide
atggccttaccagtgaccgccttgctcctgccgctggccttgctgctccacgccgccaggccggacatcgtgatgacccagagccccgatagcctggccgtgtctctgggagagagagccaccatcaactgcaagagcagccagagcctgctgaacagcggcgaccagaagaactacctgacctggtatcagcagaagcccggccagccccccaagctgctgatctactgggccagcaccagagaaagcggcgtgcccgatagattcagcggcagcggaagtggcaccgacttcaccctgaccatcagttctcttcaggccgaggacgtggccgtgtactactgccagaacgactacagctaccccctgaccttcggccagggcaccaaggtggaaatcaagggcggaggcggaagtggaggcggaggatctggcggcggaggctctcaggtgcagctggtgcagtctggggccgaagtgaagaaaaccggcagcagcgtgaaggtgtcctgcaaggccagcggctacacctttaccgaccacgccattcacgtgtggcggcaggctccaggacaggccctggaatggatgggccacttcagccccggcaacaccgacatcaagtacaacgacaagttcaagggcagagtgaccctgaccgtggaccgcagcatgagcaccgcctacatggaactgagcagcctgcggagcgaggacaccgccatgtactattgcaagaccagcaccttctttttcgactactggggccagggaacaatggtcaccgtgtccagcacgcgtggaggcggatctatggaccctgatctcgaaattgaggccgcctttctggaacgcgagaacactgccctggaaaccagggtcgcagagctgagacagagagtgcagagactgcggaacagagtgtctcagtaccgcaccagatatggcccactcggcggaggtaaa

SEQ ID NO: 1410 - DNA, 963 bp, Artificial Sequence
  Synthetic Polynucloetide
atggccttaccagtgaccgccttgctcctgccgctggccttgctgctccacgccgccaggccggacatccagatgacccagagccccagcagcctgtctgccagcgtgggcgacagagtgaccatcacatgcaaggccagccaggacgtgtccattgccgtggcctggtatcagcagaagcccggcaaggcccccaaggtgctgatctacagcgccagctacagatacaccggcgtgcccgacagattcagcggctctggcagcggcaccgacttcaccttcaccatcagctccctccagcccgaggatattgccgtgtactactgccagcagcactacatcacccccctgacctttggcggaggcaccaaggtggaaatcaagggcggaggcggaagtggaggcggaggatctggcggcggaggctctcagatccaactggtgcagagcggccacgaagtgaagaaacctggggccagcgtgaaggtgtcctgcaaagccagcggctacacctttaccaactacggcatgaactgggtgcgccaggcccctggacagggcctggaatggatgggctggatcaacaccaagaccggcgagcccacctacgccgaagagttcaagggcagattcgtgttcagcctggaaaccagcgcctccaccgcctacctccagatcagctctctgaaggccgaggacaccgccatgtacttttgcggcagaggcggctacggcagcagctactggtacttcgatgtgtggggccagggcaccaccgtgaccgtgtcatctacgcgtggaggcggatctatggaccctgatctcgaaattgaggccgcctttctggaacgcgagaacactgccctggaaaccagggtcgcagagctgagacagagagtgcagagactgcggaacagagtgtctcagtaccgcaccagatatggcccactcggcggaggtaaa

SEQ ID NO: 1411 - DNA, 972 bp, Artificial Sequence
  Synthetic Polynucloetide
atggccttaccagtgaccgccttgctcctgccgctggccttgctgctccacgccgccaggccgcaggctgtcgtgacacagcctcctagcgcctctggcacaccaggccagagagtgaccatctcctgtagcggcagcagcagcaacatcggcagcaacaccgtgaactggtatcagcaggtgcccggcaccgctcccaagctgctgatctacagcaacaaccagcggcccagcggcgtgcccgatagattttctggcagcaagagcggcaccagcgccagcctggctatctctggactccagtccgaggacgaggccgactactattgcgccgcctgggacgatagcctgaacggctgggtgttcggcggaggcaccaagctgacagtgctgggcggaggcggaagtggaggcggaggatctggcggcggaggctctcagatgcaactggtgcagagcggagccgaagtgaaagagcctggcgagagcctgcggatctcctgcaagggcagcggctacagcttcaccaatttctggatctcttgggtgcgccagatgcccggcaagggcctggaatggatgggcagagtggaccccggctactcctacagcacctacagccctagcttccagggccacgtgaccatcagcgccgacaagagcaccagcaccgcctacctccagtggaacagcctgaaggccagcgacaccgccatgtactactgcgccagagtgcagtacagcggctattacgattggttcgacccctggggccagggcacactcgtgacagtgtcaagcacgcgtggaggcggatctatggaccctgatctcgaaattgaggccgcctttctggaacgcgagaacactgccctggaaaccagggtcgcagagctgagacagagagtgcagagactgcggaacagagtgtctcagtaccgcaccagatatggcccactcggcggaggtaaa

SEQ ID NO: 1412 - DNA, 954 bp, Artificial Sequence
  Synthetic Polynucloetide
atggccttaccagtgaccgccttgctcctgccgctggccttgctgctccacgccgccaggccggacatccagatgacccagagccccagcacactgagcgccagcgtgggcgacagagtgaccatcacctgtcgggccagccagaacatcaacaagtggctggcctggtatcagcagaggcccggaaaagccccccagctgctgatctacaaggccagcagcctggaaagcggcgtgcccagcagattttctggcagcggctctggcaccgagtacaccctgaccatcagctccctccagcccgacgacttcgccacctactactgccagcagtacaacagctacgccaccttcggccagggcaccaaggtggaaatcaagagaggcggaggcggaagtggaggcggaggatctggcggcggaggctctcaggtgcagctggtgcagtctggggccgaagtgaagaagcctggcgagagcctgaagatcagctgcaagggctccggctacaacttctctaacaagtggatcggctgggtgcgccagctgcctggcagaggactggaatggatcgccatcatctaccccggctacagcgacatcacctacagccccagcttccagggccgcgtgacaatcagcgccgacaccagcatcaacaccgcctacctgcactggcacagcctgaaggccagcgacaccgccatgtactactgcgtgcggcatacagccctggctggcttcgattattggggcctgggcaccctcgtgaccgtgtctagtacgcgtggaggcggatctatggaccctgatctcgaaattgaggccgcctttctggaacgcgagaacactgccctggaaaccagggtcgcagagctgagacagagagtgcagagactgcggaacagagtgtctcagtaccgcaccagatatggcccactcggcggaggtaaa

SEQ ID NO: 1413 - DNA, 969 bp, Artificial Sequence
  Synthetic Polynucloetide
atggccttaccagtgaccgccttgctcctgccgctggccttgctgctccacgccgccaggccgcagagcgtcgtgacacagcctcctagcgtgtcagtggcccctggcaagaccgccagaatcacctgtggccggaacaacatcggcagcaagagcgtgcactggtatcagcagaagcccggccaggctcctgtgctggtggtgtacgacgacagcgacagacccagcggcatccccgagagattcagcggcagcaactccggcaataccgccaccctgaccatcagcagagtggaagccggcgacgaggccgactactactgccaagtgtgggacagcagcagcgatcacgtggtgtttggcggaggcaccaagctgacagtgctgggtggcggaggcggaagtggaggcggaggatctggcggcggaggctctgaagtgcaactggtgcagtctggcggaggggtcgtgcggcctggcggatctctgagactgtcttgtgccgccagcggcttcaccttcgacgactacggcatgagctgggtgcgccaggcccctggaaaaggcctggaatgggtgtccggcatcaactggaatggcggcagcaccggctacgccgattctgtgcggggcagattcaccatcagccgggacaacgccaagaacagcctgtacctgcagatgaactccctgcgggccgaggacaccgccctgtactattgcgccagagagcggggctacggctaccacgaccctcacgattattggggccagggcacccttgtcaccgtgtcctctacgcgtggaggcggatctatggaccctgatctcgaaattgaggccgcctttctggaacgcgagaacactgccctggaaaccagggtcgcagagctgagacagagagtgcagagactgcggaacagagtgtctcagtaccgcaccagatatggcccactcggcggaggtaaa

SEQ ID NO: 1414 - DNA, 966 bp, Artificial Sequence
  Synthetic Polynucloetide
atggccttaccagtgaccgccttgctcctgccgctggccttgctgctccacgccgccaggccggacatcgtgctgacacagagccctgcttctctggccgtgtctctgggacagagagccaccatcagctgtagagccagcgagagcgtggacaactacggcaacaccttcatgcactggtatcagcagaagcccggccagcctcctaagctgctgatctacagagccagcaacctggaaagcggcatccccgccagattttctggcagcggcagcagaaccgacttcaccctgaccatcaatcccgtggaagccgacgacgtggcaacctactactgccagcagagcaacgaggaccctcctacatttggagccggcaccaagctggaactgaaaggcggaggcggaagtggaggcggaggatctggcggcggaggctctcagattcagctggtgcagtctggccccgagctgaagaaacctggcgagacagtgaagatcagctgcaaggccagcggctacatcttcaccaattacggcatgaactgggtcaagcaggcccctggcaagagcttcaagtggatgggctggatcaacacctacaccggcgagagcacatacagcgccgacttcaagggcagattcgccttcagcctggaaaccagcgccagcacagcctacctgcacatcaacgacctgaagaacgaggacaccgccacctacttttgcgccagaagcggcggctacgaccctatggattattggggccagggcaccagcgtgaccgtttcttctacgcgtggaggcggatctatggaccctgatctcgaaattgaggccgcctttctggaacgcgagaacactgccctggaaaccagggtcgcagagctgagacagagagtgcagagactgcggaacagagtgtctcagtaccgcaccagatatggcccactcggcggaggtaaa

SEQ ID NO: 1415 - DNA, 960 bp, Artificial Sequence
  Synthetic Polynucloetide
atggccttaccagtgaccgccttgctcctgccgctggccttgctgctccacgccgccaggccggagatcgtgctgacacagagccctggcaccctgagcctgtctccaggcgaaagagccacactgagctgtcgggccagccagagcgtgtccaatacctacctggcctggtatcaccagaggcccggacaggctccccggctgctgatctatggcgcttctagcagagccaccggcatccccgatagattcagcggctctggcagcggcaccgacttcgccctgacaatcagctccctggaacccgaggacttcgccgtgtactactgccagcagtacagcaactcctggaccttcggccagggcaccaaggtggaaatcaagagaggcggaggcggaagtggaggcggaggatctggcggcggaggctctcaggtgcaactggtggaatctggcgggggagtggtgcagcctggcagaagcctgagactgtcttgtgccgccagcggcttcaccttcagcagctacgacatgcactgggtgcgccaggcccctggcaaaggactggaatgggtggccgtgatctcctacgacggcaccaacgagtattacgccgacagcgtgaagggccggttcaccatctccagagacaccagcaagaacaccctgtacctccagatgaacagcctgcgggccgaggacacagccgtgtattattgcgccagagagcggtacttcgactggtccttcgactactggggccagggaaccctggtgtccgtgtctagtacgcgtggaggcggatctatggaccctgatctcgaaattgaggccgcctttctggaacgcgagaacactgccctggaaaccagggtcgcagagctgagacagagagtgcagagactgcggaacagagtgtctcagtaccgcaccagatatggcccactcggcggaggtaaa

SEQ ID NO: 1416 - DNA, 957 bp, Artificial Sequence
  Synthetic Polynucloetide
atggccttaccagtgaccgccttgctcctgccgctggccttgctgctccacgccgccaggccggagctgacacaggaccctgctgtgtctgttgccctgggccagacagtgcggattacctgtcaaggcgacagcctgagaagcaactacgccaactggtatcagcagaagcccggacaggctcccgtgctggttatctacggccagaacaacagacccagcggcatccccgatagattcagcggctctagctctggcaataccgccagcctgacaatcactggcgctcaggctgccgatgaggccgactactactgcgatagcagagtgtccaccggcaatcacgtggtgtttggcggcggaacaaagctgacagtgctcggacaaggcggaggcggaagtggaggcggaggatctggcggcggaggctctgaagttcagctggtgcagagcggagccgaagtgaagaaacctggggcctctgtgaaggtgtcctgcaaggcttccggctacacctttaccagctacgccatgcactgggtccgacaggcacctggacaacggcttgaatggatgggctggatcaacgccggcaacggcaacaccaagtacagccagaaattccagggccgcgtgaccatcaccagagatacaagcgccagcaccgcctacatggaactgtctagcctgagatccgaggacaccgccgtgtactactgtgccagagacatcagctacggcagcttcgactattggggccagggcacactggtcaccgttagctctacgcgtggaggcggatctatggaccctgatctcgaaattgaggccgcctttctggaacgcgagaacactgccctggaaaccagggtcgcagagctgagacagagagtgcagagactgcggaacagagtgtctcagtaccgcaccagatatggcccactcggcggaggtaaa

SEQ ID NO: 1417 - DNA, 945 bp, Artificial Sequence
  Synthetic Polynucloetide
atggccttaccagtgaccgccttgctcctgccgctggccttgctgctccacgccgccaggccggacatccagatgacacagagccctagcagcctgtctgccagcgtgggagacagagtgaccatcacctgtagcgccaccagcagcatcagctacatgcactggtatcagcagaagcccggcaaggcccctaaaggctggatctacgataccagcaaactggcccacggcgtgcccagcagattttctggttctggcagcggcaccgacttcaccctgacaatatctagcctccagcctgaggacttcgccacctactactgccaccagagaagaagctaccccttcaccttcggccagggcaccaaggtggaaatcaaaggcggaggcggaagtggaggcggaggatctggcggcggaggctctgaagtgcaactggttcagagcggagccgaagtgaagaaacctggggcctctgtgaaggtgtcctgcaaggcttccggctacacctttaccaatttctggattcactgggtccgacaggctccaggccaaggactggaatggatcggagagatcgaccccagcgacagctacaccaactacaaccagaaattcaaaggccgggtcaccatcaccagagacaccagcacaagcaccgcctacctggaactgagcagcctgagaagcgaggacaccgccgtgtactactgcgccagggaaatcaccaccgtggattattggggccagggaaccctggtcaccgtgtcatctacgcgtggaggcggatctatggaccctgatctcgaaattgaggccgcctttctggaacgcgagaacactgccctggaaaccagggtcgcagagctgagacagagagtgcagagactgcggaacagagtgtctcagtaccgcaccagatatggcccactcggcggaggtaaa

SEQ ID NO: 1418 - DNA, 966 bp, Artificial Sequence
  Synthetic Polynucloetide
atggccttaccagtgaccgccttgctcctgccgctggccttgctgctccacgccgccaggccggacatccagatgacacagagccctagcagcctgtctgccagcgtgggagacagagtgaccatcacatgcaaggccagccagggcttcaacaaatacgtggcctggtatcagcagaagcccggcaaggctcctaagctgctgatctactacaccagcacactccagcctggcgtgcccagcagattttctggctctggcagcggcagagactacaccctgacaatatccagcctccagccagaggacttcgccacctactactgtctccagtacggcaacctgctgtacgcctttggacagggcaccaaggtggaaatcaagagaggcggaggcggaagtggaggcggaggatctggcggcggaggctctgaagttcagcttgtgcagagcggagccgaagtgaagaaacctggggcctctgtgaaggtgtcctgcaaagccagcggctacacctttaccagctactggatcggctgggtccgacaggctcctggacaaggactggaatggatcggcgacatctatcccggcggaggctacaccaactacaacgagaagttcaagggccgcgtgacaatcaccagagacacctctacaagcaccgcctacctggaactgagcagcctgagaagcgaggacaccgccgtgtactactgcgccagactggatggcagcagctacagaggcgctatggattcttggggccagggcacactggtcaccgtttcttctacgcgtggaggcggatctatggaccctgatctcgaaattgaggccgcctttctggaacgcgagaacactgccctggaaaccagggtcgcagagctgagacagagagtgcagagactgcggaacagagtgtctcagtaccgcaccagatatggcccactcggcggaggtaaa

SEQ ID NO: 1419 - DNA, 954 bp, Artificial Sequence
  Synthetic Polynucloetide
atggccttaccagtgaccgccttgctcctgccgctggccttgctgctccacgccgccaggccggacatccagatgacacagagccctagcagcctgtctgccagcgtgggagacagagtgaccatcacctgtagagccagccaggacatccggtactacctgaactggtatcagcagaagcccggcaaggcccctaagctgctgatctatgtggcctccagcctccagagcggagtgccttctagattttctggcagcggctccggcaccgagtttaccctgacagtgtctagcttgcagcccgaggacttcgccacctactactgcctgcaagtgtacagcacccctcggacctttggacagggcaccaaggtggaaatcaaaggcggaggcggaagtggaggcggaggatctggcggcggaggctctgaagtgcagcttgttgaatctggcggcggactggctaagcctggcggatctctgagactgtcttgtgccgccagcggcttccggttcaccttcaacaactactacatggactgggtccgacaggcccctggacaaggacttgaatgggtgtccagaatcagcagcagcggcgaccctacttggtacgccgattctgtgaagggcagattcaccatcagcagagagaacgccaagaacaccctgttcctccagatgaactccctgagagccgaggacaccgccgtgtactattgtgcctctctgaccaccggcagcgattcttggggacagggcgtgctggttaccgtgtcatctacgcgtggaggcggatctatggaccctgatctcgaaattgaggccgcctttctggaacgcgagaacactgccctggaaaccagggtcgcagagctgagacagagagtgcagagactgcggaacagagtgtctcagtaccgcaccagatatggcccactcggcggaggtaaa

SEQ ID NO: 1420 - DNA, 957 bp, Artificial Sequence
  Synthetic Polynucloetide
atggccttaccagtgaccgccttgctcctgccgctggccttgctgctccacgccgccaggccggagatcgtgatgacacagagccccgccacactgagtgtgtctccaggcgaaagagccacactgtcctgtagagccagccagagcgtgtccagaaacctggcctggtatcagcagaagcctggacaggctccccggctgttgatctacggcgcttctacaagagccaccggcattcccgccagattttctggctctggcagcggcaccgagttcaccctgacaatcggaagcctccagagcgaggacttcgccgtgtactactgccagcagtacaagacctggcctcggacctttggacagggcaccaacgtggaaatcaaaggcggaggcggaagtggaggcggaggatctggcggcggaggctctcaagttcagctgcaacaatggggagccggcctgctgaagcctagcgaaacactgtctctgacctgcgccgtgttcggcggctctttcagcggctactactggtcctggatcagacagcctcctggcaaaggactggaatggatcggcgagatcaaccaccggggcaacaccaacgacaaccccagcctgaaaagcagagtgaccatcagcgtggacaccagcaagaaccagttcgccctgaagctgagcagcgtgacagccgctgataccgccgtgtattattgcgccagagagcggggctacacctacggcaatttcgatcactggggccagggcaccctggtcacagtttcttctacgcgtggaggcggatctatggaccctgatctcgaaattgaggccgcctttctggaacgcgagaacactgccctggaaaccagggtcgcagagctgagacagagagtgcagagactgcggaacagagtgtctcagtaccgcaccagatatggcccactcggcggaggtaaa

SEQ ID NO: 1421 - DNA, 975 bp, Artificial Sequence
  Synthetic Polynucloetide
atggccttaccagtgaccgccttgctcctgccgctggccttgctgctccacgccgccaggccggacatccagatgacccagagccccagcagcctgtctgccagcgtgggcgacagagtgaccatcacatgcaaggccagcaagaacatcagaagctacctggcctggtatcagcagaagcccggcaaggcccccaagctgctgatctacagcggcagcacactgcacagcggcgtgcccagcagattttccggctctggcagcggcaccgacttcaccctgaccatctctagcctccagcccgaggacttcgccacctactactgccagcagcaccacgagtaccccctgacattcggccagggcaccaaggtggaaatcaagagaggcggaggcggaagtggaggcggaggatctggcggcggaggctctcaggtgcaactccaggaatctggccccggactcgtgaagcccagcgagacactgagcctgacctgtaccgtgtccggctacaccatcaccagcggctacgactggtcctggatcagacagcctcctggcaagggcctggaatggatcggctacatcaactacggcggctccaccaactacaagcccagcctgggaagccgcgtgacaatcagcgtggacacctccaagaaccagttcagcctgaagctgagcagcgtgacagccgccgataccgccgtgtactactgcgcccggtacaacgagtacaagagctacatctacgattggtacttcgacttctggggccagggaaccctcgtgaccgtgtctagtacgcgtggaggcggatctatggaccctgatctcgaaattgaggccgcctttctggaacgcgagaacactgccctggaaaccagggtcgcagagctgagacagagagtgcagagactgcggaacagagtgtctcagtaccgcaccagatatggcccactcggcggaggtaaa

SEQ ID NO: 1422 - DNA, 981 bp, Artificial Sequence
  Synthetic Polynucloetide
atggccttaccagtgaccgccttgctcctgccgctggccttgctgctccacgccgccaggccgcagtctgtggtcacacagcctccatccgtgtctgctgcccctggacagaaagtgaccatctcctgtagcggcagcagcagcaacatcggcaacaactacgtgtcctggtatcagcagctccccggcacagctcccaaactgctgatctacgacaacaacaagcggcccagcggcatccccgatagattttctggcagcaagagcggcaccagcgccacactgggaattaccggacttcagacaggcgacgaggccgactactactgtggcacatgggatggcagcctgtacaccatgcttttcggcggaggcaccaagctgacagtgcttggcggaggcggaagtggaggcggaggatctggcggcggaggctctgaagtgcaactggtggaatctggcggcggactggttaagcctggcggatctctgagactgtcttgtgccgccagcggcttcaccttcagcaatgcctggatgagctgggttcgacaggcccctggaaaaggactggaatgggtcggattcatccggtccaaagcctacggcggcaccacagaatatgccgcctctgtgaagggcagattcaccatcagccgggacgacagcaagtctatcgcctacctccagatgaacaacctgaaaaccgaggacaccgccgtgtactactgcgccagagatggcctgtacagcagctcttggtacgacagcgattactggggccagggcacactggtcacagtgtcatctacgcgtggaggcggatctatggaccctgatctcgaaattgaggccgcctttctggaacgcgagaacactgccctggaaaccagggtcgcagagctgagacagagagtgcagagactgcggaacagagtgtctcagtaccgcaccagatatggcccactcggcggaggtaaa

SEQ ID NO: 1423 - DNA, 996 bp, Artificial Sequence
  Synthetic Polynucloetide
atggccttaccagtgaccgccttgctcctgccgctggccttgctgctccacgccgccaggccgcagtctgtgctgacacagcctcctagtgtgtctggcgctcctggacagagagtgaccatctcttgtaccggcagcagcagcaatatcggagccggctatgacgtgcactggtatcagcagctccctggcacagcccctaaactgctgatcttcggcaacagcaacagacccagcggcgtgcccgatagattcagcggctttaagagcggcacaagcgccagcctggctatcactggactgcaagccgaggacgaggccgactacttctgccagagctacgatagcagcctgagcggcagcggagtgtttggcacaggcaccaaagtgacagtgcttggcggcggaggcggaagtggaggcggaggatctggcggcggaggctctcaaatgcaactggttcaaagcggcggtggcctggtgcaacctggaagaagtctgagactgagctgtgccgccagcggcttcaccttcgatgattacgccatgcactgggtccgacaggcccctggaaaaggactggaatgggtgtccggcatctcctggaatagcggctctatcggctacgccgacagcgtgaagggcagattcaccatcagccgggacaacgccaagaacagcctgtacctccagatgaactccctgagagccgaggatacagccctgtactactgcgccaaggacatccacagcggcagctactacggcctgctgtactacgctatggacgtgtggggccagggcacaaccgtgacagtttcttctacgcgtggaggcggatctatggaccctgatctcgaaattgaggccgcctttctggaacgcgagaacactgccctggaaaccagggtcgcagagctgagacagagagtgcagagactgcggaacagagtgtctcagtaccgcaccagatatggcccactcggcggaggtaaa

SEQ ID NO: 1424 - DNA, 996 bp, Artificial Sequence
  Synthetic Polynucloetide
atggccttaccagtgaccgccttgctcctgccgctggccttgctgctccacgccgccaggccgctgcctgttctgacacagcctccatctgcctctggcacacctggacagagagtgaccatcagctgtagcggcagaagcagcaacatcggcagcaacagcgtgaactggtacagacagcttcctggcgctgcccctaagctgctgatctacagcaacaaccagcggcctcctggcgtgccagtcagattttctggcagcaagagcggcacaagcgccagcctggctatttctggactccagtctgaggacgaggccacctactactgtgccacctgggacgacaacctgaacgtgcactacgtgttcggcaccggcaccaaagtgacagtgcttggaagtagaggcggaggcggaagtggaggcggaggatctggcggcggaggctctcttgaaatggctcaggtgcagctggtgcagagcggagccgaagtgaagaaacctggcagcagcgtgaaggtgtcctgcaaagcttctggcggcaccttcagcagctacgccatctcttgggttcgacaggcccctggacaaggactggaatggatgggcagaatcatccccatcctgggaatcgccaactacgcccagaaattccagggcagagtgacaatcaccgccgacaagagcaccagcaccgcctacatggaactgagcagcctgagaagcgaggacaccgccgtgtactattgtgcaagaggcggctactacagccacgacatgtggagcgaagattggggccagggcacactggtcacagtgtcatctacgcgtggaggcggatctatggaccctgatctcgaaattgaggccgcctttctggaacgcgagaacactgccctggaaaccagggtcgcagagctgagacagagagtgcagagactgcggaacagagtgtctcagtaccgcaccagatatggcccactcggcggaggtaaa

SEQ ID NO: 1425 - DNA, 963 bp, Artificial Sequence
  Synthetic Polynucloetide
atggccttaccagtgaccgccttgctcctgccgctggccttgctgctccacgccgccaggccggacatcgtgctgacacagagccctgcttctctggccgtgtctctgggagagagagccaccatcaactgtagagccagcgagagcgtgtccgtgattggagcccacctgatccactggtatcagcagaagcctggacagcctcctaagctgctgatctacctggcctccaacctggaaacaggcgtgccagccagattttctggcagcggctctggcaccgatttcaccctgacaatcagcagcctccaggccgaagatgccgccatctactactgcctccagagccggatcttccccagaacctttggacagggcaccaagctggaaatcaaaggcggaggcggaagtggaggcggaggatctggcggcggaggctctcaagttcagctggtgcagtctggctccgagctgaagaaacctggcgagtccgtgaagatcagctgcaaggccagcggctacaccttcaccgactacagcatcaactgggtcaagcaggcccctggacagggactgaaatggatgggctggatcaacaccgagacaagagagcccgcctacgcctacgacttcagaggcagattcgtgttctccctggacaccagcgccagcacagcctatctccagatcagctctctgaaggccgaggataccgccgtgtacttctgcgccctggactacagctacgctatggactattggggccagggcaccctggtcacagtctcttctacgcgtggaggcggatctatggaccctgatctcgaaattgaggccgcctttctggaacgcgagaacactgccctggaaaccagggtcgcagagctgagacagagagtgcagagactgcggaacagagtgtctcagtaccgcaccagatatggcccactcggcggaggtaaa

SEQ ID NO: 1426 - DNA, 966 bp, Artificial Sequence
  Synthetic Polynucloetide
atggccttaccagtgaccgccttgctcctgccgctggccttgctgctccacgccgccaggccggacatcgtgctgacacagtctcccgccacactgtcactgagccctggcgatagagccacactgagctgtagagccagcgagagcgtgacaatcctgggcagccacctgatctactggtatcagcagaagcccggacaggcccctagactgctgattcagctcgccagcaatgtgcagacaggcatccctgccagattttccggcagcggcagcagaaccgatttcaccctgaccataagcagcctggaacctgaggacttcgccgtgtactactgcctccagagccggacaatccccagaacctttggacagggcaccaagctggaaatcaagagaggcggaggcggaagtggaggcggaggatctggcggcggaggctctcaagttcaactggtgcagagcggctccgagctgaagaaacctggcgagtccgtgaagattagctgcaaggccagcggctacaccttcacacactacagcatgaactgggtccgacaggctccaggccaaggactggaatggatgggcagaatcaacaccgagacaggcgagcccctgtacgccgacgatttcaagggcagattcgtgttcagcctggacaccagcgccagcacagcctatctccagatcagctctctgaaggccgaggacaccgccgtgtattattgcagcaacgactacctgtactccctggactattggggccagggcacactggtcacagtgtctagtacgcgtggaggcggatctatggaccctgatctcgaaattgaggccgcctttctggaacgcgagaacactgccctggaaaccagggtcgcagagctgagacagagagtgcagagactgcggaacagagtgtctcagtaccgcaccagatatggcccactcggcggaggtaaa

SEQ ID NO: 1427 - DNA, 978 bp, Artificial Sequence
  Synthetic Polynucloetide
atggccttaccagtgaccgccttgctcctgccgctggccttgctgctccacgccgccaggccggacttcgtgatgacacagagccctgatagcctggccgtgtctctcggcgagcgagtgaccatgagctgcaagtctagccagagcctgctgaacagcggcaaccagaagaactacctgacctggtatcagcagaagcccggccagcctcctaagctgctgatctactgggccagcaccagagaaagcggcgtgcccgatagattttctggctctggcagcggcaccgacttcaccctgacaatttctagcctgcaagccgaggacgtggccgtgtactactgccagaacgactacagctacccctacaccttcggccagggcaccaagctggaaatcaaaggcggaggcggaagtggaggcggaggatctggcggcggaggctctgaagtgcaactggttcagagcggagccgagctgaagaaacctggggccagcgtgaaggtgtcctgtaaagccagcggctacacctttaccgactactacatgaaatgggtccgacaggccccaggccagggactcgaatggatcggcgatattatccccagcaacggggccaccttctacaaccagaaattcaagggccgcgtgaccatcaccgtggacaagagcacaagcaccgcctacatggaactgagcagcctgagaagcgaggacaccgccgtgtattattgcgccagaagccatctgctgcgggccagttggttcgcctattggggacagggaaccctggtcaccgttagctctacgcgtggaggcggatctatggaccctgatctcgaaattgaggccgcctttctggaacgcgagaacactgccctggaaaccagggtcgcagagctgagacagagagtgcagagactgcggaacagagtgtctcagtaccgcaccagatatggcccactcggcggaggtaaa

SEQ ID NO: 1428 - DNA, 978 bp, Artificial Sequence
  Synthetic Polynucloetide
atggccttaccagtgaccgccttgctcctgccgctggccttgctgctccacgccgccaggccggacttcgtgatgacacagagccctgatagcctggccgtgtctctcggcgagcgagtgaccatgagctgcaagtctagccagagcctgctgaacagcggcaaccagaagaactacctgacctggtatcagcagaagcccggccagcctcctaagctgctgatctactgggccagcaccagagaaagcggcgtgcccgatagattttctggctctggcagcggcaccgacttcaccctgacaatttctagcctgcaagccgaggacgtggccgtgtactactgccagaacgactacagctacccctacaccttcggccagggcaccaagctggaaatcaaaggcggaggcggaagtggaggcggaggatctggcggcggaggctctcaagtgcaactggttcagagcggagccgagctgaagaaacctggggccagcgtgaaggtgtcctgtaaagccagcggctacacctttaccgactactacatgaaatgggtccgacaggccccaggccagggactcgaatggatcggcgatattatccccagcaacggggccaccttctacaaccagaaattcaagggccgcgtgaccatcaccgtggacaagagcacaagcaccgcctacatggaactgagcagcctgagaagcgaggacaccgccgtgtattattgcgccagaagccatctgctgcgggccagttggttcgcctattggggacagggaaccctggtcaccgttagctctacgcgtggaggcggatctatggaccctgatctcgaaattgaggccgcctttctggaacgcgagaacactgccctggaaaccagggtcgcagagctgagacagagagtgcagagactgcggaacagagtgtctcagtaccgcaccagatatggcccactcggcggaggtaaa

SEQ ID NO: 1429 - DNA, 948 bp, Artificial Sequence
  Synthetic Polynucloetide
atggccttaccagtgaccgccttgctcctgccgctggccttgctgctccacgccgccaggccggacgtgcagatcacacagagccctagctacctggctgcctctcctggcgagacaatcaccatcaactgtcgggccagcaagagcatcagcaaggacctggcctggtatcaagagaagcccggcaagaccaacaagctgctgatctacagcggcagcacactccagtctggcatccccagcagattttccggctctggcagcggcaccgatttcaccctgaccataagcagcctggaacctgaggacttcgccatgtactactgccagcagcacaacaagtacccctacacctttggcggaggcaccaagctggaaatcaagagaggcggaggcggaagtggaggcggaggatctggcggcggaggctctcaagttcaactgcaacagcctggggccgagcttgttagacctggcgcttctgtgaagctgagctgcaaggccagcggctacaccttcaccagctactggatgaactgggtcaagcagcggcctgaccagggcctcgaatggatcggcagaatcgacccctacgacagcgagacacactacaaccagaagttcaaggacaaggccatcctgaccgtggacaagagcagctccaccgcctacatgcaactgagcagcctgacctctgaggatagcgccgtgtactattgcgccagaggcaactgggacgactattggggccagggcacaaccctgacagtgtctagtacgcgtggaggcggatctatggaccctgatctcgaaattgaggccgcctttctggaacgcgagaacactgccctggaaaccagggtcgcagagctgagacagagagtgcagagactgcggaacagagtgtctcagtaccgcaccagatatggcccactcggcggaggtaaa

SEQ ID NO: 1430 - DNA, 954 bp, Artificial Sequence
  Synthetic Polynucloetide
atggccttaccagtgaccgccttgctcctgccgctggccttgctgctccacgccgccaggccggagatcgtgctgacacagagccctaccagcatgacagcctctccaggcgagcaagtgaccatcacctgtagagccagcagcagcatcaactacatgcactggtatcagcagaagcctggcgcaagccccagaccttggatctacgagacaagcaagctggcctccggcgtgcccgatagattttctggatctgccagcggcaccagctacagcctgaccatcaacaacatggaagccgaggacgccgccacctactactgccagcagtggaattacccctcctggacctttggcggaggcaccaagctggaacttaaaggcggaggcggaagtggaggcggaggatctggcggcggaggctctgaagtgcagctcgttgagtctggtggcggactggttcagcctggaagaagcctgaagctgagctgtgccgccagcggcttcaccttcagcgactacaatatggcctgggtccgacaggcccctaagaaaggactggaatgggtcgccaccatcctgtacgatggcggcagaacctactaccggggcagcgtgaagggcagattcaccatcagcagagacaacgccaagagcaccctgtacctgcggatggactctctgagaagcgaggataccgccacatattactgtgccacacacagccggggcaccgactactttgattattggggccagggcgtgatggttaccgtgtctagtacgcgtggaggcggatctatggaccctgatctcgaaattgaggccgcctttctggaacgcgagaacactgccctggaaaccagggtcgcagagctgagacagagagtgcagagactgcggaacagagtgtctcagtaccgcaccagatatggcccactcggcggaggtaaa

SEQ ID NO: 1431 - DNA, 981 bp, Artificial Sequence
  Synthetic Polynucloetide
atggccttaccagtgaccgccttgctcctgccgctggccttgctgctccacgccgccaggccggacatcgtgatgacacagagcccttctagcctggccgtgtctgagggcgagacagtgaccatcaactgcaagagcagccagagcttcctgtctagcggcgacggcaagaattacgtggcctggtatcagtacaagcccggacagagccccaagctgctgatctactgggccagcacaagacagagcggcgtgcccgatagattcatcggctctggcagcggcaccgacttcaccctgacaatctctacagtgcaggccgaggacctggctatctactactgccagcagtattacgacacccctctgacctttggctccggcaccaagctggaaatcaaaggcggaggcggaagtggaggcggaggatctggcggcggaggctctgaagtgaagctgcaagagtctggccccagcctggtgcagagtagccaaacactgagcctgacctgtaccgtgtccggctttagcctgaccagctaccacatccactgggtccgacagacccctggcaaaggactggaatggatgggcgtgatgtggagcgacggcgacaccagctataacagcgccctgaagtcccggctgagcatcagcagagatacaagccagagccaggtgttcctgaagatgaacagcctccagaccgaggacaccgccacctactattgtgccagaggctactacagcagctacctgtacctttggttcgcctattggggccagggcaccctggttacagtcagctctacgcgtggaggcggatctatggaccctgatctcgaaattgaggccgcctttctggaacgcgagaacactgccctggaaaccagggtcgcagagctgagacagagagtgcagagactgcggaacagagtgtctcagtaccgcaccagatatggcccactcggcggaggtaaa

SEQ ID NO: 1432 - DNA, 993 bp, Artificial Sequence
  Synthetic Polynucloetide
atggccttaccagtgaccgccttgctcctgccgctggccttgctgctccacgccgccaggccggacgtgctgatgacccagacacctgtgtctctgccagtgtctctcggaggccaggtgtccatctcctgtagaagcagccagagcctggtgcactccgacggcgatacctacctgcactggtatctccagaagcctggacagagccctcagctcctgatctaccgggtgtccaacagattcagcggcgtgcccgatagattttccggcagcggctctggcaccgacttcaccctgaagatcagcagagtggaacccgaggacctgggcctgtactactgtctccagaccacacacttcccaccttggacctttggcggaggcaccaagctggaaatgaaaggcggaggcggaagtggaggcggaggatctggcggcggaggctctcaggttcagctccagcagtctggacccgagcttagaaggccaggatctagcgtcagactgagctgcaaggccagcggctaccggatcaaggacttcctgatccactggattaagaacagacccgagcacggcctggaatggatcggatggattgaccctgaggacggcgagactaagtacgcccagaagttccagaccaaggccacactgaccgccgacacctctagcaacaccgcctacatgcaactgagcagcctgaccagcgaggacaccgccacctacttttgtgctagatggggcgacgtgtactacggcctgatgagaggccatgtgatggatgcctggggccagggaacaagcgtgacagtctcttctacgcgtggaggcggatctatggaccctgatctcgaaattgaggccgcctttctggaacgcgagaacactgccctggaaaccagggtcgcagagctgagacagagagtgcagagactgcggaacagagtgtctcagtaccgcaccagatatggcccactcggcggaggtaaa

SEQ ID NO: 1433 - DNA, 981 bp, Artificial Sequence
  Synthetic Polynucloetide
atggccttaccagtgaccgccttgctcctgccgctggccttgctgctccacgccgccaggccggacatcgtgatgacccaggccgctcccagcatccctgtgacacctggcgagagcgtgtccatctcctgccggtctagcaagagcctgctgaacagcaacggcaatacctacctgtactggttcctccagcggccaggccagtctccccaactgctgatctaccggatgagcaacctggcctccggcgtgcccgatagattttctggcagcggctccggcaccgccttcaccctgagaatcagcagagtggaagccgaggacgtgggcgtgtactactgtatgcagcacctggaataccccttcaccttcggagccggcaccaagctggaactgaagagaggcggaggcggaagtggaggcggaggatctggcggcggaggctctgaagtgcaactccagcagagcggccctgagctgattaagcctggggccagcgtgaagatgagctgcaaggccagcggctacaccttcaccagctacgtgatgcactgggtcaagcagaagcccggccagggcctggaatggatcggctacatcaacccctacaacgatggcaccaagtacaacgagaagttcaagggcaaggccaccctgaccagcgacaagagcagcagcaccgcctacatggaactgagcagcctgacaagcgaggacagcgccgtgtactattgcgccagaggcacctactactacggcagccgggtgttcgactattggggccagggcaccacactgaccgtgtcctctacgcgtggaggcggatctatggaccctgatctcgaaattgaggccgcctttctggaacgcgagaacactgccctggaaaccagggtcgcagagctgagacagagagtgcagagactgcggaacagagtgtctcagtaccgcaccagatatggcccactcggcggaggtaaa

SEQ ID NO: 1434 - DNA, 981 bp, Artificial Sequence; identical to SEQ ID NO: 1433
  Synthetic Polynucloetide

SEQ ID NO: 1435 - DNA, 1035 bp, Artificial Sequence
  Synthetic Polynucloetide
atggccttaccagtgaccgccttgctcctgccgctggccttgctgctccacgccgccaggccgatcaacatctacaacgccgagcctgccaatcctagcgagaagaacagccccgaattcgacatcgtgatgacacagagccccgccacactgtcactgtctccaggcgaaagagccacactgagctgtcggagcagcaagagcctccagaacgtgaacggcaacacctacctgtactggttccagcagaagcccggccagtctcctcagctcctgatctacagaatgagcaacctgaacagcggcgtgcccgacagattttctggcagcggaagcggcaccgagttcaccctgaccataagcagcctggaacctgaggacttcgccgtgtactactgtatgcagcacctggaataccccatcaccttcggagccggcaccaagctggaaatcaaaggcggaggcggaagtggaggcggaggatctggcggcggaggctctgaagtgcaactggttgaatctggcggcggactggttaagcctggcggatctctgaagctgagctgtgccgccagcggctacacctttaccagctacgtgatgcactgggtccgacaggcccctggcaaaggacttgagtggatcggctacatcaacccctacaacgatggcaccaagtacaacgagaagttccagggcagagtgaccatcagctccgacaagagcatcagcaccgcctacatggaactgagcagcctgagaagcgaggataccgccatgtactattgcgccagaggcacctactactacggcaccagagtgttcgactactggggccagggaaccctggtcacagtctcttctacgcgtggaggcggatctatggaccctgatctcgaaattgaggccgcctttctggaacgcgagaacactgccctggaaaccagggtcgcagagctgagacagagagtgcagagactgcggaacagagtgtctcagtaccgcaccagatatggcccactcggcggaggtaaa

SEQ ID NO: 1436 - DNA, 966 bp, Artificial Sequence
  Synthetic Polynucloetide
atggccttaccagtgaccgccttgctcctgccgctggccttgctgctccacgccgccaggccggacatccagatgacacagagccctagcagcctgtctgccagcgtgggagacagagtgaccatcacatgcaaggccagcgaccacatcaacaactggctggcctggtatcagcagaagcctggacaggcccctaagctgctgatctacggcgctaccacactggaaacaggcgtgcccagcagattttctggcagcggctctggcaccgactacaccctgacaatatccagcctccagcctgaggacttcgccacctactactgtcagcagagctggaacaccccttggacattcggccagggcaccaagctggaaatcaagagaggcggaggcggaagtggaggcggaggatctggcggcggaggctctcaagttcagcttcaacagcctggcgctgagctggtcaaacctggcgcttctgtgaagatgagctgcaaagccagcggctacgccttcagcagctactggatcaactggatgaagcagaaacccggccagggactcgaatggatcggccaaatctatcccggcgacggcgacaccaactacaacggcaagttcaagggcagagccacactgaccgccgatacctctagcagcacagcctacatgcagctgagcagcctgaccagcgaagatagcgccgtgtacttctgtgcccggtccatcacaacagtcgtgggctgcgctatggactattggggccagggaacaagcgtgaccgtgtctagtacgcgtggaggcggatctatggaccctgatctcgaaattgaggccgcctttctggaacgcgagaacactgccctggaaaccagggtcgcagagctgagacagagagtgcagagactgcggaacagagtgtctcagtaccgcaccagatatggcccactcggcggaggtaaa

SEQ ID NO: 1437 - DNA, 972 bp, Artificial Sequence
  Synthetic Polynucloetide
atggccttaccagtgaccgccttgctcctgccgctggccttgctgctccacgccgccaggccgcagatcgtgctgtctcagtctcctgccatcctgagcgcttccccaggcgagaaagtgaccatgacctgtagagccagcagcagcgtgtcctacatgcactggtatcagcagaagcccggcagcagccctaagccttggatctacgccaccagcaatctggcctctggcgtgccagccagattttctggctctggcagcggcaccagctacagcttcacaatcagcagagtggaagccgaggacgccgccacctactattgtcagcagtggaccttcaatcctcctaccttcggcggaggcacccggctggaaatcaaaagaacagtggctgctggcggaggcggaagtggaggcggaggatctggcggcggaggctctcaggcttatctgcaacagagcggagccgaactcgtcagacctggcgcttctgtgaagatgagctgcaaggccagcggctacaccttcaccagctataatatgcactgggtcaagcagacccctcggcagggactcgaatggatcggcggaatctatcccggcaacggcgacacctcctacaaccagaagttcaagggcaaagccacactgaccgtgggcaagagcagcagcaccgcctatatgcagctcagcagcctgaccagcgaggacagcgccgtgtacttctgcgccagatacgactacaactacgctatggactactggggccagggcaccagcgtgacagttagctctgccagcacgcgtggaggcggatctatggaccctgatctcgaaattgaggccgcctttctggaacgcgagaacactgccctggaaaccagggtcgcagagctgagacagagagtgcagagactgcggaacagagtgtctcagtaccgcaccagatatggcccactcggcggaggtaaa

SEQ ID NO: 1438 - DNA, 969 bp, Artificial Sequence
  Synthetic Polynucloetide
atggccttaccagtgaccgccttgctcctgccgctggccttgctgctccacgccgccaggccggacgagatcgtgctgacacagagccctgccaccctgtctctgagccctggcgaaagagccaccctgagctgtagagccagccagagcgtgtccagctacctggcctggtatcagcagaagcccggccaggctccccggctgctgatctacgatgccagcaatagagccaccggcatccccgccagattttccggctctggcagcggcaccgacttcaccctgaccatcagctccctggaacccgaggacttcgccgtgtactactgccagcagcggagcaactggcccatcacattcggccagggcacccggctggaaatcaaaggcggaggcggaagtggaggcggaggatctggcggcggaggctctgaggtgcagcttgttgagtctggcggaggactggtgcagcccgatagaagcctgagactgtcttgtgccgccagcggcttcaccttccacgattatgccatgcactgggtccgacaggcccctggcaaaggacttgaatgggtgtccaccatctcttggaacagcggcacaatcggctacgccgactctgtgaagggcagattcaccatcagccgggacaacgccaagaacagcctgtacctccagatgaactccctgagagccgaggacacagccctgtactactgcgccaaggacatccagtacggcaactactactacggcatggacgtgtggggccagggcacaacagtgacagtctcttctacgcgtggaggcggatctatggaccctgatctcgaaattgaggccgcctttctggaacgcgagaacactgccctggaaaccagggtcgcagagctgagacagagagtgcagagactgcggaacagagtgtctcagtaccgcaccagatatggcccactcggcggaggtaaa

SEQ ID NO: 1439 - DNA, 951 bp, Artificial Sequence
  Synthetic Polynucloetide
atggccttaccagtgaccgccttgctcctgccgctggccttgctgctccacgccgccaggccggacatccagatgacacagagccctagcagcctgtctgccagcgtgggagatagagtgaccatcaactgcaaggccagccaggacatcaacagctacctgagctggttccagcagaagcctggcaaggcccctaagacactgatctaccgggccaacagactggtggatggcgtgccaagcagattttctggcagcggcagcggccaggattacaccctgacaatatccagcctccagcctgaggacttcgccacctactactgcctccagtacgacgagttccctctgacctttggcggaggcaccaaggtggaaatcaaaggcggaggcggaagtggaggcggaggatctggcggcggaggctctcaggtgcaactggtgcagtctggggccgaagtgaagaaacctggggcctctgtgaaggtgtcctgcaaagccagcggctacacctttaccaactacgacatcaactgggtccgacaggctccaggccaaggactggaatggatcggctggatctatcctggcgacggcagcaccaagtacaacgagaagttcaaggccaaggccacactgaccgccgataccagcacaagcaccgcctacatggaactgcggagcctgagaagcgacgacaccgccgtgtactattgtgcctccggctacgaggacgctatggactattggggccagggcaccaccgtgacagtgtctagtacgcgtggaggcggatctatggaccctgatctcgaaattgaggccgcctttctggaacgcgagaacactgccctggaaaccagggtcgcagagctgagacagagagtgcagagactgcggaacagagtgtctcagtaccgcaccagatatggcccactcggcggaggtaaa

SEQ ID NO: 1440 - DNA, 957 bp, Artificial Sequence
  Synthetic Polynucloetide
atggccttaccagtgaccgccttgctcctgccgctggccttgctgctccacgccgccaggccggacatcgtgatgacccagacacctctgagcctgagcgtgacacctggacagcctgccagcattagctgcaagagcagccagtctctgctggacggcgacggcaagacctacctgaattggctgctccagaagcctggacagagccctcagcggctgatctacctggtgtccaagctggatagcggcgtgcccgatagattttctggcagcggctctggcaccgacttcaccctgaagatcagcagagtggaagccgaggacgtgggcgtgtactactgttggcagggcacacacttccccagaacattcggccagggcacaaagctggaaatcaaaggcggaggcggaagtggaggcggaggatctggcggcggaggctctcaagtgcaactggttcagagcggagccgaagtgaagaaacctggggcctctgtgaaggtgtcctgcaaggccagcggctacaccttcaaggacacctacatccactgggtccgacaggcccctggacaaggacttgagtggatgggcagaatcgaccccgccaacggcaacaccaaatacgaccccaagttccagggcagagtgaccatgaccagagacaccagcatcagcaccgcctacatggaactgagccggctgagatccgatgacaccgccgtgtactattgcgctagaagaggcggagtggattggggccagggaacactggttaccgtgtctagtacgcgtggaggcggatctatggaccctgatctcgaaattgaggccgcctttctggaacgcgagaacactgccctggaaaccagggtcgcagagctgagacagagagtgcagagactgcggaacagagtgtctcagtaccgcaccagatatggcccactcggcggaggtaaa

SEQ ID NO: 1441 - DNA, 960 bp, Artificial Sequence
  Synthetic Polynucloetide
atggccttaccagtgaccgccttgctcctgccgctggccttgctgctccacgccgccaggccggacatccagatgacacagagccctagcagcctgtctgccagcgtgggagacagagtgaccatcacatgcaaggccagccaggatgtgtctacagccgtggcctggttccagcagaagcctggaaaagcccctaagctgctgatctacagccccagctacagatacaccggcgtgcccagcagattttctggcagcggctctggcaccgacttcaccctgacaatatccagcctccagcctgaggacttcacctactactgccagcagctctacagcaccccttacacattcggccagggcaccaaggtggaaatcaaaggcggaggcggaagtggaggcggaggatctggcggcggaggctctgaagtgcaactggttcagagcggagccgaagtgaagaaacctggggcctctgtgaaggtgtcctgcaaagccagcggctacacctttaccgactactacctggacgtggtcgtgcggcaagctcctggacaaggactggaatggatcggcagagtgaacccctacaacggcggcaccatctacaaccagaaattcaagggaagagtgaccctgaccagagacaccagcacctccacagcctacctggaactgagcagcctgagaagcgaagataccgccgtgtactactgcgccagggaccactacagatatgaccctctgctggactactggggccagggaaccctggttacagtgtctagtacgcgtggaggcggatctatggaccctgatctcgaaattgaggccgcctttctggaacgcgagaacactgccctggaaaccagggtcgcagagctgagacagagagtgcagagactgcggaacagagtgtctcagtaccgcaccagatatggcccactcggcggaggtaaa

SEQ ID NO: 1442 - DNA, 978 bp, Artificial Sequence
  Synthetic Polynucloetide
atggccttaccagtgaccgccttgctcctgccgctggccttgctgctccacgccgccaggccggacatccagatgacacagagccctagcagcctgtctgccagcgtgggagacagagtgaccatcacctgtagagccagccagagcgtgtccaccagcagctacaactacatgcactggtatcagcagaagcccggcaagcctcctaagctgctgattaagtacgccagcaacctggaaagcggcgtgcccagcagattttctggcagcggctctggcaccgacttcaccctgacaatatccagcctccagcctgaggacttcgccacctactactgtcagcactcctgggagatccctctgacattcggccagggcaccaaggtggaaatcaaaggcggaggcggaagtggaggcggaggatctggcggcggaggctctgaagtgcaactggttcagagcggagccgaagtgaagaaacctggggcctctgtgaaggtgtcctgcaaggccagcggctacagcttcaccgactattatatgcactgggtccgacaggctccaggccagggacttgagtggatcggcagaatcaacccctacaacggcgctgccttctacagccagaacttcaaggatagagtgaccctgaccgtggacaccagcaccagcacagcctacctggaactgagcagcctgagaagcgaggacaccgccgtgtactactgcgccattgagagaggcgctgacctggaaggctacgctatggattattggggccagggaaccctggtcaccgtgtcatctacgcgtggaggcggatctatggaccctgatctcgaaattgaggccgcctttctggaacgcgagaacactgccctggaaaccagggtcgcagagctgagacagagagtgcagagactgcggaacagagtgtctcagtaccgcaccagatatggcccactcggcggaggtaaa

SEQ ID NO: 1443 - DNA, 972 bp, Artificial Sequence
  Synthetic Polynucloetide
atggccttaccagtgaccgccttgctcctgccgctggccttgctgctccacgccgccaggccggagatcgtgctgacacagtctccagccacactgagcgcttctccaggcgagagagtgaccctgacctgtagagccagcagcaacgtgatctccagctacgtgcactggtatcagcagaagcctggcagcagccccagactgtttctgtacagcaccagcaatctggcctccggcgtgccaagcagattttctggctctggcagcggcaccgacttcacctttaccatctctagcctggaagccgaggacgccgccacctactactgtcagcagtacagcggctaccctctgaccttcggccagggcacaagactggaaatcaaaggcggaggcggaagtggaggcggaggatctggcggcggaggctctcaagttcagctgcaagagtctggccctggcctggtcaagcctagcgaaacactgagcctgacctgcgccgtgtctggctactctatcaccagcgcctactattggaactggatcagacagcctcctggcaaaggactggaatggatcggctacatcagctacgacggcagaaacaactacaaccccagcctgaagaaccggatcaccatcaatcccgacaccagcaagaaccagttcagcctccagctgaacagcgtgacccctgaggataccgccgtgtactactgtgccagagaaggcgactacgacgtgggcaactactacgctatggactactggggccagggaaccctggtcacagtctcttctacgcgtggaggcggatctatggaccctgatctcgaaattgaggccgcctttctggaacgcgagaacactgccctggaaaccagggtcgcagagctgagacagagagtgcagagactgcggaacagagtgtctcagtaccgcaccagatatggcccactcggcggaggtaaa

SEQ ID NO: 1444 - DNA, 972 bp, Artificial Sequence
  Synthetic Polynucloetide
atggccttaccagtgaccgccttgctcctgccgctggccttgctgctccacgccgccaggccggagatcgtgctgacacagtctcccgccacactgtcactgtctccaggcgaaagagccacactgagctgtagagccagcagcaacgtgatctccagctacgtgcactggtatcagcagaagcctggacaggcccctcggctgctgatctacagcacaagcaatctggcctctggcatccccgccagattttctggctctggaagcggcaccgacttcaccctgaccataagcagcctggaacctgaggacttcgccgtgtactactgccagcagtatagcggctaccctctgaccttcggccagggcacaagactggaaatcaaaggcggaggcggaagtggaggcggaggatctggcggcggaggctctgaagtgcaactggtggaaagtggcggcggactggtgcaacctggaagaagcctgagactgtcctgtgccgccagcggctactctatcacaagcgcctactactggaactgggtccgacaggctcctggcaaaggactggaatgggtgtcctacatcagctacgacggcagaaacaactacaaccccagcctgaagaaccgcttcaccatcagccgggacaacgccaagaagtccctgtacctccagatgaacagcctgagagccgaggacacagccctgtactattgcgccaaagagggcgactacgacgtcggcaactactacgctatggactactggggccagggaaccaccgtgactgtctcttctacgcgtggaggcggatctatggaccctgatctcgaaattgaggccgcctttctggaacgcgagaacactgccctggaaaccagggtcgcagagctgagacagagagtgcagagactgcggaacagagtgtctcagtaccgcaccagatatggcccactcggcggaggtaaa

SEQ ID NO: 1445 - DNA, 999 bp, Artificial Sequence
  Synthetic Polynucloetide
atggccttaccagtgaccgccttgctcctgccgctggccttgctgctccacgccgccaggccggacgtggtcatgacacagaccccactgagcctgcctgtgtctctgggagatcaggccagcatctcctgtagaagcagccagagcctggtgcacagcaacggcaacacctacctgcggtggtatctccagaagcctggacagagccccaaggtgctgatctacaaggtgtccaacagagtgtccggcgtgcccgatagattttctggcagcggctctggcaccgacttcaccctgaagatcaatagagtggaagccgaggacctgggcgtgtacttctgtagccagagcacccatgtgccttggacctttggcggaggcaccaagctggaaatcaagagcagcgccgacgacgccaagaaggacgccgccaaaaaggatgatgccaagaaagacgatgctaaaaaagacggcggcgtgaagctggacgagacaggcggaggacttgttcaacctggcggagccatgaagctgagctgtgtgaccagcggctttaccttcggccactactggatgaactgggtccgacagtcccctgagaaaggactggaatgggtcgcccagttcagaaacaagccctacaactacgaaacctactacagcgacagcgtgaagggcagattcaccatcagccgggacgacagcaagtccagcgtgtacctccagatgaacaacctgcgcgtggaagataccggcatctactactgtaccggggccagctacggcatggaatatctcggccagggcaccagcgtgaccgtgtctacaacgcgtggaggcggatctatggaccctgatctcgaaattgaggccgcctttctggaacgcgagaacactgccctggaaaccagggtcgcagagctgagacagagagtgcagagactgcggaacagagtgtctcagtaccgcaccagatatggcccactcggcggaggtaaa

SEQ ID NO: 1446 - DNA, 987 bp, Artificial Sequence
  Synthetic Polynucloetide
atggccttaccagtgaccgccttgctcctgccgctggccttgctgctccacgccgccaggccgcaggtgcaactggtggaatctggcggcaatctggttcagcctggcggctctctgagactgtcttgtgccgccagcggcttcaccttcggcagcttttctatgagctgggtccgacaagctcctggcggaggacttgaatgggtggcaggactgtctgccagaagcagcctgacacactacgccgactctgtgaagggcagattcaccatcagccgggacaacgccaagaacagcgtgtacctccagatgaacagcctgagagtggaagataccgccgtgtactactgcgccagaagaagctacgacagcagcggctactggggccacttctacagctacatggatgtgtggggccagggcaccctggttacagtttctggcggaggcggaagtggaggcggaggatctggcggcggaggctcttctgtgctgacccagcctagctccgtgtctgctgctcctggacagaaagtgaccatctcctgtagcggcagcaccagcaacatcggcaacaactacgtgtcctggtatcagcagcaccccggcaaggcccctaagctgatgatctacgacgtgtccaagaggcccagcggcgtgccagatagattttccggcagcaagagcggcaacagcgccagcctggatattagcggactccagtctgaggacgaggccgactactattgcgccgcctgggatgatagcctgagcgagtttctgtttggcaccggcaccaagctgacagtgcttggaacgcgtggaggcggatctatggaccctgatctcgaaattgaggccgcctttctggaacgcgagaacactgccctggaaaccagggtcgcagagctgagacagagagtgcagagactgcggaacagagtgtctcagtaccgcaccagatatggcccactcggcggaggtaaa

SEQ ID NO: 1447 - DNA, 960 bp, Artificial Sequence
  Synthetic Polynucloetide
atggccttaccagtgaccgccttgctcctgccgctggccttgctgctccacgccgccaggccgcagtctgtggtcacacagcctccatctgtgtctggcgctccaggccagagagtgaccatctcttgtaccggcagcagcagcaatatcggagccggctatgacgtgcactggtatcagcagctccctggcacagcccctaaactgctgatctacggcaacagcaacagacccagcggcgtgcccgatagattttccggctctaagagcggcacaagcgccagcctggctattactggactccaggccgaggacgaggccgactactactgtcagagctacgacagcagcctgagcggcagctatgtgtttggcaccggcaccaagctgacagtgcttggaggcggaggcggaagtggaggcggaggatctggcggcggaggctctgaagttcaactggtggaaaccggcggcaacctggttcaacctggcgcttctctgagactgagctgtgccgccagcggctttagctttagcggaacagccatgcactgggtccgacaggcacctggcaaaggactggaatgggtgtccaccatcagcagcacaggcagaagcacctactaccgggacagcgtgaagggcagattcaccatctccagagacaacagcaagaacaccctgtacctccagatgaacagcctgagaggcgaggacaccgccgtgtactattgtgccagagtgtccttcgactactggggccagggaaccctggtcacagtctcttctacgcgtggaggcggatctatggaccctgatctcgaaattgaggccgcctttctggaacgcgagaacactgccctggaaaccagggtcgcagagctgagacagagagtgcagagactgcggaacagagtgtctcagtaccgcaccagatatggcccactcggcggaggtaaa

SEQ ID NO: 1448 - DNA, 966 bp, Artificial Sequence
  Synthetic Polynucloetide
atggccttaccagtgaccgccttgctcctgccgctggccttgctgctccacgccgccaggccgcagtctgtggttacacagcctgcctccgtgtctggctctcctggccagagcatcaccatcagctgtaccggcaccagctctgatgtcggcggctacaattacgtgtcctggtatcagcagcaccccggcaaggcccctaagctgatgatctacgacgtgtccaagaggcccagcggcgtgtccaatagattcagcggcagcaagagcggcaacaccgccagcctgacaatttctggactgcaagccgaggacgaggccgactactactgtagcagctacaccagcagcagcacactggtgtttggcggaggcaccaagctgacagttcttggaggcggaggcggaagtggaggcggaggatctggcggcggaggctctgaagttcagctggttgaaagcggcggagcctttgttcagcctggcggatctctgagactgagctgtgccgccagcggcttcacattttccagctacgccatgacctgggtccgacaggctcctggcaaaggactggaatgggtgtccaccatctccggcagaggcagaagcaccttctacgccgatagcgtgaagggcagattcacaatcagccgggacaacagcaagaacaccctgtacctccagatgaacagcctgagagccgaggataccgccgtgtactactgtgcccggtactatcacgctggcgcctttgatctttggggccagggaacactggtcaccgtgtcatctacgcgtggaggcggatctatggaccctgatctcgaaattgaggccgcctttctggaacgcgagaacactgccctggaaaccagggtcgcagagctgagacagagagtgcagagactgcggaacagagtgtctcagtaccgcaccagatatggcccactcggcggaggtaaa

SEQ ID NO: 1449 - DNA, 972 bp, Artificial Sequence
  Synthetic Polynucloetide
atggccttaccagtgaccgccttgctcctgccgctggccttgctgctccacgccgccaggccggacgtggtcatgacacagagcccttctagcctgtctgccagcgtgggcgacagagtgacaatcacctgtcagagcagcctggacatcagccactacctgaactggtatcagcagaagcccggcaaggcccctaagctgctgatctacgacgccagcaatctggaaaccggcgtgcccagcagattttctggcagcggaagcggcacccacttcaccttcacaatatccagcctccagcctgaggacttcgccacctactactgccagcagtacgacaacctgcctctgacctttggcggaggcaccaagctggaaatcaagagaggcggaggcggaagtggaggcggaggatctggcggcggaggctctcaagttcaactggttcaatcaggcggaggcgtggtgcaacctggtggctctctgagagtgtcttgtgctgcctctggcgtgaccctgagcgactatggaatgcactgggtccgacaggcccctggcaaaggacttgagtgggtcgccttcatcagaaacgacggcagcgacaagtattacgccgacagcgtgaagggcagattcaccatcagccgggacaacagcgagaaaaccgtgtctctccagatgtctagcctgagagccgaggacaccgccgtgtactactgtgccaagaatggcgagagcggccctctggactactggtatctggatctgtggggcagaggcaccctggtcacagtctcttctacgcgtggaggcggatctatggaccctgatctcgaaattgaggccgcctttctggaacgcgagaacactgccctggaaaccagggtcgcagagctgagacagagagtgcagagactgcggaacagagtgtctcagtaccgcaccagatatggcccactcggcggaggtaaa

SEQ ID NO: 1450 - DNA, 993 bp, Artificial Sequence
  Synthetic Polynucloetide
atggccttaccagtgaccgccttgctcctgccgctggccttgctgctccacgccgccaggccggacgtgatgctgacccagacaccactgagcctgcctgtgtctctgggcgatcaggccagcatctcctgtagaagcagccagagcatcctgcacagcaccggcgatacctacctggaatggtatctccagaagcctggacagagccccaagctgctgattaacaaggtgtccaaccggctgagcggcgtgcccgatagattttctggcagcggctctggcaccgacttcaccctgaagatcagcagagtggaagccgaggacctgggcgtgtactactgcttccaaggcagccatgttccttggacctttggcggaggcaccaagctggaaatcaagagagctgacgccgctcctaccgtgtccatctttcctggaggcggtggaagtggcggcggtggttcaggcggcggaggatctcaagtgaagctccagcagagcggccctagccttgtgaaacctggcgcttccgtgaagatgagctgcaaggccagcggctacaccttcaccgatttctacatgaaatgggtcaagcagagccacggcaagtctctggaatggatcggcgacatcaaccccaacatcggagacaccttctacaaccagaagttcaagggcaaagccacactgaccgtggacaagagcagcagcaccgcctacatgcagctcaacagcctgaccagcgaggacagcgccgtgtacttttgttccgtgggctacttcgacgtgtggggagccggaacaaccgtgacagtctcttctacgcgtggaggcggatctatggaccctgatctcgaaattgaggccgcctttctggaacgcgagaacactgccctggaaaccagggtcgcagagctgagacagagagtgcagagactgcggaacagagtgtctcagtaccgcaccagatatggcccactcggcggaggtaaa

SEQ ID NO: 1451 - DNA, 993 bp, Artificial Sequence
  Synthetic Polynucloetide
atggccttaccagtgaccgccttgctcctgccgctggccttgctgctccacgccgccaggccgctgcctgttctgacacagcctccatccgtgtctgtggcccctggaaagaccgccagaatcacatgcggcggcaacaacatcggcagcaagagcgtgcactggtatcagcagaagcctggacaggctcctgtgctggtggtgtacgacgacagcgatagacctagcggcatccccgagagattcagcggcagcaattccggcaataccgccacactgaccatcagcagagtggaagctggcgacgaggccgactactactgccaagtgtgggacagcagcagcgactacgtggtgtttggcggcggaacaaagctgacagtgcttggcggaggcggaagtggaggcggaggatctggcggcggaggctctgaagttcaactggtgcagagcggagccgaagtgaagaagccaggcgagagcctgaagattagctgcaaaggcagcggctacagcttcaccagctactggatcggctgggtccgacagatgcctggcaaaggactggaatggatgggcatcatctaccccggcgacagcgacaccagatacagccctagctttcagggccaagtgaccatctccgccgacaagagcatcagcacagcctacctccagtggtcctctctgaaggccagcgataccgccatgtactactgcgccagacaagtctggggatggcaaggcggcatgtaccccaggtctaactggtggtacaacctggactcttggggccagggcacactggtcacagtctcttctacgcgtggaggcggatctatggaccctgatctcgaaattgaggccgcctttctggaacgcgagaacactgccctggaaaccagggtcgcagagctgagacagagagtgcagagactgcggaacagagtgtctcagtaccgcaccagatatggcccactcggcggaggtaaa

SEQ ID NO: 1452 - DNA, 972 bp, Artificial Sequence
  Synthetic Polynucloetide
atggccttaccagtgaccgccttgctcctgccgctggccttgctgctccacgccgccaggccggagctggtcatgacacagagccctgcttctctggccgtgtcactgggacagagagccaccatctcttgcagagccagcgagagcgtggacagctacggcaagagcttcatgcactggtatcagctcaagcccggccagcctcctaagctgctgatctacagagcctccaacctggaaagcggcgtgccagccagattttctggcagcggcagcagaaccgacttcaccctgaccattgatcccgtggaagccgatgatgccgccacctactactgccagcagaacaacgaggacccctggacatttggcggaggcaccaagctggaaatcaaaggcggaggcggaagtggaggcggaggatctggcggcggaggctctgaagtgcagctcgaacagtctggccccgagcttgtgaaacctggcgcttccgtgaagatgagctgcaaggccagcggctacaccttcaccaactactacatgaaatgggtcaagcagagccacggcaagtccctggaatggatcggcgatctgaaccccaacaacggcgacaccttctacaaccagaagttcaagggcaaagccacactgaccgtggacaagagcagcaacaccgcctacatgcagctcaactccctgaccagcgaggacagcgccgtgtactactgtgccagaaccggcagatacgaagagaacgctatggactactggggccagggcacaagcgtgacagtctcttctacgcgtggaggcggatctatggaccctgatctcgaaattgaggccgcctttctggaacgcgagaacactgccctggaaaccagggtcgcagagctgagacagagagtgcagagactgcggaacagagtgtctcagtaccgcaccagatatggcccactcggcggaggtaaa

SEQ ID NO: 1453 - DNA, 966 bp, Artificial Sequence; identical to SEQ ID NO: 1426
  Synthetic Polynucloetide

SEQ ID NO: 1454 - DNA, 966 bp, Artificial Sequence; identical to SEQ ID NO: 1335
  Synthetic Polynucloetide

SEQ ID NO: 1455 - DNA, 954 bp, Artificial Sequence
  Synthetic Polynucloetide
atggccttaccagtgaccgccttgctcctgccgctggccttgctgctccacgccgccaggccggacgtggtcatgacacagagcccttctagcctgtctgccagcgtgggcgacagagtgaccatcacctgtatggcctccgaggacatctacatccggctggcctggtatcagcagaagcctggaaacgcccctaagctgctgatctacgccgccacctctctggaaacaggcgtgccaagcagattttccggcagcggctctggcaccgatttcaccctgacaatatccagcctccagcctgaggacttcgccacctactactgccagcagtattggagcagcccctggacatttggcggaggcaccaaggtggaaatcaaaggcggaggcggaagtggaggcggaggatctggcggcggaggctctcaggttcagctgcaagagtctggccccggactggtcaagcctagccaaacactgagcctgacctgtaccgtgtccggctacagcatcaccagcgactacacctggaactggatcagacagcctcctggcaacggactggaatggatcggctacatcacctacagcggcagcaccagctacaaccccagcctgaaaagccgggtgctgatctccgtggacaccagcaagaatcaggtgtccctgaagctgagcagcgtgacagccgctgataccgccgtgtactactgtgccagactggggagaagatacacaatggactactggggccagggcaccaccgtgacagtttcttctacgcgtggaggcggatctatggaccctgatctcgaaattgaggccgcctttctggaacgcgagaacactgccctggaaaccagggtcgcagagctgagacagagagtgcagagactgcggaacagagtgtctcagtaccgcaccagatatggcccactcggcggaggtaaa

SEQ ID NO: 1456 - DNA, 969 bp, Artificial Sequence
  Synthetic Polynucloetide
atggccttaccagtgaccgccttgctcctgccgctggccttgctgctccacgccgccaggccggaggtgcaactggttgagtctggcggaggactggtgcagcctggaagaagcctgagactgtcttgtgccgccagcggcttcaccttcgacgattatgccatgcactgggtccgacaggcccctggcaaaggacttgaatgggtgtccggcatctcctggaacagcggctctatcggctacgccgattccgtgaagggcagattcaccatcagccgggacaacgccaagaacagcctgtacctccagatgaactccctgagagccgaggacacagccctgtactactgcgccaaagacaaaggcggaggctactacgacttttggagcggcagcgattattggggccagggcacactggtcacagtgtctagcggcggaggcggaagtggaggcggaggatctggcggcggaggctcttcttctgagctgacacaggaccctgccgtgtctgttgctctgggccagacagtgcggattacctgtcagggcgatagcctgagaagctactacgcctcctggtatcagcagaagccaggccaggctcctgtgctggtcatctacggcaagaacaacagacccagcggcatccccgatagattcagcggaagcagctctggcaataccgccagcctgacaattactggcgctcaggccgaggacgaggccgactactactgcaacagcagagatagcagcggctgggttttcggcggaggcacaaaactgacagtgctgacgcgtggaggcggatctatggaccctgatctcgaaattgaggccgcctttctggaacgcgagaacactgccctggaaaccagggtcgcagagctgagacagagagtgcagagactgcggaacagagtgtctcagtaccgcaccagatatggcccactcggcggaggtaaa

SEQ ID NO: 1457 - DNA, 996 bp, Artificial Sequence
  Synthetic Polynucloetide
atggccttaccagtgaccgccttgctcctgccgctggccttgctgctccacgccgccaggccggaagtgcagctccagcagtctggacctggcctggttaagcctagccagacactgagcctgacctgtgccatcagcggcgatagcgtgctgagcaacagcgacacctggaactggatcagacagagccctagcagaggactggaatggctgggcagaacctaccacagaagcacttggtacgacgactacgccagctctgtgcggggcagagtgtccatcaatgtggacaccagcaagaaccagtacagcctgcaactgaacgccgtgacacctgaggataccggcgtgtactactgcgccagagacagactccaggacggcaactcttggagcgacgcctttgatgtgtggggccagggcacaatggtcaccgtttctagcggcggaggcggaagtggaggcggaggatctggcggcggaggctctcaatctgctctgacacagcctgccagcgtgtcaggatctcctggacagagcatcaccatctcttgcaccggcaccagctctgatgtcggcggctacaattacgtgtcctggtatcagcagcaccccggcaaggcccctaagctgatgatctacgacgtgtccaacagacccagcggcgtgtccaatagattctccggcagcaagagcggcaacaccgccagcctgacaatttctggactgcaagccgaggacgaggccgactactactgtagcagctacaccagcagcagcacactggtgtacgtgttcggcacaggcaccaaagtgaccgtgcttacgcgtggaggcggatctatggaccctgatctcgaaattgaggccgcctttctggaacgcgagaacactgccctggaaaccagggtcgcagagctgagacagagagtgcagagactgcggaacagagtgtctcagtaccgcaccagatatggcccactcggcggaggtaaa

SEQ ID NO: 1458 - DNA, 990 bp, Artificial Sequence
  Synthetic Polynucloetide
atggccttaccagtgaccgccttgctcctgccgctggccttgctgctccacgccgccaggccgcaggtgcaactggttcagtctggggccgaagtgaagaaacctggggcctctgtgaaggtgtcctgcaaggcttccggctacacctttaccagctacgacatcaactgggtccgacaggccacaggccaaggactggaatggatgggctggatgaaccccaacagcggcaataccggctacgcccagaaattccagggcagagtgaccatgaccagaaacaccagcatcagcaccgcctacatggaactgagcagcctgagaagcgaggacaccgccgtgtactattgcgccagaggcgacagcaactactggtcctactacggcatggacgtgtggggccagggaacactggttacagtttctagcggcggaggcggaagtggaggcggaggatctggcggcggaggctctggcggtggtggatctcaatctgtgctgacccagcctagatccgtgtctggctctcctggacagagcgtgaccatctcttgtaccggcaccagctctgatgtcggcggctacaattacgtgtcctggtatcagcagcaccccggcgaagcccctaagctgattatctacgacgccgacaagcggcccagcggcatcagcaatagattcagctctggcaagagcggcaacaccgccagcctgacaatcagcggactccaggtggaagatgaggccgactactactgctgctcctatgccggcggaagcacctgggttttcggaggcggtacaaaagtgaccgtgctgacgcgtggaggcggatctatggaccctgatctcgaaattgaggccgcctttctggaacgcgagaacactgccctggaaaccagggtcgcagagctgagacagagagtgcagagactgcggaacagagtgtctcagtaccgcaccagatatggcccactcggcggaggtaaa

SEQ ID NO: 1459 - DNA, 996 bp, Artificial Sequence
  Synthetic Polynucloetide
atggccttaccagtgaccgccttgctcctgccgctggccttgctgctccacgccgccaggccggaagtgcagctccagcagtctggacctggcctggttaagcctagccagacactgagcctgacctgtgccatcagcggcgatagcgtgtcctctaatagcgccgcctggaactggatcagacagagccctagcagaggactggaatggctgggcagaacctactaccgcagcaagtggtacagcgactacgccgtgtccgtgaagtcccggatcaccatcaatcccgacaccagcaagaaccagttcagcctgcaactgaacagcgtgacccctgaggataccgccgtgtactactgcgccagagatccctacgacttttggagcggctaccccgacgcctttgacatctggggacagggcacaatggtcaccgtttctagcggcggaggcggaagtggaggcggaggatctggcggcggaggctctcaatctgctctgacacagcctgccagcgtgtcaggatctcctggacagagcatcaccatctcttgcaccggcaccagctctgatgtcggcggctacaattacgtgtcctggtatcagcagcaccccggcaaggcccctaaagtgattatcagcgaagtgaacaacagacccagcggcgtgtcccacagattcagcggctctaagtctggcaacaccgccagcctgacaatctctggactgcaagccgaggacgaggccgactacttctgtagcagctacaccagcggcagaaccctgtacgtgttcggcacaggcagcaaagtgacagtgctgggaacgcgtggaggcggatctatggaccctgatctcgaaattgaggccgcctttctggaacgcgagaacactgccctggaaaccagggtcgcagagctgagacagagagtgcagagactgcggaacagagtgtctcagtaccgcaccagatatggcccactcggcggaggtaaa

SEQ ID NO: 1460 - DNA, 993 bp, Artificial Sequence
  Synthetic Polynucloetide
atggccttaccagtgaccgccttgctcctgccgctggccttgctgctccacgccgccaggccggaagtgcagctccagcagtctggacctggcctggttaagcctagccagacactgagcctgacctgtgccatcagcggcgattccatgctgagcaacagcgacacctggaactggatcagacagagccccagcagaggcctggaatggctgggcagaacataccacagaagcacttggtacgacgactacgccagctctgtgcggggcagagtgtccatcaatgtggacaccagcaagaaccagtacagcctgcaactgaacgccgtgacacctgaggataccggcgtgtactactgtgccagagtgcggctccaggacggcaattcttggagcgacgcctttgatgtgtggggccagggcacaatggtcaccgtttctagcggcggaggcggaagtggaggcggaggatctggcggcggaggctctcaatctgctctgacacagcctgccagcgcctctggatctcctggacagagcgtgaccatctcctgtaccggcacctcttctgatgtcggcggctacaactacgtgtcctggtatcagcagcaccccggcaaggcccctaagctgatgatctacgacgtgtccaacagacccagcggcgtgtccaatagattctccggcagcaagagcggcaacaccgccagcctgacaatttctggactgcaagccgaggacgaggccgactactactgtagcagctacaccagcagcagcacactgtacgtgttcggcacaggcacccagctcacagttcttacgcgtggaggcggatctatggaccctgatctcgaaattgaggccgcctttctggaacgcgagaacactgccctggaaaccagggtcgcagagctgagacagagagtgcagagactgcggaacagagtgtctcagtaccgcaccagatatggcccactcggcggaggtaaa

SEQ ID NO: 1461 - DNA, 966 bp, Artificial Sequence
  Synthetic Polynucloetide
atggccttaccagtgaccgccttgctcctgccgctggccttgctgctccacgccgccaggccggagatcgtgctgacacagtctcccgccacactgtcactgtctccaggcgaaagagccacactgagctgtagcgccagcagcagcgtgtcctacatgtactggtatcagcagaagcccggacaggcccctagactgctgatctacagaaccagcaacctggcctctggcatccccgccagattttctggctctggcagcggcaccgatttcaccctgaccataagcagcctggaacctgaggacttcgccgtgtactactgccagcagtaccacagctaccccaccacctttggacagggcaccaaggtggaaatcaagcggacagttggcggaggcggaagtggaggcggaggatctggcggcggaggctctgaagtgcagctggttgaatcaggtggcggcctggttcaacctggcggatctctgagactgtcttgtgccgccagcggcttcagcttcaacacctacgccatgaactgggtccgacaggctcctggcaaaggactggaatgggtgtcccacatcagaagcaagagcaacaacttcgccacctactacgccgacagcgtgaaggacagattcaccatcagccgggacaacgccaagaacagcctgtacctccagatgaactccctgagagccgaggacaccgccgtgtattattgcgccagacaaggcggcgacttccctatggattattggggccagggcaccctggtcaccgtttcttctacgcgtggaggcggatctatggaccctgatctcgaaattgaggccgcctttctggaacgcgagaacactgccctggaaaccagggtcgcagagctgagacagagagtgcagagactgcggaacagagtgtctcagtaccgcaccagatatggcccactcggcggaggtaaa

SEQ ID NO: 1462 - DNA, 954 bp, Artificial Sequence
  Synthetic Polynucloetide
atggccttaccagtgaccgccttgctcctgccgctggccttgctgctccacgccgccaggccggacgtggtcatgacacagagcccttctagcctgtctgccagcgtgggcgacagagtgaccatcacctgtaaagccagcgaggacatctacatccggctggcctggtatcagcagaagcctggaaaggcccctaagctgctgatctacgccgccacctctctggaaacaggcgtgccaagcagattttccggcagcggctctggcaccgatttcaccctgacaatatccagcctccagcctgaggacttcgccacctactactgccagcagtattggaccacaccttggacctttggcggaggcaccaaggtggaaatcaaaggcggaggcggaagtggaggcggaggatctggcggcggaggctctcaggtgcagctccaagagtctggccctggactggtcaagcctagccagacactgagcctgacctgtaccgtgtccggctacagcatcaccatcgactacacctggaactggatcagacagcctcctggcaaaggactggaatggatcggctacatcacctacagcggcagcaccgactacaaccccagcctgaaaagccgggtgctgatctccgtggacaccagcaagaatcaggtgtccctgaagctgagcagcgtgacagccgctgataccgccgtgtactactgtgccagactgggcagaagatacgccctggattattggggccagggcaccaccgtgacagtgtcatctacgcgtggaggcggatctatggaccctgatctcgaaattgaggccgcctttctggaacgcgagaacactgccctggaaaccagggtcgcagagctgagacagagagtgcagagactgcggaacagagtgtctcagtaccgcaccagatatggcccactcggcggaggtaaa

SEQ ID NO: 1463 - DNA, 969 bp, Artificial Sequence
  Synthetic Polynucloetide
atggccttaccagtgaccgccttgctcctgccgctggccttgctgctccacgccgccaggccggacatccagctgactcagagccctagctttctgagcgccagcgtgggcgacagagtgaccattacatgtagagccagccagggcatcagcaccgacctgaactggtatcagcagaagcctggcaaggcccctaagctgctgatctacgccgccagcaatctggaaagcggcgtgccaagcagattttccggctctggcagcggcaccgagttcaccctgacaatatctagcctccagcctgaggacttcgccacctactactgccagcagagctacaactggccctacacctttggcggaggcaccaaggtggaaatcaagagaggcggaggcggaagtggaggcggaggatctggcggcggaggctctgaagttcagctggttgaatcaggcggaggactcgtgaaacctggcggctctctgagactgtcttgtgccgccagcggcttcaccttcagcaacttcgagatgaactgggtccgacaggccccaggcaaaggactggaatgggtgtccggcatcagctccaatggccggtacatcaactacgccgacagcgtgaagggcagattcaccatcagccgggacaacgccaagaacagcctgtacctccagatgaactccctgagagccgaggacaccgccgtgtactattgtgccagagtggtggacttcgaccaggactacaacggcttcgactattggggccagggcaccctggttaccgttagctctacgcgtggaggcggatctatggaccctgatctcgaaattgaggccgcctttctggaacgcgagaacactgccctggaaaccagggtcgcagagctgagacagagagtgcagagactgcggaacagagtgtctcagtaccgcaccagatatggcccactcggcggaggtaaa

SEQ ID NO: 1464 - DNA, 963 bp, Artificial Sequence
  Synthetic Polynucloetide
atggccttaccagtgaccgccttgctcctgccgctggccttgctgctccacgccgccaggccggacatccaactgactcagagccccagctttctgagcgcctctgtgggcgacagagtgaccatcacatgtagtctcagcctgggcatcagcacatggcgggattggtttccgccgaggcttggcaggggccttgagccgctgacctacgccgccagcacactgcaaagcggagtgcctagcagattttccggcagcggctctggcaccgagttcaccctgacaatatccagcctccagcctgaggacttcgccacctactactgccagcagctcaacagctaccctctgacctttggcggaggcaccaaggtggaaatcaagagaggcggaggcggaagtggaggcggaggatctggcggcggaggctctgaagttcaactggttgagtctggtggcggcctggttaagcctggcggatctctgagactgagctgtgccgccagcggcttcacctttagcacatacggcatgagctgggtccgacaggcccctggaaaaggacttgagtgggtcgcctacatcaacaacggctccggctacatctactacgccgacagcgtgaagggcagattcaccatcagccgggacaacgccaagaacagcctgtacctccagatgaactccctgagagccgaggacaccgccgtgtactattgtgccagaggacagtggtggagcggcggagactttgattattggggccagggcaccctggtcaccgtttcttctacgcgtggaggcggatctatggaccctgatctcgaaattgaggccgcctttctggaacgcgagaacactgccctggaaaccagggtcgcagagctgagacagagagtgcagagactgcggaacagagtgtctcagtaccgcaccagatatggcccactcggcggaggtaaa

SEQ ID NO: 1465 - DNA, 969 bp, Artificial Sequence
  Synthetic Polynucloetide
atggccttaccagtgaccgccttgctcctgccgctggccttgctgctccacgccgccaggccggacatccagatgacccagaccacaagcagcctgtctgccagcctgggcgacagagtgaccatctcttgtagagccagccaggacatcagcaactacctgaactggtatcagcagaaacccgacggcaccgtgaagctgctgatctactacaccagcatcctgcacagcggcgtgcccagcagattttctggctctggcagcggcaccgactacagcctgaccatcagcaatctggaacaagaggacttcgctacctacttctgccagcaaggcaacaccctgccttggacatttggcggaggcaccaagctggaaatcaaagctggcggaggcggaagtggaggcggaggatctggcggcggaggctctgaagtgcaactggttgaatctggcggcggactggttaagcctggcggatctctgaagctgagctgtgccgcctctggcttcgccttcagcatctacgatatgagctgggtccgacagacccctgagaagagactggaatgggtcgcctacatctctagcggcggagggacctactatcccgacacagtgaagggcagattcaccatctccagagacaacgccaagaacaccctgtacctccagatgagcagcctgaagtccgaggacaccgccatgtactactgcgccagacacagcggctatggcacacattggggagtgctgtttgcctactggggccagggaacactggtcacagtttctgctacgcgtggaggcggatctatggaccctgatctcgaaattgaggccgcctttctggaacgcgagaacactgccctggaaaccagggtcgcagagctgagacagagagtgcagagactgcggaacagagtgtctcagtaccgcaccagatatggcccactcggcggaggtaaa

SEQ ID NO: 1466 - DNA, 999 bp, Artificial Sequence
  Synthetic Polynucloetide
atggccttaccagtgaccgccttgctcctgccgctggccttgctgctccacgccgccaggccggacatcgtgatgacacagagccctgatagcctggccgtgtctctgggagagagagccaccatcaactgcaagagcagccagagcctgctgtacagaagcaaccagaagaactacctggcctggtatcagcagaagcccggccagcctcctaagctgctgatctactgggccagcaccagagaaagcggcgtgcccgatagattttctggctctggcagcggcaccgacttcaccctgacaatttctagcctgcaagccgaggacgtggccgtgtactactgccagcagtattacaactaccccagaaccttcggccagggcaccaaggtggaaatcaagagaacagttggcggaggcggaagtggaggcggaggatctggcggcggaggctctgaagttcagctgcttgaatcaggcggcggactggttcaacctggcggatctctgagactgagctgtgccgccagcggctacagcatcacaagcgactatgcctggaactgggtccgacaggcccctggcaaaggactggaatgggtgtcctacatcagcaacagcggcagcaccagctacaaccccagcctgaagtcccggttcaccatcagcagagacaacagcaagaacaccctgtacctccagatgaacagcctgagagctgaggacaccgccgtgtattattgcgccaaagagcggaactacgactacgacgattactactacgctatggactactggggccagggaaccctggtcacagtctcttctacgcgtggaggcggatctatggaccctgatctcgaaattgaggccgcctttctggaacgcgagaacactgccctggaaaccagggtcgcagagctgagacagagagtgcagagactgcggaacagagtgtctcagtaccgcaccagatatggcccactcggcggaggtaaa

SEQ ID NO: 1467 - DNA, 978 bp, Artificial Sequence
  Synthetic Polynucloetide
atggccttaccagtgaccgccttgctcctgccgctggccttgctgctccacgccgccaggccggacgtggtcatgacacagagccctctgagcctgcctgtgacacttggacagcctgccagcatcagctgtagaagcagccagagcctgctgcacagcagcggcaatacctacctggaatggtatcagcagaggcccggacagagccccagacctctgatctacaagatcagcacccggttcagcggcgtgcccgatagattttctggctctggcagcggcaccgacttcaccctgaagattagcagagtggaagccgaggacgtgggcgtgtactactgcttccaaggcagccacgtgccatacacctttggcggcggaacaaaggtggaaatcaagagaggcggaggcggaagtggaggcggaggatctggcggcggaggctctcaagttcagctggttcagagcggagccgaagtgaagaaacctggggcctctgtgaaggtgtcctgcaaagcctctggcctgaccatcgaggactactacatgcactgggtccgacaggcccctggacaaggacttgaatggatgggctggatcgaccccgagaacggcgatacagagtacggccctaagttccagggcagagtgaccatgaccagagacaccagcatcaacaccgcctacatggaactgagccggctgagatccgatgacaccgccgtgtactattgcgccgtgcacaatgcccactacggcacttggtttgcctattggggccagggcacactggtcaccgttagctctacgcgtggaggcggatctatggaccctgatctcgaaattgaggccgcctttctggaacgcgagaacactgccctggaaaccagggtcgcagagctgagacagagagtgcagagactgcggaacagagtgtctcagtaccgcaccagatatggcccactcggcggaggtaaa

SEQ ID NO: 1468 - DNA, 954 bp, Artificial Sequence
  Synthetic Polynucloetide
atggccttaccagtgaccgccttgctcctgccgctggccttgctgctccacgccgccaggccggacatccagatgacacagagccctagcagcctgtctgccagcgtgggagacagagtgaccatcacctgtagagccagcgagaacatctacagcaacctggcctggtatcagcagaagcctggcaaggcccctaagctgctgatctacgccgccaccaatctggctgatggcgtgccaagcagattttccggctctggcagcggcaccgatttcaccctgacaatatccagcctccagcctgaggacttcgccacctactactgccagcacttttggggcacccctacattcggccagggcaccaaggtggaaatcaagagaacagttggcggaggcggaagtggaggcggaggatctggcggcggaggctctgaagtgcagctggttgaatcaggtggcggcctggttcaacctggcggatctctgagactgagctgtgccgcctctggcttcagcctgacaaattacggcgtgcactgggtccgacaggcccctggaaaaggactggaatgggtgtccgtgatttggagcggcggcagcaccgattacaacgccgccttcatcagccggttcaccatcagcgccgacaccagcaagaataccgcctacctccagatgaactccctgagagccgaggacaccgccgtgtactattgcgccagagaactgatccacgctatggacaactggggccagggaaccctggtcacagtctcttctacgcgtggaggcggatctatggaccctgatctcgaaattgaggccgcctttctggaacgcgagaacactgccctggaaaccagggtcgcagagctgagacagagagtgcagagactgcggaacagagtgtctcagtaccgcaccagatatggcccactcggcggaggtaaa

SEQ ID NO: 1469 - DNA, 975 bp, Artificial Sequence
  Synthetic Polynucloetide
atggccttaccagtgaccgccttgctcctgccgctggccttgctgctccacgccgccaggccggacttcgtgatgacacagagccctctgagcctgcctgtgacacctggcgaacctgccagcatcagctgtagaagcagccagagcatcgtgcacagcaacggcaacacctacctggaatggtatctccagaagcctggacagagcccacagctgctgatctacaaggtgtccaacagattcagcggcgtgcccgacagattttctggcagcggctctggcaccgacttcaccctgaagattagcagagtggaagccgaggacgtgggcgtgtactactgcttccaaggctctcacgtgcccctgacctttggacagggcaccaagctggaaatcaagagaggcggaggcggaagtggaggcggaggatctggcggcggaggctctgaagtgcagctggttgaaagcggagccgaagtgaagaaacctggggcctctgtgaaggtgtcctgcaaggccagcggctacacctttaccagctactggattcactgggtccgacaggcccctggacaaggacttgagtggatgggcgagaacgacccctccaacggcaggaccaactacaacgagaagttcaagaaccgcgtgaccctgaccgtggacaccagcatctctaccgcctacatggaactgagccggctgagatccgatgacaccgccgtgtactattgcgccagaggacccaactacttttacagcatggactactggggccagggcacaatggtcaccgttagctctacgcgtggaggcggatctatggaccctgatctcgaaattgaggccgcctttctggaacgcgagaacactgccctggaaaccagggtcgcagagctgagacagagagtgcagagactgcggaacagagtgtctcagtaccgcaccagatatggcccactcggcggaggtaaa

SEQ ID NO: 1470 - DNA, 954 bp, Artificial Sequence
  Synthetic Polynucloetide
atggccttaccagtgaccgccttgctcctgccgctggccttgctgctccacgccgccaggccggacatccagctgactcagagccctagctttctgagcgccagcgtgggcgacagagtgaccatcacatgtagcgccagatccagcatcagcttcatgtactggtatcagcagaagcccggcaaggcccctaagctgctgatctacgacaccagcaatctggcctctggcgtgcccagcagattttctggaagcggcagcggcaccgagttcaccctgacaatctctagcctggaagccgaggatgccgccacctactattgccagcagtggtccagctatcccctgacatttggacagggcaccaagctggaaatcaaaggcggaggcggaagtggaggcggaggatctggcggcggaggctctcaggttcagctggttcagtctggggccgaagtgaagaaacctggggcctctgtgaaggtgtcctgcaaggcttccggctacacctttaccggctcttggatgaactgggtccgacaggctcctggacagggactcgaatggatcggcagaatctatcctggcgacggcgagacaaactacaacggcaagttcaaggaccgcgtgacaatcaccgccgacaagagcacaagcaccgcctacatggaactgagcagcctgcggagcgaagataccgccgtgtactactgcgcccggatctacggcaacaacgtgtacttcgatgtgtggggccagggcacaaccgtgacagtctcttctacgcgtggaggcggatctatggaccctgatctcgaaattgaggccgcctttctggaacgcgagaacactgccctggaaaccagggtcgcagagctgagacagagagtgcagagactgcggaacagagtgtctcagtaccgcaccagatatggcccactcggcggaggtaaa

SEQ ID NO: 1471 - DNA, 978 bp, Artificial Sequence
  Synthetic Polynucloetide
atggccttaccagtgaccgccttgctcctgccgctggccttgctgctccacgccgccaggccgcagctggtgctgacacagtctccaagcgcctctgccagcctgggatctagcgtgaagctgacctgtacactgagcagcggccacaagaccgacaccatcgactggtatcagcagcagcctggcaaggcccctagatacctgatgaagctggaaggcagcggcagctacaacaaaggctctggcgtgcccgatagattcagcggcagttcttctggcgctgattggtatctgaccatcagcagcctccagagcgaggacgaggccgattactactgcggcacagactaccccggcaactacctgtttggcggcggaacacagctgacagtgcttggcggcggaggcggaagtggaggcggaggatctggcggcggaggctctcaagaacagctggttgaaagcggcggaggactggttcaacctggcggttctctgagactgagctgtgccgccagcggcttcaccttcagcgactactacatgagctggatcagacaggccccaggcaaaggactggaatgggtcgccacaatctaccccagcagcggcaagacctactacgccgattctgccaagggcagactgaccatctccagcgacaacgccaaggacagcctgtacctccagatgaacagcctgagagccgaggacaccgccgtgtactactgcaccagagatagctacgccgacgacgccgctctgtttgacatttggggccagggcaccaccgtgaccgtttcttctacgcgtggaggcggatctatggaccctgatctcgaaattgaggccgcctttctggaacgcgagaacactgccctggaaaccagggtcgcagagctgagacagagagtgcagagactgcggaacagagtgtctcagtaccgcaccagatatggcccactcggcggaggtaaa

SEQ ID NO: 1472 - DNA, 963 bp, Artificial Sequence
  Synthetic Polynucloetide
atggccttaccagtgaccgccttgctcctgccgctggccttgctgctccacgccgccaggccggacatcgtgctgacacagagccctccaagcctggctatgagcctgggaaagagagccaccatcagctgtagagccagcgagagcgtgacaatcctgggctctcacctgatccactggtatcagcagaagcccggccagcctcctacactgctgattcagctggcctccaatgtgcagacaggcgtgccagccagattttctggcagcggcagcagaaccgacttcaccctgaccattgatcccgtggaagaggacgacgtggccgtgtactactgcctccagagcagaacaatccccagaacctttggcggaggcaccaagctggaaatcaaaggcggcggaggaagcggaggcggaggatctggtggtggtggatctcaaatccagctggtgcagtctggccccgagctgaagaaacctggcgagacagtgaagatcagctgcaaggccagcggctacaccttcaccgactacagcatcaactgggtcaagagagcccctggcaagggcctgaaatggatgggctggatcaacaccgaaaccagagagcccgcctacgcctacgacttcagaggcagattcgccttcagcctggaaaccagcgccagcacagcctacctccagatcaacaacctgaagtacgaggacaccgccacctacttttgcgccctggactacagctacgctatggactattggggccagggcaccagcgtgacagtctcttctacgcgtggaggcggatctatggaccctgatctcgaaattgaggccgcctttctggaacgcgagaacactgccctggaaaccagggtcgcagagctgagacagagagtgcagagactgcggaacagagtgtctcagtaccgcaccagatatggcccactcggcggaggtaaa

SEQ ID NO: 1473 - DNA, 975 bp, Artificial Sequence
  Synthetic Polynucloetide
atggccttaccagtgaccgccttgctcctgccgctggccttgctgctccacgccgccaggccgcaggtacagctgcaggaatctgggcccggacttgtcaagccaagtcagacactttctcttacatgtaccgtgagcggcggaagtataagcagtggaggcttttactggtcttggatacggcagcacccaggcaaaggcttggagtggattggatacattcatcattcaggatctacacactataatccatcccttaagtcccgggtcaccattagcattgatacgtctaagaatctgttcagtctcaggctgtcctccgtcactgctgccgacacagccgtgtactactgcgcctccttggtttactgcggaggcgactgttatagcggctttgattattgggggcaggggaccctcgtaaccgtgagctctggaggcggaggatcaggtggcggtggatctggcggtggcggatctgatatccagctcactcaaagcccctctagtctctctgcctcagtgggggatcgggtcagttttacttgtcaagcttcacaggatatcaacaacttccttaattggtatcagcagaagccaggaaaagcacccaagctgctcatctatgatgcctcaaatttggagacgggtgttcccagtcgattctctgggtcagggtccgggaccgactttacgtttacgatctcctctctgcagcccgaagacatcgccacatactattgtcaacagtacggcaacttgcctttcacatttgggggcgggactaaggttgaaatcaagaggacgcgtggaggcggatctatggaccctgatctcgaaattgaggccgcctttctggaacgcgagaacactgccctggaaaccagggtcgcagagctgagacagagagtgcagagactgcggaacagagtgtctcagtaccgcaccagatatggcccactcggcggaggtaaa

SEQ ID NO: 1474 - DNA, 969 bp, Artificial Sequence
  Synthetic Polynucloetide
atggccttaccagtgaccgccttgctcctgccgctggccttgctgctccacgccgccaggccgcaggtccaactgcaagaaagcggacccggactggtgaagccttctgagacacttagtctgacgtgcacggtcagtggcggctccatctcctcctattattggtcatggatacgacaacccccaggtaagggcctggaatggattggctatatctactattcaggaagcacgaactacaatcccagcctgaagtcccgagtgacaatttcagtagataccagtaaaaaccagttcagtcttaaactgtcaagcgtgacagctgccgacaccgctgtgtattactgcgtctcactggtgtattgtggaggggattgttatagcgggttcgattattggggacagggaaccctggtgactgtatcttccggaggcggaggatcaggtggcggtggatctggcggtggcggatctgatattcaactgacacaatcccccagctcactcagcgccagcgtgggggacagggttagctttacctgtcaagcctctcaggatataaataactttctgaactggtatcaacagaagcctgggaaggcgcccaaactcctgatctatgatgcgtccaacctggaaactggcgtgccttcacgctttagcggctctggcagtggtacagacttcacttttaccatctcttcacttcagccggaggacatcgccacatattactgtcaacagtacggaaacttgccctttacttttggaggcggcaccaaagttgaaatcaaaagaacgcgtggaggcggatctatggaccctgatctcgaaattgaggccgcctttctggaacgcgagaacactgccctggaaaccagggtcgcagagctgagacagagagtgcagagactgcggaacagagtgtctcagtaccgcaccagatatggcccactcggcggaggtaaa

SEQ ID NO: 1475 - DNA, 984 bp, Artificial Sequence
  Synthetic Polynucloetide
atggccttaccagtgaccgccttgctcctgccgctggccttgctgctccacgccgccaggccgcaagttactttgaaggagtctggacctgtactggtgaagccaaccgagacactgacactcacgtgtacagtgagtggtttttccttgatcaacgcaaggatgggcgtcagctggatcaggcaaccccctggcaaggctctggaatggctcgctcacatattcagcaatgccgaaaaaagctaccggacaagcctgaaatcccgcctgactatttccaaggacacttctaagtctcaggtggtgctgaccatgaccaacatggacccggtggacaccgccacctattactgcgcaagaatccctgggtatggtgggaatggtgactaccattattatgggatggatgtgtgggggcaaggcacaaccgtaacggtctcaagcggaggcggaggatcaggtggcggtggatctggcggtggcggatctgacattcagatgacccaaagcccgtccagcctgtccgccagcctgggagatagagtgacaatcacgtgtagagcttcccaagggataagaaatgatctcgggtggtatcagcagaagcccggcaaagcccccaaaaggcttatatatgctagtagtacactgcagtctggagttccttcccgattttcaggtagcggctccggtacagagttcaccctcacgataagctcactccagcctgaggatttcgcaacgtactactgcctccagcacaacaattttccctggactttcggccagggcaccaaggtggagatcaagaggacgcgtggaggcggatctatggaccctgatctcgaaattgaggccgcctttctggaacgcgagaacactgccctggaaaccagggtcgcagagctgagacagagagtgcagagactgcggaacagagtgtctcagtaccgcaccagatatggcccactcggcggaggtaaa

SEQ ID NO: 1476 - DNA, 966 bp, Artificial Sequence
  Synthetic Polynucloetide
atggccttaccagtgaccgccttgctcctgccgctggccttgctgctccacgccgccaggccgcagatccagttggtggaatcagggggcggtgtggtgcagccgggtaggagcctgagactgtcatgcgtggcgtctggcttcacattcaagaactacggcatgcactgggtgcgacaggcccccggaaagggtttggagtgggtcgccgtgatctggtacgacggatctaatgagtattacggagatcctgtgaagggaaggttcaccatctcccgcgacaatagcaaaaatatgctctacctgcaaatgaactcactcagggcggatgatacggcggtctactattgcgctcgctcagggattgctgtggccggcgcattcgattactggggacagggtaccctggtgacagtatcaagcggaggcggaggatcaggtggcggtggatctggcggtggcggatctgagattgtgttgacacagtctcccgataccctgtcactgtcacccggcgagaaggcaacgctgagttgcagagcaagccagtcagtctcctcttcttttctggcctggtatcagcaaaaaccaggtcaggcaccatctctcctgatttacgttgccagcagacgggcggctggcattcccgacaggttctctggaagcggatctgggaccgattttaccctgacaattagccgcttggagcccgaagactttggtatgttttactgccagcactacggaaggacacctttcacatttggcccgggcacgaaagtcgatataaaacgcacgcgtggaggcggatctatggaccctgatctcgaaattgaggccgcctttctggaacgcgagaacactgccctggaaaccagggtcgcagagctgagacagagagtgcagagactgcggaacagagtgtctcagtaccgcaccagatatggcccactcggcggaggtaaa

SEQ ID NO: 1477 - DNA, 969 bp, Artificial Sequence
  Synthetic Polynucloetide
atggccttaccagtgaccgccttgctcctgccgctggccttgctgctccacgccgccaggccggacatccaactgactcagagccccagctttctgagcgcctctgtgggcgacagagtgaccatcacatgtagagccagccagggcatcagcagctacctggcttggtatcagcagaagcctggcaaggcccctaaactgctgatctacgccgccagcacactccagtctggcgtgccaagcagattttctggcagcggctctggcaccgagttcaccctgacaatatccagcctccagcctgaggacttcgccacctactactgccagcaagtgaacagctaccctctgacctttggcggaggcaccaaggtggaaatcaagagaggcggaggcggaagtggaggcggaggatctggcggcggaggctctcaactgcaactgcaagagtctggccctggcctggtcaagcctagcgaaacactgagcctgacctgtaccgtgtctggcggcagcatcagctccagcacatattactggggctggatcagacagcctcctggcaaaggactggaatggatcggctccatctacttcaccggcagcaccgactacaaccccagcctgaagtccagggtgtccatctccgtggacaccagcaagaaccagttctccctgaagctgagcagcgtgacagccgctgataccgccgtgtactactgcgccaaagaggacgatagcagcggctactacagcttcgactattggggccagggcaacctggtcaccgttagctctacgcgtggaggcggatctatggaccctgatctcgaaattgaggccgcctttctggaacgcgagaacactgccctggaaaccagggtcgcagagctgagacagagagtgcagagactgcggaacagagtgtctcagtaccgcaccagatatggcccactcggcggaggtaaa

SEQ ID NO: 1478 - DNA, 978 bp, Artificial Sequence
  Synthetic Polynucloetide
atggccttaccagtgaccgccttgctcctgccgctggccttgctgctccacgccgccaggccgcagtctgctctgacccagcctagatccgtgtctggctctcctggacacagcgtgaccatcagctgtaccggcacctcttccgacgtgggcgactacaattacgtgtcctggtatcagcagaggcccggcaaggtgccaaagctgctgatctacgacgtgtccaagaggccaagcggcgtgcccgatagattttccggcagcaagtctggcaacaccgccagcctgacaatctctggactgcaagccgaggacgaggccatctacttttgtgccagctacgccggcaactacaacgtggtgtttggcggaggcaccaagctgacagtgcttggacaaggcggaggcggaagtggaggcggaggatctggcggcggaggctctcaagttcagctggtgcagtctggcagcgagctgaagaaacctggggcctctgtgaaggtgtcctgcaaggcttccggctacaccttcaacacctacgccatgaattgggtccgacaggctccaggccaaggactggaatggatgggctggatcaacaccaacaccggcaatcccacatacgcccagggcttcaccggcagattcgtgttctctctggacacctccgtgtccaccgcctacctccagatcagctctctgaaggccgaggataccgccgtgtactactgcgccagacggtacttcgattggctgctgggagccttcgacatctggggccagggaacaatggtcaccgtgtctagtacgcgtggaggcggatctatggaccctgatctcgaaattgaggccgcctttctggaacgcgagaacactgccctggaaaccagggtcgcagagctgagacagagagtgcagagactgcggaacagagtgtctcagtaccgcaccagatatggcccactcggcggaggtaaa

SEQ ID NO: 1479 - DNA, 954 bp, Artificial Sequence
  Synthetic Polynucloetide
atggccttaccagtgaccgccttgctcctgccgctggccttgctgctccacgccgccaggccggacatccagatgacacagagccctagcagcctgtctgccagcgtgggagacagagtgaccatcacatgtagcgccagccagggcatcaacaactacctgaactggtatcagcagaagcccggcaaggcccctaagctgctgatccactacacatctggactgcacgctggcgtgcccagcagattttctggctctggcagcggcaccgactacaccctgacaatatctagcctccagcctgaggacgtggcaacctactactgccagcagtacagcatcctgccttggacctttggcggaggcaccaaggtggaaatcaagagaggcggaggcggaagtggaggcggaggatctggcggcggaggctctcaagttcagcttgttcagagcggagccgaagtgaagaaacccggcagctctgtgaaggtgtcctgcaaggcttccggctacgcctttagcagcagctggatgaactgggtccgacaggctcctggacagggccttgaatggatgggcagaatctatcccggcgacggcaatacccactacgcccagaaattccagggccgcgtgacactgacagccgacaagtctacaagcaccgcctacatggaactgagcagcctgagaagcgaggacaccgccgtgtactattgcggcgaaggctatctggaccctatggactattggggccagggcacactggtcaccgttagctctacgcgtggaggcggatctatggaccctgatctcgaaattgaggccgcctttctggaacgcgagaacactgccctggaaaccagggtcgcagagctgagacagagagtgcagagactgcggaacagagtgtctcagtaccgcaccagatatggcccactcggcggaggtaaa

SEQ ID NO: 1480 - DNA, 963 bp, Artificial Sequence
  Synthetic Polynucloetide
atggccttaccagtgaccgccttgctcctgccgctggccttgctgctccacgccgccaggccggaggtgcagctggttgaatctggcggaggactggttcagcctggcggatctctgagactgtcttgtgccgccagcggctacaccttcaccacctattggatgcactgggtccgacaggcccctggcaaaggacttgagtgggtcggatatatcaggcccagcaccggctacacagagtacaaccagaagttcaaggaccgcttcaccatcagcgccgacaccagcaagaataccgcctacctccagatgaacagcctgagagccgaggacaccgccgtgtactactgtgccagatccagatggctgctggactattggggccagggcacactggttacagtttctggcggaggcggaagtggaggcggaggatctggcggcggaggctctgacattcagatgacacagagccctagcagcctgagcgcctctgtgggagacagagtgaccatcacatgcaagagcagccagagcgtgctgtactccagcaatcagaagaactacctggcctggttccagcagaagcctggcaaggctcctaagctgctgatctactgggccagcaccagagaaagcggcgtgccaagcagattttctggcagcggctctggcaccgacttcaccctgacaatatccagcctccagcctgaggacttcgccacctacttttgccaccagtacctgagcagctacacattcggacagggcaccaaggtggaaatcaagcggacgcgtggaggcggatctatggaccctgatctcgaaattgaggccgcctttctggaacgcgagaacactgccctggaaaccagggtcgcagagctgagacagagagtgcagagactgcggaacagagtgtctcagtaccgcaccagatatggcccactcggcggaggtaaa

SEQ ID NO: 1481 - DNA, 954 bp, Artificial Sequence
  Synthetic Polynucloetide
atggccttaccagtgaccgccttgctcctgccgctggccttgctgctccacgccgccaggccggacatccagatgacacagagccctagcagcctgtctgccagcgtgggagacagagtgaccatcacctgtagagccagccaggacatcagcaactacctgaactggtatcagcagaagcccggcaaggcccctaagctgctgatctactacaccagcagactgcacagcggcgtgcccagcagattttctggctctggcagcggcaccgacttcaccctgacaatatctagcctccagcctgaggacttcgccacctactattgccagcagggcaacaccctgccttacacatttggacagggcaccaaggtggaaatcaagagaggcggaggcggaagtggaggcggaggatctggcggcggaggctctgaagtgcagctggttgaatcaggtggcggcctggttcaacctggcggatctctgagactgagctgtgccgccagcggcttcaccttcagcgactactttatgagctgggtccgacaggcccctggcaaaggacttgaatgggtcgccaccatcagcaatggcggcacctacacttactaccccgacagcgtgaagggcagattcaccatctccagagacaacagcaagaacaccctgtacctccagatgaactccctgagagccgaggacaccgccgtgtactactgcgccagattcgacggctacatcttcgactattggggccagggcaccctggtcacagtctcttctacgcgtggaggcggatctatggaccctgatctcgaaattgaggccgcctttctggaacgcgagaacactgccctggaaaccagggtcgcagagctgagacagagagtgcagagactgcggaacagagtgtctcagtaccgcaccagatatggcccactcggcggaggtaaa

SEQ ID NO: 1482 - DNA, 975 bp, Artificial Sequence
  Synthetic Polynucloetide
atggccttaccagtgaccgccttgctcctgccgctggccttgctgctccacgccgccaggccggacatccagatgacacagagccctagcagcctgtctgccagcgtgggagacagagtgaccatcacctgtaccgccagcagcagagtgtccagcagctacctgcactggttccagcagaagcctggcaaggcccctaagctgctgatctacagcaccagcaatctggcctctggcgtgcccagcagattttctggctctggcagcggcaccgacttcaccctgacaatatctagcctccagcctgaggacttcgccacctactactgccaccagtaccacagaagcccctacacattcggccagggcaccaaggtggaaatcaagagaggcggaggcggaagtggaggcggaggatctggcggcggaggctctgaagttcagctggttgaatctggcggcggactggttcaacctggcggatctctgagactgagctgtgccgcctctggctacgccttcagcaacagctggatcaactgggtccgacaggcccctggcaaaggactggaatgggtcggacaaatctaccccggcgactacgacaccaactacaacggcaagttcaagggcagattcaccatcagccgggacaagagcaagaacaccgcctacctccagatgaactccctgagagccgaggacaccgccgtgtactattgtgctagaggcggctccatctactacggcaacctgggcttcttcgacgtgtggggacagggcacactggtcacagtctcttctacgcgtggaggcggatctatggaccctgatctcgaaattgaggccgcctttctggaacgcgagaacactgccctggaaaccagggtcgcagagctgagacagagagtgcagagactgcggaacagagtgtctcagtaccgcaccagatatggcccactcggcggaggtaaa

SEQ ID NO: 1483 - DNA, 945 bp, Artificial Sequence
  Synthetic Polynucloetide
atggccttaccagtgaccgccttgctcctgccgctggccttgctgctccacgccgccaggccggacatccagatgacacagagccctagcagcctgtctgccagcgtgggagacagagtgaccatcacatgtagcgccagcagcagcgtgacctacatgtactggtatcagcagaagcccggcaaggcccctaagctgctgatctacgacaccagcaatctggcctctggcgtgcccagcagattttctggctctggcagcggcaccgactacaccctgacaatatctagcctccagcctgaggacttcgccacctactactgccagcagtggtccaactatcccctgacattcggccagggcaccaaggtggaaatcaaaggcggaggcggaagtggaggcggaggatctggcggcggaggctctcaagttcagctggttcagagcggagccgaagtgaagaaacctggggcctctgtgaaggtgtcctgcaaggccagcggctacagcttcatcgagtacaccatcaactgggtccgacaggcccctggacaaggcctggaatggatcggcaacatcgacccctactacggcacaacctactacaaccagatgttcaccggcagagccacactgaccgtggacacctctatcagcaccgcctacatggaactgagccggctgagatccgatgacaccgccgtgtactattgtgccagaggcagcgcctggtttccctattggggacagggaaccctggtcaccgttagctctacgcgtggaggcggatctatggaccctgatctcgaaattgaggccgcctttctggaacgcgagaacactgccctggaaaccagggtcgcagagctgagacagagagtgcagagactgcggaacagagtgtctcagtaccgcaccagatatggcccactcggcggaggtaaa

SEQ ID NO: 1484 - DNA, 945 bp, Artificial Sequence
  Synthetic Polynucloetide
atggccttaccagtgaccgccttgctcctgccgctggccttgctgctccacgccgccaggccggagatcgtgctgacacagagcccttctagcctgtctgccagcgtgggcgacagagtgaccatcacatgtagagccagcgagaacatctacagctacctggcctggtatcagcagaagcctggcaaggcccctaagctgctgatctacaacaccaagacactcggcgagggcgtgcccagcagattttctggttctggcagcggcaccgacttcaccctgaccatatctagcctgcagcctgaggacttcgccacctactactgccagcaccactacggcacccctttcacatttggccctggcaccaaggtggacatcaaaggcggaggcggaagtggaggcggaggatctggcggcggaggctctcaagttcagctggttcagagcggagccgaagtgaagaaacctggggcctctgtgaaggtgtcctgcaaggccagcggctacaccttcagcgactattgggtgcactgggtccgacaggctccaggacaaggactggaatggatgggagccatcgacggcagcgataccttcaacgattacagccagaaattcaaaggccgcgtgaccatgaccagagacaccagcatcagcaccgcctacatggaactgagccggctgagatccgatgacaccgccgtgtactattgtgccagaggcggcctgctgcagtattggggacagggaacactggtcaccgtgtcctctacgcgtggaggcggatctatggaccctgatctcgaaattgaggccgcctttctggaacgcgagaacactgccctggaaaccagggtcgcagagctgagacagagagtgcagagactgcggaacagagtgtctcagtaccgcaccagatatggcccactcggcggaggtaaa

SEQ ID NO: 1485 - DNA, 957 bp, Artificial Sequence
  Synthetic Polynucloetide
atggccttaccagtgaccgccttgctcctgccgctggccttgctgctccacgccgccaggccgcaggttcagctccagcagtctggacctgagctggttaagcctggcgcttccgtgaagatcagctgcaaggcttccggctacgccttcagcagcagctggatgaactgggtcaaacagaggcccggcaaaggactggaatggatcggcagaatctaccccggcgacgaggacaccaattacagcggcaagttcaaggacaaggccacactgaccgccgacaagagcagcaccacagcctacatgcagctgagcagcctgaccagcgaggatagcgccgtgtacttctgtgccagaagcctgctgtacggcgactacctggattattggggccagggcacaaccctgacagtgtctagcggcggaggcggaagtggaggcggaggatctggcggcggaggctctcaaattgtgctgacacagagccccgccatcatgagcgcttctccaggcgagaaagtgaccatgacctgtagcgccagcagctccgtgtcttacatgcactggtatcagcagaagtccggcacaagccccaagcggtggatctacgataccagcaaactggcctccggcgtgcccgatagattttctggcagcggcagcggaaccagctacttcctgaccatcaacaacatggaagccgaggacgccgccacctactactgccagcagtggaacatcaaccctctgacctttggagccggcaccaagctggaactgaagagaacgcgtggaggcggatctatggaccctgatctcgaaattgaggccgcctttctggaacgcgagaacactgccctggaaaccagggtcgcagagctgagacagagagtgcagagactgcggaacagagtgtctcagtaccgcaccagatatggcccactcggcggaggtaaa

SEQ ID NO: 1486 - DNA, 966 bp, Artificial Sequence
  Synthetic Polynucloetide
atggccttaccagtgaccgccttgctcctgccgctggccttgctgctccacgccgccaggccggacatccagatgacacagagcagcgcctacctgagcgtgtcccttggaggcagagtgaccatcacatgcaaggccagcgaccacatcaacaactggctggcctggtatcagcacaagcccggcaatgcccctagactgctgatctctggcgctaccacactggaaacaggcgtgcccagcagattttctggcagcggctctggcaaggactacaccctgagcatcaccagcctccagaccgaggatgtggctacctactactgccagcagagctggaacaccccttggacatttggcggaggcaccaagctggaaatcaagagaggcggaggcggaagtggaggcggaggatctggcggcggaggctctcaagttcagctgcaacagagcggagccgagcttgtcagacctggcagctctgtgaagattagctgcaaagccagcggctacgccttcagcagctactgggtcaactggatgaagcagcggcctggacagggcctcgaatggatcggccaaatctatcctggcgacggcgacaccaactacaacggcaagtttaagggcagagccaccgtgaccgccgacaagagcagcagcacatcctacatgcagttcagcagcctgaccagcgaggacagcgccgtgtatttctgtgccagatccatcaccaccgtcgtgggctgcgctatggattattggggccagggcacaagcgtgaccgtgtcatctacgcgtggaggcggatctatggaccctgatctcgaaattgaggccgcctttctggaacgcgagaacactgccctggaaaccagggtcgcagagctgagacagagagtgcagagactgcggaacagagtgtctcagtaccgcaccagatatggcccactcggcggaggtaaa

SEQ ID NO: 1487 - DNA, 963 bp, Artificial Sequence
  Synthetic Polynucloetide
atggccttaccagtgaccgccttgctcctgccgctggccttgctgctccacgccgccaggccggaggttcagctgcttgagtctggcggaggactggttcaacctggcggaagcctgagactgtcttgtgccgccagcggcttcacctttagcagctacgccatgagctgggtccgacaggctcctggcaaaggactggaatgggtgtccgtgatctctggctctggcggcagacccaattacgccgattctgtgaagggcagattcaccatcagccgggacaacagcaagaacaccctgtacctccagatgaacagcctgcgcgacgaggataccgccgtgtactattgtgccaaggtggactacagcaactacctgttcttcgactactggggccagggcaccctggtcacagtttctagcggcggaggcggaagtggaggcggaggatctggcggcggaggctctgaaatcgtgctgacacagagccccggcacactgtcactttctccaggcgaaggcgctaccctgtcttgtagagctggacagtctgtgcggagcagctacctcggatggtatcagcagaagcctggacaggcccctcggctgttgatctacggtgcttctagcagagccacaggcatccccgatagattttctggcagcggctccggcaccgacttcaccctgacaatcagcagactggaacccgaggacttcgccgtgtattactgccagcagtacggctacagccctcctacatttggcggaggcaccaagctggaaatcaagacgcgtggaggcggatctatggaccctgatctcgaaattgaggccgcctttctggaacgcgagaacactgccctggaaaccagggtcgcagagctgagacagagagtgcagagactgcggaacagagtgtctcagtaccgcaccagatatggcccactcggcggaggtaaa

SEQ ID NO: 1488 - DNA, 972 bp, Artificial Sequence
  Synthetic Polynucloetide
atggccttaccagtgaccgccttgctcctgccgctggccttgctgctccacgccgccaggccggacatcgtgctgacacagagccctccaagcctggctatgagcctgggaaagagagccaccatcagctgtagagccagcgagagcgtgacaatcctgggctctcacctgatccactggtatcagcagaagcccggccagcctcctacactgctgattcagctggcctccaatgtgcagacaggcgtgccagccagattttctggcagcggcagcagaaccgacttcaccctgaccattgatcccgtggaagaggacgacgtggccgtgtactactgcctccagagcagaacaatccccagaacctttggcggaggcaccaagctggaaatcaagggcagcacaagcggcagcggaaagcctggatctggcgagggatctaccaagggacagatccagctggtgcagtctggccccgagctgaagaaacctggcgagacagtgaagatcagctgcaaggccagcggctacaccttcaccgactacagcatcaactgggtcaagagagcccctggcaagggcctgaaatggatgggctggatcaacaccgaaaccagagagcccgcctacgcctacgacttcagaggcagattcgccttcagcctggaaaccagcgccagcacagcctacctccagatcaacaacctgaagtacgaggacaccgccacctacttttgcgccctggactacagctacgctatggactattggggccagggcaccagcgtgacagtctcttctacgcgtggaggcggatctatggaccctgatctcgaaattgaggccgcctttctggaacgcgagaacactgccctggaaaccagggtcgcagagctgagacagagagtgcagagactgcggaacagagtgtctcagtaccgcaccagatatggcccactcggcggaggtaaa

SEQ ID NO: 1489 - DNA, 972 bp, Artificial Sequence
  Synthetic Polynucloetide
atggccttaccagtgaccgccttgctcctgccgctggccttgctgctccacgccgccaggccggacatccagatgacacagagccctagcagcctgtctgccagcgtgggagacagagtgaccatcacctgtagagccagcagcagcgtgtcctacatgcactggtatcagcagaagcccggcaaggcccctaagctgctgatctacgccaccagcaatctggcctctggcgtgccaagcagattttctggcagcggctctggcaccgacttcaccctgacaatatccagcctccagcctgaggacttcgccacctactactgccagcagtggaccttcaatcctcctaccttcggccagggcaccaagctggaaatcaagagaacagtggctgccggcggaggcggaagtggaggcggaggatctggcggcggaggctctcaagttcagctggttcagtctggggccgaagtgaagaaacctggggcctctgtgaaggtgtcctgcaaggcttccggctacacctttaccagctacaatatgcactgggtccgacaggctcccggccagagacttgaatggatgggcggcatctaccccggcaatggcgacacctcctacaaccagaaattcaagggccgcgtgacaatcaccagagacacctctgccagcaccgcctacatggaactgagcagcctgagaagcgaggacaccgccgtgtactactgcgccagatacgactacaactacgctatggactactggggccagggaaccctggtcacagtgtctagtgcttccacgcgtggaggcggatctatggaccctgatctcgaaattgaggccgcctttctggaacgcgagaacactgccctggaaaccagggtcgcagagctgagacagagagtgcagagactgcggaacagagtgtctcagtaccgcaccagatatggcccactcggcggaggtaaa

SEQ ID NO: 1490 - DNA, 957 bp, Artificial Sequence
  Synthetic Polynucloetide
atggccttaccagtgaccgccttgctcctgccgctggccttgctgctccacgccgccaggccggagatcgtgctgacacagagccctggcacactgtcactgtctccaggcgaaagagccacactgagctgtagagccagccagagcgtgtccagctcttacctggcttggtatcagcagaagcccggacaggctcccagactgctgatctacggtgcctctagcagagccacaggcatccccgatagattttctggcagcggctccggcaccgacttcaccctgacaatcagcagactggaacccgaggacttcgccgtgtactactgccagcagtaccaccactctccactgacctttggcggaggcaccaaggtggaaatcaagagaggcggaggcggaagtggaggcggaggatctggcggcggaggctctgaagttcagctggttgaatcaggtggcggcctggttcaacctggcggatctctgagactgtcttgtgccgccagcggcttcactttcagcggcagatccatgaactgggtccgacaggcccctggcaaaggactggaatgggtgtcctacatcagcagcgacagccggaccatctactacgccgatagcgtgaagggcagattcaccatctccagagacaacgccaagaacagcctgtacctccagatgaactccctgagagccgaggacacagccgtgtattattgtgccagaggcggccacggctacttcgatctttggggcagaggcaccctggtcaccgtttcttctacgcgtggaggcggatctatggaccctgatctcgaaattgaggccgcctttctggaacgcgagaacactgccctggaaaccagggtcgcagagctgagacagagagtgcagagactgcggaacagagtgtctcagtaccgcaccagatatggcccactcggcggaggtaaa

SEQ ID NO: 1491 - DNA, 966 bp, Artificial Sequence
  Synthetic Polynucloetide
atggccttaccagtgaccgccttgctcctgccgctggccttgctgctccacgccgccaggccggagatcgtgctgacacagagccctggcacactgtcactgtctccaggcgaaagagccacactgagctgtagagccagccagagcgtgtccagcgattacctggcttggtatcagcagaagcccggacaggctcccagactgctgatctatggtgcctctcggagagccacaggcatccccgatagattttctggcagcggctccggcaccgacttcaccctgacaatcagcagactggaacccgaggacttcgccgtgtactactgccagcagtacgtgtcctactggacctttggcggaggcaccaaggtggaaatcaagagaggcggaggcggaagtggaggcggaggatctggcggcggaggctctcaagttcagctggttgaatcaggcggaggcgttgtgcagcctggcagaagtctgagactgtcttgtgccgccagcggcttcaccttcagcagctatggaatgcactgggtccgacaggcccctggcaaaggacttgaatgggtggccggcatttggtgggacggcagcaatgagaagtacgccgacagcgtgaagggcagattcaccatctccagagacaacagcaagaacaccctgtacctccagatgaacagcctgagagccgaggacacagccgtgtattattgcgccaaagaggccccttactacgccaaggactacatggacgtgtggggcaagggcaccacagtgactgtctcttctacgcgtggaggcggatctatggaccctgatctcgaaattgaggccgcctttctggaacgcgagaacactgccctggaaaccagggtcgcagagctgagacagagagtgcagagactgcggaacagagtgtctcagtaccgcaccagatatggcccactcggcggaggtaaa

SEQ ID NO: 1492 - DNA, 966 bp, Artificial Sequence
  Synthetic Polynucloetide
atggccttaccagtgaccgccttgctcctgccgctggccttgctgctccacgccgccaggccggacatccagatgacacagagccctagcagcctgtctgccagcgtgggagacagagtgaccatcacctgtagagccagccaggacgtgaacacagccgtggcttggtatcagcagaagcctggcaaggcccctaagctgctgatctacagcgccagctttctgtacagcggcgtgcccagcagattcagcggaagcagaagcggcaccgacttcaccctgacaatatccagcctccagcctgaggacttcgccacctactactgccagcagcactacaccacacctccaacattcggccagggcaccaaggtggaaatcaagagaacaggcggaggcggaagtggaggcggaggatctggcggcggaggctctgaagtgcagctggttgaatcaggtggcggcctggttcaacctggcggatctctgagactgagctgtgccgccagcggcttcaacatcaaggacacctacatccactgggtccgacaggcccctggcaaaggacttgaatgggtcgccagaatctaccccaccaacggctacaccagatacgccgactctgtgaagggcagattcaccatcagcgccgacaccagcaagaacaccgcctacctccagatgaactccctgagagccgaggacaccgccgtgtactactgtagcagatggggcggctggggcttctacgctatggattattggggccagggaaccctggtcaccgtgtcatctacgcgtggaggcggatctatggaccctgatctcgaaattgaggccgcctttctggaacgcgagaacactgccctggaaaccagggtcgcagagctgagacagagagtgcagagactgcggaacagagtgtctcagtaccgcaccagatatggcccactcggcggaggtaaa

SEQ ID NO: 1493 - DNA, 951 bp, Artificial Sequence
  Synthetic Polynucloetide
atggccttaccagtgaccgccttgctcctgccgctggccttgctgctccacgccgccaggccgcaggtgcagctggttgaatctggcggcggacttgtgaagcctggcggatctctgagactgagctgtgccgccagcggcttcaccttcagcgactactacatgacctggatcagacaggcccctggcaaaggactggaatggatcagctacatcagcagcagcggcagcaccatctactacgccgatagcgtgaagggcagattcaccatcagccgggacaacgccaagaacagcctgtacctccagatgaactccctgagagccgaggacaccgccgtgtactactgcgccagagacagaaacagccacttcgactattggggccagggcaccctggtcacagtttctagcggcggaggcggaagtggaggcggaggatctggcggcggaggctctgatattcagatgacacagagccccagcagcgtgtccgcctctgtgggagatagagtgaccatcacctgtagagccagccagggcatcacaagatggctggcctggtatcagcagaagccaggcaaggcccctaagctgctgatctacgccgcttctgtgctccagagcggagtgcctagcagattttctggcagcggctccggcaccgatttcaccctgacaatatccagcctccagcctgaggacttcgccacctactactgccagcagagcaacagcttccccagaacattcggacagggcaccaaggtggaaatcaagacgcgtggaggcggatctatggaccctgatctcgaaattgaggccgcctttctggaacgcgagaacactgccctggaaaccagggtcgcagagctgagacagagagtgcagagactgcggaacagagtgtctcagtaccgcaccagatatggcccactcggcggaggtaaa

SEQ ID NO: 1494 - DNA, 951 bp, Artificial Sequence
  Synthetic Polynucloetide
atggccttaccagtgaccgccttgctcctgccgctggccttgctgctccacgccgccaggccgcaggtgcagctggttgaatctggcggcggacttgtgaagcctggcggatctctgagactgagctgtgccgccagcggcttcaccttcagcgatcactacatgagctggatcagacaggcccctggcaaaggactggaatggttcagctacatcagcagcagcggcggcatcatctactacgccgatagcgtgaagggcagattcaccatcagccgggacaacgccaagaacagcctgtacctccagatgaactccctgagagccgaggacaccgccgtgtactactgtgccagagatgtgggcagccacttcgactattggggccagggaacactggtcaccgtttctagcggcggaggcggaagtggaggcggaggatctggcggcggaggctctgatattcagatgacacagagccccagcagcgtgtccgcctctgtgggagatagagtgaccatcacctgtcgggccagccaggacattagcagatggctggcttggtatcagcagaagccaggcaaggcccctaagctgctgatttcagccgccagcagactccagagcggagtgcctagcagattttctggctctggcagcggcaccgacttcaccctgacaatatctagcctccagcctgaggacttcgccatctactattgccagcaggccaagagcttccccagaacatttggacagggcaccaaggtggaaatcaagacgcgtggaggcggatctatggaccctgatctcgaaattgaggccgcctttctggaacgcgagaacactgccctggaaaccagggtcgcagagctgagacagagagtgcagagactgcggaacagagtgtctcagtaccgcaccagatatggcccactcggcggaggtaaa

SEQ ID NO: 1495 - DNA, 987 bp, Artificial Sequence
  Synthetic Polynucloetide
atggccttaccagtgaccgccttgctcctgccgctggccttgctgctccacgccgccaggccgcaggtgcagctggttgaatctggtggcggagtggtgcagtctggcagaagcctgagactgtcttgtgccgccagcggcttcaccttcagaaactacggaatgcactgggtccgacaggcccctggcaaaggacttgaatgggtcgccgtgatttggtacgacggcagcgacaagtactacgccgattctgtgcggggcagattcaccatcagccgggacaacagcaagaacaccctgtacctccagatgaacagcctgagagccgaggacaccgccgtgtactactgtgccagagatggctacgacatcctgaccggcaatcccagagacttcgactattggggccagggcacactggtcacagtttctagcggcggaggcggaagtggaggcggaggatctggcggcggaggctctgataccgtgatgacccagacacctctgagcagccacgtgacacttggacagcctgccagcatcagctgtagaagcagccagagcctggtgcacagcgacggcaatacctacctgtcttggctccagcagaggccaggacagcctcctagactgctgatctaccggatcagcagacggttcagcggcgtgcccgatagattttctggaagcggagccggcaccgacttcaccctggaaatcagcagagtggaagccgaggatgtgggcgtctactactgtatgcagagcacccacgtgccacggacctttggacagggcaccaaggtggaaatcaagacgcgtggaggcggatctatggaccctgatctcgaaattgaggccgcctttctggaacgcgagaacactgccctggaaaccagggtcgcagagctgagacagagagtgcagagactgcggaacagagtgtctcagtaccgcaccagatatggcccactcggcggaggtaaa

SEQ ID NO: 1496 - DNA, 966 bp, Artificial Sequence
  Synthetic Polynucloetide
atggccttaccagtgaccgccttgctcctgccgctggccttgctgctccacgccgccaggccggaggtgcagctggttgaatctggcggaggactggttcagcctggcggatctctgagactgtcttgtgccgccagcggcttcccattcagcagctacgatatgcactgggtccgacaggccacaggcaaaggactggaatgggtgtccgccatcggaacagccggcgctacctattatcccggctctgtgaagggcagattcaccatcagcagagagaacgccaagaacagcctgtacctccagatgaactccctgagagccggcgataccgccgtgtactattgtgccagaggcgactacgtgtggggcacctacagacccctgttcgattattggggccagggcaccctggtcacagtttctagtggcggaggcggaagtggaggcggaggatctggcggcggaggctctgatattcagctgactcagagccccagcttcctgtctgcctctgtgggcgacagagtgaccatcacatgttgggccagccagggcatcaacaactacctggcctggtatcagcagaagcccggcaaggctcctaagctgctgatctacgccgccagcacactgcaaacaggcgtgccaagcagattttccggctctggcagcggcaccgagttcaccctgacaatatctagcctccagcctgaggacttcgccacctactactgccagcagctgaacagctaccctctgacctttggaggcggcaccaaggtggaaatcaagacgcgtggaggcggatctatggaccctgatctcgaaattgaggccgcctttctggaacgcgagaacactgccctggaaaccagggtcgcagagctgagacagagagtgcagagactgcggaacagagtgtctcagtaccgcaccagatatggcccactcggcggaggtaaa

SEQ ID NO: 1497 - DNA, 957 bp, Artificial Sequence
  Synthetic Polynucloetide
atggccttaccagtgaccgccttgctcctgccgctggccttgctgctccacgccgccaggccgcaggttcagctgcaagagtctggccctggcctggtcaagcctagcgaaacactgagcctgacctgtaccgtgtctggggccagcatcagcagcttctactggtcctggatcagacagcctcctggcaaaggactggaatggatcggctacatctactacagcggcaccaccaactacaaccccagcctgaagtccagagtgaccatcagcgtggacaccagcaagaaccagttctccctgaagctgagcagcgtgacagccgccgatacagccgtgtactactgtgccagaattgccgtggccggcttcttcttcgactattggggccagggcaccctggtcacagtttctagcggcggaggcggaagtggaggcggaggatctggcggcggaggctctgaaattgtgctgacacagagccccggcacactgtcactttctccaggcgaaagagccacactgagctgtagagccagccagagcgtgaacaagaactacctggcttggtatcagcagaagcccggacaggctcccagactgctgatctacggtgcctctagcagagccacaggcatccccgatagattttctggcagcggctccggcaccgacttcaccctgacaatcagcagactggaacccgaggacttcgccgtgtattattgccagcagtacgacagaagccctctgacctttggaggcggcaccaaggtggaaatcaagacgcgtggaggcggatctatggaccctgatctcgaaattgaggccgcctttctggaacgcgagaacactgccctggaaaccagggtcgcagagctgagacagagagtgcagagactgcggaacagagtgtctcagtaccgcaccagatatggcccactcggcggaggtaaa

SEQ ID NO: 1498 - DNA, 984 bp, Artificial Sequence
  Synthetic Polynucloetide
atggccttaccagtgaccgccttgctcctgccgctggccttgctgctccacgccgccaggccgcaggttcagctggttcagtctggggccgaagtgaagaaacctggggcctctgtgaaggtgtcctgcaaggccagcggctacacctttaccaactactacatgcactgggtccgacaggcccctggactgggacttgagtggatgggcatcatcaaccctagcgacggcagcacaagctacgcccagaaattccagggcagagtgaccatgaccagagacaccagcaccaacaccgtgtacatggacctgagcagcctgagaagcgaggacaccgccgtgtactattgtgccagaggcggcaacagcgccttctacagctactacgacatggacgtgtggggccagggcaccacagtgacagtttctagcggcggaggcggaagtggaggcggaggatctggcggcggaggctctgatgtggtcatgacacagacccctctgagcctgcctgtgacacttggacagcctgccagcatcagctgtagatccagccagagcctggtgtacagagatggcaacacctacctgagctggttccagcagaggcctggacagtctcctcggcggctgatctacaaggtgtccaactggcagagcggcgtgcccgatagattttctggcggtggcagcggcaccgacttcaccctgaagatcagcagagtggaagccgaggacgtgggcgtgtactactgtatgcagggcacacactggcctccaacattcggccagggaacaaaggtggaaatcaagacgcgtggaggcggatctatggaccctgatctcgaaattgaggccgcctttctggaacgcgagaacactgccctggaaaccagggtcgcagagctgagacagagagtgcagagactgcggaacagagtgtctcagtaccgcaccagatatggcccactcggcggaggtaaa

SEQ ID NO: 1499 - DNA, 945 bp, Artificial Sequence
  Synthetic Polynucloetide
atggccttaccagtgaccgccttgctcctgccgctggccttgctgctccacgccgccaggccgcaggttcagctccagcagtctggacctgagctggttaagcctggcgcttctgtgcggatctcttgcaaggccagcggctacaccttcaccacctactacatccactgggtcaagcagcggcctggacagggactcgaatggatcggctggatctaccccggcaacgtgaacaccaactacaacgagaagttcaagggcaaagccacactgaccgccgacaagagcagcagcacagcctacatgcagctgaccagcctgacctctgaggacagcgccgtgtacttttgtgccagaggcgtgtactacttcgactactggggccagggcaccatcctgacagtttctagcggcggaggcggaagtggaggcggaggatctggcggcggaggctctatcgtgatgacccagactcctaagttcctgctggtgtctgccggcgacagagtgaccatcacctgtaaagccagccagagcgtgaacaacgacgtgtcctggttccagcagaagcccggccaatctcctacactgctgatctactacgccagcaacagatacaccggcgtgcccgatagattcaccggctctggctacggcaccgacttcacctttaccatcagcaccgtgcaggccgaggacctggctgtgtacttctgccagcaagactacagcagcccttacacctttggaggcggcaccaagctggaaatcaagacgcgtggaggcggatctatggaccctgatctcgaaattgaggccgcctttctggaacgcgagaacactgccctggaaaccagggtcgcagagctgagacagagagtgcagagactgcggaacagagtgtctcagtaccgcaccagatatggcccactcggcggaggtaaa

SEQ ID NO: 1500 - DNA, 954 bp, Artificial Sequence
  Synthetic Polynucloetide
atggccttaccagtgaccgccttgctcctgccgctggccttgctgctccacgccgccaggccgcaggttcagctgcaagagtctggccctggcctggtcaagcctagccaaacactgagcctgacctgtaccgtgtctggcggcagcatcaacaacaacaattactactggacctggatcagacagcaccccggcaaaggactggaatggatcggctacatctactacagcggcagcaccttctacaaccccagcctgaagtccagagtgaccatcagcgtggacaccagcaagacccagttctccctgaagctgagcagcgtgacagccgccgatacagccgtgtactactgcgccagagaagataccatgaccggcctggatgtgtggggccagggaacaacagtgacagtgtctagcggcggaggcggaagtggaggcggaggatctggcggcggaggctctgacattcagatgacacagagccctagcagcctgagcgcctctgtgggagacagagtgacaattacctgtcgggccagccagtctatcaacaactacctgaactggtatcagcagaagcccggcaaggcccctacactgctgatctatgccgccagctctctccagagcggagtgcctagcagattcagcggaagcagaagcggcaccgacttcaccctgacaatatccagcctccagcctgaggacttcgccgcctacttttgccagcagacctacagcaaccccacctttggccagggcaccaaggtggaagtgaagacgcgtggaggcggatctatggaccctgatctcgaaattgaggccgcctttctggaacgcgagaacactgccctggaaaccagggtcgcagagctgagacagagagtgcagagactgcggaacagagtgtctcagtaccgcaccagatatggcccactcggcggaggtaaa

SEQ ID NO: 1501 - DNA, 969 bp, Artificial Sequence
  Synthetic Polynucloetide
atggccttaccagtgaccgccttgctcctgccgctggccttgctgctccacgccgccaggccgagctacgagctgacacagcctccaagcgtgtccgtgtctcctggacagacagccagcatcacctgtagcggcgataagctgggcgataagtacgccagctggtatcagcagaagcccggccagtctcctgtgctggtcatctaccaggacaacagaaggcccagcggcatccccgagagattcagcggcagcaatagcggcaataccgccacactgaccatcagcggcacccaggctatggacgaggccgactactattgccaggcttgggacagcgacacctacgtgttcggcaccggcaccaaagtgacagtgcttggacaaggcggaggcggaagtggaggcggaggatctggcggcggaggctctgaagttcagctggttcagagcggagccgaagtgaagaaacctggggcctctgtgaaggtgtcctgcaaggcttccggcgataccttcaagcggtactacgtgcactgggtccgacaggctccaggacaaggactggaatggatgggcatcatcaaccccagcggcgtgtccacaacatacgcccagaaattccagggcagagtgaccatgaccagagacaccagcacctccaccgtgtacatggaactgagcagcctgagaagcgaggacaccgccgtgtactactgtgctgaagtgcgcggcagcggcttcaactacttcggcatggatgtgtggggccagggcacactggttaccgtttcttctacgcgtggaggcggatctatggaccctgatctcgaaattgaggccgcctttctggaacgcgagaacactgccctggaaaccagggtcgcagagctgagacagagagtgcagagactgcggaacagagtgtctcagtaccgcaccagatatggcccactcggcggaggtaaa

SEQ ID NO: 1502 - DNA, 966 bp, Artificial Sequence
  Synthetic Polynucloetide
atggccttaccagtgaccgccttgctcctgccgctggccttgctgctccacgccgccaggccggaggttcagctgcttgagtctggcggaggactggttcaacctggcggaagcctgagactgtcttgtgccgccagcggcttcacctttagcagctacgccatgagctgggtccgacaggctcctggcaaaggactggaagtggtggtgtctgccatttctggcggcggaggcagaacctactacgccgattctgtgaagggcagattcaccatcagccgggacaacagcaagaacaccctgtacctgcagatgaacagcctgagagccgaggacaccgccgtgtactactgtgccagagaagagatggccttccgggcctacagattcgacatctggggccagggaaccctggtcacagtttctagcggcggaggcggaagtggaggcggaggatctggcggcggaggctctgatattcagatgacacagagccccagcagcctgtctgcctctgtgggagacagagtgaccatcacctgtagagccagccagagcatcagcagctacctgaactggtatcagcagaagcccggcaaggcccctaaactgctgatctatgccgcctccagtctgcagagcggagtgcctagcagattttctggctctggcagcggcaccgacttcaccctgacaatatctagcctgcagcctgaggacttcgccacctactactgccagcagagctacatcacccctctgacattcggtggcggcaccaaggtggaaatcaagacgcgtggaggcggatctatggaccctgatctcgaaattgaggccgcctttctggaacgcgagaacactgccctggaaaccagggtcgcagagctgagacagagagtgcagagactgcggaacagagtgtctcagtaccgcaccagatatggcccactcggcggaggtaaa

SEQ ID NO: 1503 - DNA, 990 bp, Artificial Sequence
  Synthetic Polynucloetide
atggccttaccagtgaccgccttgctcctgccgctggccttgctgctccacgccgccaggccggacatcgtgctgacacagagccctgcttctctggccgtgtctcttggacagggcgctaccatcagctgtagagccagcaagagcgtgtccaccagcggctacacctacatgcactggtatcagcagaagcccggccagcctcctaagctgctgatctacctggcctccaacctggaaagcggagtgcctgccagattttctggcagcggctctggcaccgacttcaccctgaatatccatcctgtggaagaagaggacgccgccacctactactgtcagcactctggcgaactgccacctagctttggcggaggcaccaagctggaaatcaagagagctggcggaggcggaagtggaggcggaggatctggcggcggaggctctgaagtgcagctggtggaatctggcggcgaccttgtgaaacctggcggctctctgaagctgagctgtgccgtgtccggcttcacctttagcagctacggcatgagctgggtccgacagacccctgacaagagactggaatgggtcgccacagtgtctagcggcggcacctacacatattaccccgacagcgtgaagggcagattcaccatcagccgggacaacgccaagaacaccctgtacctccagatgagcagcctgaagtccgaggacagcgccatgtactactgcgccagacaccggggcaattactacgccacctattattacgctatggactactggggccagggcaccagcgtgacagtttcttctacgcgtggaggcggatctatggaccctgatctcgaaattgaggccgcctttctggaacgcgagaacactgccctggaaaccagggtcgcagagctgagacagagagtgcagagactgcggaacagagtgtctcagtaccgcaccagatatggcccactcggcggaggtaaa

SEQ ID NO: 1504 - DNA, 972 bp, Artificial Sequence
  Synthetic Polynucloetide
atggccttaccagtgaccgccttgctcctgccgctggccttgctgctccacgccgccaggccggacatccagatgacacagagccctagcagcctgtctgccagcgtgggagacagagtgaccatcacatgtagcgccagccagggcatcagaaactacctgaactggtatcagcagaaacccggcaaggtgcccaagctgctgatctactacaccagcagactgcacagcggcgtgcccagcagattttctggctctggcagcggcaccgacttcaccctgacaatatctagcctccagcctgaggacgtggcaacctactactgtcagcagtacggcaagctgccctacacattcggccagggcaccaagctggaaatcaagagaacagtggctgccggcggaggcggaagtggaggcggaggatctggcggcggaggctctgaagttcagctggttgaatcaggcggcggactggttcaacctggcggatctctgagactgagctgtgccgccagcggcttcacattttccgacgcctggatggactgggtccgacaggctcctggaaaaggactggaatgggtcggagagatccggtccaaagtgaacaaccacgaaacctactatgccgagagcgtgaagggcagattcaccatcagccgggacgacagcaagaacagcctgtacctccagatgaactccctgaaaaccgaggacaccgccgtgtactactgcgccagaaacgactacttcgactactggggccagggaaccaccgtgacagtgtctagtgcttccacgcgtggaggcggatctatggaccctgatctcgaaattgaggccgcctttctggaacgcgagaacactgccctggaaaccagggtcgcagagctgagacagagagtgcagagactgcggaacagagtgtctcagtaccgcaccagatatggcccactcggcggaggtaaa

SEQ ID NO: 1505 - DNA, 996 bp, Artificial Sequence
  Synthetic Polynucloetide
atggccttaccagtgaccgccttgctcctgccgctggccttgctgctccacgccgccaggccggaggttcagctgcaagagtctggggccgaagtgaagaaacctggcagcagcgtgaaggtgtcctgcaaggccagcggcttcaacatcaaggacacctacatgcactgggtccgacaggcccctggacaaggacttgagtggatgggcagaatcgaccccgccaacggcaacagcaaatacgtgcccaagttccagggcagagtgaccatcacagccgacgagagcacaagcaccgcctacatggaactgagcagcctgagaagcgaggacaccgccgtgtactactgtgcccctttcggctactacgtgtccgactacgccatggcctattggggccagggaaccaccgtgacagtgtctagtgcatctggcggaggcggaagtggaggcggaggatctggcggcggaggctctgacatcgtgatgacacagagccccgatagcctggccgtgtctctgggagaaagagccaccatcaactgtagagccggcgagagcgtggacatcttcggcgtgggatttctgcactggtatcagcagaagcccggccagcctcctaagctgctgatctacagagccagcaacctggaaagcggcgtgcccgatagattttctggcagcggctctggcaccgacttcaccctgacaatcagacctctccaggccgaggatgtggccgtgtattattgccagcagaccaacgaggacccctacacatttggacagggcaccaagctggaaatcaagagaacagtggccgccacgcgtggaggcggatctatggaccctgatctcgaaattgaggccgcctttctggaacgcgagaacactgccctggaaaccagggtcgcagagctgagacagagagtgcagagactgcggaacagagtgtctcagtaccgcaccagatatggcccactcggcggaggtaaa

SEQ ID NO: 1506 - DNA, 975 bp, Artificial Sequence
  Synthetic Polynucloetide
atggccttaccagtgaccgccttgctcctgccgctggccttgctgctccacgccgccaggccgcaagttcagctggttcagtctggggccgaagtgaagaaacctggcagcagcgtgaaggtgtcctgcaaagcaagcggcggcacctttagcagctacgccatctcttgggtccgacaggcaccaggacaaggactggaatggatgggcctgattatccccagatacggcaaggccagatacgcccagaaattccagggcagagtgaccatcaccgccgacgagtctacaagcaccgcctacatggaactgagcagcctgagaagcgaggacacagccgtgtattattgcgcccggaactggccctactactacatggatttttggggccagggaaccctggtcaccgtgtctagtgcatctggcggaggcggaagtggaggcggaggatctggcggcggaggctctgacatcgtgctgacacagtctcccgccacactgtcactgtctccaggcgaaagagccacactgagctgtagagccagccagaacatcgtgttcaacctggcctggtatcagcagaagcctggacaggctccccggctgctgatctacgatgccagcaatagagccaccggcgtgcccgccagattttctggttctggcagcggcaccgacttcaccctgaccatatctagcctggaacctgaggacttcgccgtgtactactgccagcagaaaaagtccatgcctctgaccttcggccagggcaccaaggtggaaatcaagagaacagtggctgccacgcgtggaggcggatctatggaccctgatctcgaaattgaggccgcctttctggaacgcgagaacactgccctggaaaccagggtcgcagagctgagacagagagtgcagagactgcggaacagagtgtctcagtaccgcaccagatatggcccactcggcggaggtaaa

SEQ ID NO: 1507 - DNA, 984 bp, Artificial Sequence
  Synthetic Polynucloetide
atggccttaccagtgaccgccttgctcctgccgctggccttgctgctccacgccgccaggccggaggtgcagctggttgaatctggcggcggacttgtgaagcctggcggatctctgagactgagctgtgccgccagcggcttcacctttagcaatgcctggatgagctgggtccgacaggcccctggaaaaggactggaatgggtcggacggatcaagagcaagaccgaaggcggcaccaccgattatgctgcccctgtgaagggcagattcaccatcagcagggacgacagcaagaacaccctgtacctccagatgaacagcctgaaaaccgaggacaccgccgtgtactactgcaccacaccttacgagtggtcttggtacgactactggggccagggcacactggtcacagtgtcatctgcatctggcggaggcggaagtggaggcggaggatctggcggcggaggctctcagacagtggtcacccaagagcctagcctgacagtgtctcctggcggaaccgtgacactgacatgtggcagttctaccggcgctgtgaccaccagcaattacgccaactgggtgcagcagaagccaggccaagctcctagaggactgatcggcggcacaaacaagagagcccctggcacaccagccagattttctggctctctgctcggcggaaaggccgctcttacactgtctggtgtccagcctgaggacgaggccgagtattattgcgccctgtggtacagcaacctgtgggttttcggcggaggcaccaagctgacagtgctgactgttgctgctacgcgtggaggcggatctatggaccctgatctcgaaattgaggccgcctttctggaacgcgagaacactgccctggaaaccagggtcgcagagctgagacagagagtgcagagactgcggaacagagtgtctcagtaccgcaccagatatggcccactcggcggaggtaaa

SEQ ID NO: 1508 - DNA, 984 bp, Artificial Sequence
  Synthetic Polynucloetide
atggccttaccagtgaccgccttgctcctgccgctggccttgctgctccacgccgccaggccgcaggttcagctggttcagtctggggccgaagtgaagaaacctggggcctctgtgaaggtgtcctgcaaggcttccggctacacctttaccagctactacatgcactgggtccgacaggcccctggacaaggacttgagtggatgggcatcatcaaccctagcggcggcagcacaagctacgcccagaaattccagggcagagtgaccatgacacacgacaccagcacctccaccgtgtacatggaactgagcagcctgagaagcgaggacaccgccgtgtactactgcgccagatccttcttcaccggcttccacctggattactggggccagggaacactggtcacagtgtcatctgcatctggcggaggcggaagtggaggcggaggatctggcggcggaggctctgaaattgtgctgacacagagccccggcacactgtcactttctccaggcgaaagagccacactgagctgtagagccagccagagcgtgtccagctcttacctggcttggtatcagcagaagcccggccaggctcctagactgctgatctacggtgccagcagcagagccacaggcatccccgatagattttctggcagcggctccggcaccgacttcaccctgacaatcagcagactggaacccgaggactttgccgtgtattattgccagcagtacaccaacgagcactactacaccttcggccagggcaccaaggtggaaatcaagagaacagtggccgccacgcgtggaggcggatctatggaccctgatctcgaaattgaggccgcctttctggaacgcgagaacactgccctggaaaccagggtcgcagagctgagacagagagtgcagagactgcggaacagagtgtctcagtaccgcaccagatatggcccactcggcggaggtaaa

SEQ ID NO: 1509 - DNA, 1002 bp, Artificial Sequence
  Synthetic Polynucloetide
atggccttaccagtgaccgccttgctcctgccgctggccttgctgctccacgccgccaggccggagatcgtgctgacacagtctcccgccacactgtcactgtctccaggcgaaagagccacactgagctgtagcgtgtccagcagcatcagcagcagcaacctgcactggtatcagcagaagcctggacaggcccctcggctgctgatctacggcacatctaatctggcctctggcatccccgccagattttctggctctggaagcggcaccgacttcaccctgaccataagcagcctggaacctgaggacttcgccgtgtactactgccagcagtggtccagctatccccacacatttggcggaggcaccaaggtggaaatcaagagaacagtggctgccggcggaggcggaagtggaggcggaggatctggcggcggaggctctcaggttcagctggttcagagcggagccgaagtgaagaaacctggggcctctgtgaaggtgtcctgcaaggcttccggctacacctttaccaactacctgatcgagtgggtccgacaggctccaggacaaggactggaatggatgggcctgattaaccctggcagcggcggcaccaactacaacgagaagttcaagggcagagtgaccatgaccaccgacaccagcacaagcaccgcctacatggaactgcggagcctgagaagcgacgacaccgccgtgtattattgcgccagaagaagccctctcggctcttggatctactacgcctatgacggcgtggcctattggggccagggaacactggttacagtgtcctctgccagcacgcgtggaggcggatctatggaccctgatctcgaaattgaggccgcctttctggaacgcgagaacactgccctggaaaccagggtcgcagagctgagacagagagtgcagagactgcggaacagagtgtctcagtaccgcaccagatatggcccactcggcggaggtaaa

SEQ ID NO: 1510 - DNA, 957 bp, Artificial Sequence
  Synthetic Polynucloetide
atggccttaccagtgaccgccttgctcctgccgctggccttgctgctccacgccgccaggccggacatccagatgacacagagccctagcagcctgtctgccagcgtgggagacagagtgaccatcacctgtaaagccggccagaacgtgggcacaagcgtggcatggtatcagcagaagcctggcaaggcccctaagctgctgatctacagcgccagctacagatacagcggcgtgcccagcagattttctggcagcggctctggcaccgacttcaccctgacaatatccagcctccagcctgaggacttcgccacctactactgccagcagtacatcacatacccctacaccttcggccagggcaccaaggtggaaatcaagagaacagtggctgccggcggaggcggaagtggaggcggaggatctggcggcggaggctctgaagttcagctggttgaatcaggcggcggactggttcaacctggcggatctctgagactgagctgtgccgccagcggcttcaccttcagcagatactggatgagctgggtccgacaggcccctggcaaaggacttgaatgggtcgccgagatcaaccccgacagcagcaccatccagtacaccccatctctgaaggcccggttcaccctgtccgtggacagaagcaagaacaccctgtacctccagatgaactccctgagagccgaggacaccgccgtgtactattgtgccagacctgcctattggggccagggaacactggtcacagtgtctagcgcttccacgcgtggaggcggatctatggaccctgatctcgaaattgaggccgcctttctggaacgcgagaacactgccctggaaaccagggtcgcagagctgagacagagagtgcagagactgcggaacagagtgtctcagtaccgcaccagatatggcccactcggcggaggtaaa

SEQ ID NO: 1511 - DNA, 978 bp, Artificial Sequence
  Synthetic Polynucloetide
atggccttaccagtgaccgccttgctcctgccgctggccttgctgctccacgccgccaggccggacatccagatgacacagagccctagcagcctgtctgccagcgtgggagacagagtgaccatcacatgtagcgccagccaggacatcggcaactttctgaactggtatcagcagaagcccggcaaggcccctaagctgctgatctactacacctccagcctgtacagcggcgtgcccagcagattttctggcagcggctctggcaccgacttcaccctgacaatatccagcctccagccagaggacttcgccacctactactgccagcagtacagcaagctgcccctgacctttggacagggcaccaagctggaaatcaagagaacagtggctgccggcggaggcggaagtggaggcggaggatctggcggcggaggctctcaagttcagctggttcagtctggggccgaagtgaagaaacctggggcctctgtgaaggtgtcctgcaaggcttccggctacacctttaccggctacaacatccactgggtccgacaggctcccggccaaagacttgaatggatgggcgctatctaccccggcaacggcgataccagctacaagcagaaattccggggcagagtgacaattaccagagacaccagcgccagcaccgcctacatggaactgtctagcctgagaagcgaggacaccgccgtgtactattgcgccagaggcgaaacagccagagccacctttgcctattggggccagggaaccctggtcacagtgtctagtgcttccacgcgtggaggcggatctatggaccctgatctcgaaattgaggccgcctttctggaacgcgagaacactgccctggaaaccagggtcgcagagctgagacagagagtgcagagactgcggaacagagtgtctcagtaccgcaccagatatggcccactcggcggaggtaaa

SEQ ID NO: 1512 - DNA, 570 bp, Artificial Sequence
  Synthetic Polynucloetide
atggccttaccagtgaccgccttgctcctgccgctggccttgctgctccacgccgccaggccggatgtgcaagtgacacagagccctagcagcctgtctgcctctgtgggcgacagagtgacaatcacctgtcggagcagccagagcctggctaactcctacggcaataccttcctgagctggtatctgcacaagcccggaaaggctccccagctgctgatctacggcatcagcaacagattcagcggcgtgcccgataggtttagcggctctggaagcggcaccgacttcaccctgacaatatccagcctccagcctgaggactttgccacctactactgtctgcaaggcacccaccagccttacacattcggacagggcaccaaggtggaaatcaagacgcgtggaggcggatctatggaccctgatctcgaaattgaggccgcctttctggaacgcgagaacactgccctggaaaccagggtcgcagagctgagacagagagtgcagagactgcggaacagagtgtctcagtaccgcaccagatatggcccactcggcggaggtaaa

SEQ ID NO: 1513 - DNA, 555 bp, Artificial Sequence
  Synthetic Polynucloetide
atggccttaccagtgaccgccttgctcctgccgctggccttgctgctccacgccgccaggccggacatccagatgacacagagccctagcagcctgtctgccagcgtgggagacagagtgaccatcacctgtagagccagccaggacatcagcaactacctgaactggtatcagcagaaacccggcaaggccgtgaagctgctgatctactacaccagcatcctgcacagcggcgtgcccagcagattttctggctctggcagcggcaccgactacaccctgacaatatctagcctccagcctgaggacttcgctacctacttctgccagcaaggcaacaccctgccttggacatttggcggaggcaccaaggtggaaatcaaaacgcgtggaggcggatctatggaccctgatctcgaaattgaggccgcctttctggaacgcgagaacactgccctggaaaccagggtcgcagagctgagacagagagtgcagagactgcggaacagagtgtctcagtaccgcaccagatatggcccactcggcggaggtaaa

SEQ ID NO: 1514 - DNA, 558 bp, Artificial Sequence
  Synthetic Polynucloetide
atggccttaccagtgaccgccttgctcctgccgctggccttgctgctccacgccgccaggccggacatcgtgatgacccagagccagcggttcatgaccacaagcgtgggcgatagagtgtccgtgacatgcaaggccagccagagcgtggactctaacgtggcctggtatcagcagaagcccagacagagccccaaggctctgatctttagcgccagcctgagattcagcggagtgcccgctagattcacaggcagcggctctggcaccgatttcaccctgaccatcagcaacctccagagcgaggacctggccgagtatttctgccagcagtacaacaactaccctctgaccttcggagccggcaccaagctggaactgaagagaacgcgtggaggcggatctatggaccctgatctcgaaattgaggccgcctttctggaacgcgagaacactgccctggaaaccagggtcgcagagctgagacagagagtgcagagactgcggaacagagtgtctcagtaccgcaccagatatggcccactcggcggaggtaaa

SEQ ID NO: 1515 - DNA, 558 bp, Artificial Sequence
  Synthetic Polynucloetide
atggccttaccagtgaccgccttgctcctgccgctggccttgctgctccacgccgccaggccggacatccagatgacacagagccctagcagcctgtctgccagcgtgggagacagagtgaccatcacctgtagagccagccaggacatcagcaactacctgaactggtatcagcagaagcccggcaaggcccctaagctgctgatctactacaccagcatcctgcacagcggcgtgcccagcagattttctggctctggcagcggcaccgacttcaccctgacaatatctagcctccagcctgaggacttcgccacctactattgccagcagggcaacaccctgccttggacctttggacagggcaccaaggtggaaatcaagagaacgcgtggaggcggatctatggaccctgatctcgaaattgaggccgcctttctggaacgcgagaacactgccctggaaaccagggtcgcagagctgagacagagagtgcagagactgcggaacagagtgtctcagtaccgcaccagatatggcccactcggcggaggtaaa

SEQ ID NO: 1516 - DNA, 558 bp, Artificial Sequence
  Synthetic Polynucloetide
atggccttaccagtgaccgccttgctcctgccgctggccttgctgctccacgccgccaggccggacatccagatgacacagagccctagcagcctgtctgccagcgtgggagacagagtgaccatcacatgcaaggccagcgaccacatcaacaactggctggcctggtatcagcagaagcctggcaaggcccctaagctgctgatctacggcgctaccacactggaaacaggcgtgcccagcagattttctggcagcggctctggcaccgacttcaccctgacaatatccagcctccagcctgaggacttcgccacctactactgtcagcagagctggaacaccccttggacattcggccagggcaccaaggtggaaatcaagagaacgcgtggaggcggatctatggaccctgatctcgaaattgaggccgcctttctggaacgcgagaacactgccctggaaaccagggtcgcagagctgagacagagagtgcagagactgcggaacagagtgtctcagtaccgcaccagatatggcccactcggcggaggtaaa

SEQ ID NO: 1517 - DNA, 558 bp, Artificial Sequence
  Synthetic Polynucloetide
atggccttaccagtgaccgccttgctcctgccgctggccttgctgctccacgccgccaggccgagctacgtgctgacacagcctccatccgtgtctgtggctccaggacagaccgccagaatcacatgcggcggcaacaacatcggcagcaagagcgtgcactggtatcagcagccacctggacaggctccagtggtggtggtgtacgacgacagcgatagacctagcggcatccccgagagattcagcggcagcaattccggcaataccgccacactgaccatcagcagagtggaagctggcgacgaggccgtgtactactgccaagtgtgggacagcagcagcgatcacgtggtgtttggcggcggaacaaagctgacagtgcttacgcgtggaggcggatctatggaccctgatctcgaaattgaggccgcctttctggaacgcgagaacactgccctggaaaccagggtcgcagagctgagacagagagtgcagagactgcggaacagagtgtctcagtaccgcaccagatatggcccactcggcggaggtaaa

SEQ ID NO: 1518 - DNA, 558 bp, Artificial Sequence
  Synthetic Polynucloetide
atggccttaccagtgaccgccttgctcctgccgctggccttgctgctccacgccgccaggccggacatccagatgacacagagccctagcagcctgtctgccagcgtgggagacagagtgaccatcacctgtatggcctccgaggacatctacatccggctggcctggtatcagcagaagcctggaaaggcccctaagctgctgatctacgccgccacctctctggaaacaggcgtgccaagcagattttccggcagcggctctggcaccgatttcaccctgaccataagcagcctgcagcctgaggacttcgccacctactactgccagcagtattggagcagcccctggacctttggacagggcaccaaggtggaaatcaagagaacgcgtggaggcggatctatggaccctgatctcgaaattgaggccgcctttctggaacgcgagaacactgccctggaaaccagggtcgcagagctgagacagagagtgcagagactgcggaacagagtgtctcagtaccgcaccagatatggcccactcggcggaggtaaa

SEQ ID NO: 1519 - DNA, 570 bp, Artificial Sequence
  Synthetic Polynucloetide
atggccttaccagtgaccgccttgctcctgccgctggccttgctgctccacgccgccaggccggacatccagatgacacagagccctagcagcgtgtccgcctctgtgggagacagagtgaccatcacctgtagagccagcgagagcgtggacaactacggcatcagcttcatgaactggtatcagcagaagcccggcaaggcccctaagctgctgattagcgccgccagcaatagagccacaggcgtgccaagcagattttccggctctggcagcggcaccgatttcaccctgacaatatccagcctccagcctgaggacttcgccatctactactgccagcagagcaaagaggtgccctggacctttggacagggcaccaaggtggaaatcaagagaacgcgtggaggcggatctatggaccctgatctcgaaattgaggccgcctttctggaacgcgagaacactgccctggaaaccagggtcgcagagctgagacagagagtgcagagactgcggaacagagtgtctcagtaccgcaccagatatggcccactcggcggaggtaaa

SEQ ID NO: 1520 - DNA, 570 bp, Artificial Sequence
  Synthetic Polynucloetide
atggccttaccagtgaccgccttgctcctgccgctggccttgctgctccacgccgccaggccggacatccagctgacacagagcccttctagcctgtctgccagcgtgggcgacagagtgaccatcacatgtagagccagcaagagcgtgtccaccagcggctacagctacatgcactggtatcagcagaagcccggcaaggcccctaagctgctgatctacctggtgtccaacctggaaagcggcgtgcccagcagattttctggcagcggctctggcaccgacttcaccctgacaatatccagcctccagcctgaggacttcgccacctactactgccagcagttcagcgagctgccttggacctttggacagggcaccaaggtggaaatcaagagaacgcgtggaggcggatctatggaccctgatctcgaaattgaggccgcctttctggaacgcgagaacactgccctggaaaccagggtcgcagagctgagacagagagtgcagagactgcggaacagagtgtctcagtaccgcaccagatatggcccactcggcggaggtaaa

SEQ ID NO: 1521 - DNA, 561 bp, Artificial Sequence
  Synthetic Polynucloetide
atggccttaccagtgaccgccttgctcctgccgctggccttgctgctccacgccgccaggccggacatccagatgacacagagccctagcagcgtgtccgcctctgtgggagacagagtgaccatcacctgtcgggccagccagttcatcagcagcagctacctgagctggtatcagcagaagcctggcaaggcccctaagctgctgatctctggcagctctagcagagccacaggcgtgccaagcagattttctggcagcggctctggcaccgacttcaccctgacaatatccagcctccagcctgaggacttcgccatctactactgccagcagctgtactctagccccatgacattcggccagggcaccaaggtggaaatcaagagaacgcgtggaggcggatctatggaccctgatctcgaaattgaggccgcctttctggaacgcgagaacactgccctggaaaccagggtcgcagagctgagacagagagtgcagagactgcggaacagagtgtctcagtaccgcaccagatatggcccactcggcggaggtaaa

SEQ ID NO: 1522 - DNA, 603 bp, Artificial Sequence
  Synthetic Polynucloetide
atggccttaccagtgaccgccttgctcctgccgctggccttgctgctccacgccgccaggccgcaggtccagctcgtcgagtccggcggcggcctcgtccaggccggcgactccgtcaccctctcctgcaccgcctccggccgcaccttctcctcctacgccctcgcctggttccgccagcgccccggcaaggagcgcgagttcgtcgccggcctccgctggggcggccccaccaactacgccgactccgtcaaggaccgcttcaccatctccggcgactccgccaagcacaccatgtacctccagatgaactccctcaagcccgaggacaccgccgtctactactgcggctacaaccccggcggctgggccgtcccctcccagtacgagtacgactcctggggccagggcacccaggtcaccgtctcctccacgcgtggaggcggatctatggaccctgatctcgaaattgaggccgcctttctggaacgcgagaacactgccctggaaaccagggtcgcagagctgagacagagagtgcagagactgcggaacagagtgtctcagtaccgcaccagatatggcccactcggcggaggtaaa

SEQ ID NO: 1523 - DNA, 588 bp, Artificial Sequence
  Synthetic Polynucloetide
atggccttaccagtgaccgccttgctcctgccgctggccttgctgctccacgccgccaggccgcaggttcagctgcaagagtctggcggaggacttgctcaagctggcggaagcctgagactgtcttgtgccgcctctggcagaaccttcagcatgggctggtttagacaggcccctggcaaagagagagagttcgtcgccgccatcacatacagcggcggcagcccttactacgcctcttctgtcagaggccggttcaccatcagccgggacaacgccaagaacaccgtgtacctccagatgaacagcctgaagccagaggacaccgccgtgtactactgtgccgccaatccaacctacggcagcgactggaatgccgagaattggggccagggcacccaagtgacagtgtctagtacgcgtggaggcggatctatggaccctgatctcgaaattgaggccgcctttctggaacgcgagaacactgccctggaaaccagggtcgcagagctgagacagagagtgcagagactgcggaacagagtgtctcagtaccgcaccagatatggcccactcggcggaggtaaa

SEQ ID NO: 1524 - DNA, 582 bp, Artificial Sequence
  Synthetic Polynucloetide
atggccttaccagtgaccgccttgctcctgccgctggccttgctgctccacgccgccaggccggaagtgcagctggttgaatctggcggaggactggttcagcctggcggatctctgagactgtcttgtgccgccagcggcttcagcttcagcgacttttggatgagctgggtccgacaggcccctggcaaaggacttgaatgggtcgccacaatcagccaggccggcagcgagaaggactacgtggactctgtgaagggcagattcaccatcagccgggacaacgccaagaagtccctgtacctccagatgaacagcctgagagccgaggacaccgccgtgtactattgtgcctctggcgtgtacagcttcgactacagaggccagggcaccctggtcacagtctcttctacgcgtggaggcggatctatggaccctgatctcgaaattgaggccgcctttctggaacgcgagaacactgccctggaaaccagggtcgcagagctgagacagagagtgcagagactgcggaacagagtgtctcagtaccgcaccagatatggcccactcggcggaggtaaa

SEQ ID NO: 1525 - DNA, 582 bp, Artificial Sequence
  Synthetic Polynucloetide
atggccttaccagtgaccgccttgctcctgccgctggccttgctgctccacgccgccaggccggaagtgcagctggttgaatctggcggaggactggttcagcctggcggatctctgagactgtcttgtgccgccagcggcttcaccttcagcaactactggatgagctgggtccgacaggcccctggaaagggacaagaatgggtcgccaccatcaaccaggacggcagcgacaaggattacgtggacagcgtgaagggcagattcaccatcagccgggacaacgccaagaagtccctgtacctccagatgaacagcctgagagccgaggacaccgccgtgtactattgtgcctctggcgtgtacagcttcgactacagaggccagggcaccctggtcacagtctcttctacgcgtggaggcggatctatggaccctgatctcgaaattgaggccgcctttctggaacgcgagaacactgccctggaaaccagggtcgcagagctgagacagagagtgcagagactgcggaacagagtgtctcagtaccgcaccagatatggcccactcggcggaggtaaa

SEQ ID NO: 1526 - DNA, 582 bp, Artificial Sequence
  Synthetic Polynucloetide
atggccttaccagtgaccgccttgctcctgccgctggccttgctgctccacgccgccaggccggaagtgcagctggttgaatctggcggaggactggttcagcctggcggatctctgagactgtcttgtgccgccagcggcatcgacttcagcagatactggatgagctgggtccgacaggcccctggcaaaggacttgaatgggtcgccacaatcagccaggccggcagcgagaaggactacgtggactctgtgaagggcagattcaccatcagccgggacaacgccaagaagtccctgtacctccagatgaacagcctgagagccgaggacaccgccgtgtactattgtgcctctggcgtgtacagcttcgactacagaggccagggcaccctggtcacagtctcttctacgcgtggaggcggatctatggaccctgatctcgaaattgaggccgcctttctggaacgcgagaacactgccctggaaaccagggtcgcagagctgagacagagagtgcagagactgcggaacagagtgtctcagtaccgcaccagatatggcccactcggcggaggtaaa

SEQ ID NO: 1527 - DNA, 582 bp, Artificial Sequence
  Synthetic Polynucloetide
atggccttaccagtgaccgccttgctcctgccgctggccttgctgctccacgccgccaggccggaagtgcagctggttgaatctggcggaggactggttcagcctggcggatctctgagactgtcttgtgccgccagcggcatcgacttcagcagatactggatgagctgggtccgacaggcccctggaaagggacaagaatgggtcgccaccatcaaccaggacggcagcgacaaggattacgtggacagcgtgaagggcagattcaccatcagccgggacaacgccaagaagtccctgtacctccagatgaacagcctgagagccgaggacaccgccgtgtactattgtgcctctggcgtgtacagcttcgactacagaggccagggcaccctggtcacagtctcttctacgcgtggaggcggatctatggaccctgatctcgaaattgaggccgcctttctggaacgcgagaacactgccctggaaaccagggtcgcagagctgagacagagagtgcagagactgcggaacagagtgtctcagtaccgcaccagatatggcccactcggcggaggtaaa

SEQ ID NO: 1528 - DNA, 594 bp, Artificial Sequence
  Synthetic Polynucloetide
atggccttaccagtgaccgccttgctcctgccgctggccttgctgctccacgccgccaggccggaggtgcagctggttgaatctggcggaggactggttcagcctggcggatctctgagactgtcctgcacattttccggcggcaccttcagcagctacacaatgggctggttcagacaggcccctggcaaagaacgggaatttgtggccgaagtccgatggggcggagtgaccacatacagcaacagcctgaaggacagattcagcatcagcgaggacagcgtgaagaacgccgtgtacctccagatgaactccctgaagcctgaggacacagccgtgtactattgtgccgctgtgcggcagatgtacatgaccgtggtgcctgattattggggccagggcacactggtcacagtgtctagcacgcgtggaggcggatctatggaccctgatctcgaaattgaggccgcctttctggaacgcgagaacactgccctggaaaccagggtcgcagagctgagacagagagtgcagagactgcggaacagagtgtctcagtaccgcaccagatatggcccactcggcggaggtaaa

SEQ ID NO: 1529 - DNA, 588 bp, Artificial Sequence
  Synthetic Polynucloetide
atggccttaccagtgaccgccttgctcctgccgctggccttgctgctccacgccgccaggccggaagtgcagctggttgaatctggcggaggactggttcaggctggcggatctctgagactgtcttgtgccgccagcggcagaacctttagcatgggctggtttagacaggcccctggcaaagagagagagttcgtcgccgccatcacatactctggcggcagcccttactacgccgactctgtgaagggcagattcaccatcagccgggacaacgccaagaacaccgtgtacctccagatgaacagcctgaagcctgaggacaccgccgtgtactactgcgccgccaatccaacatacggcagcgactggaacgccgagaattggggccagggaacccaagtgacagtgtctagcacgcgtggaggcggatctatggaccctgatctcgaaattgaggccgcctttctggaacgcgagaacactgccctggaaaccagggtcgcagagctgagacagagagtgcagagactgcggaacagagtgtctcagtaccgcaccagatatggcccactcggcggaggtaaa

SEQ ID NO: 1530 - DNA, 588 bp, Artificial Sequence
  Synthetic Polynucloetide
atggccttaccagtgaccgccttgctcctgccgctggccttgctgctccacgccgccaggccgcagctccagttgcaagagagcggccctggcttggtaaaaccttccgagacccttagcctcacatgcacggttagtgggggcagcatttcctcaggtgattactattggggatggattcggcaacccccgggtaaaggattggagtggattggtcatatttattatagtggagcgacgtactacaacccaagtctcaaatccagggttacaatatccgtcgatacgagcaggaaccaattcagcttgaaactttctagtgtcaccgcagcagacacagccgtctattactgtacgcgggatgactccagtaattggcggtcccgagggcaagggacactggtcacggtctcctcaacgcgtggaggcggatctatggaccctgatctcgaaattgaggccgcctttctggaacgcgagaacactgccctggaaaccagggtcgcagagctgagacagagagtgcagagactgcggaacagagtgtctcagtaccgcaccagatatggcccactcggcggaggtaaa

SEQ ID NO: 1531 - DNA, 588 bp, Artificial Sequence
  Synthetic Polynucloetide
atggccttaccagtgaccgccttgctcctgccgctggccttgctgctccacgccgccaggccgcagctccagctgcaagagtctggacctggcctggtcaagcctagcgagacactgagcctgacctgtaccgtgtccggcgatagcatcagcagcggcgattactactggggctggatcagacagcctcctggcaaaggactggaatggatcggccacatctactacagcggcgtgacctactacaaccccagcctgaagtccagagtgaccatcagcgtggacaccagccggaaccagttctccctgaagctgtctagcgtgacagccgccgataccgccgtgtactactgcaccagagaggacagcagcaactggcggagtagaggccagggaacactggtcacagttagctctacgcgtggaggcggatctatggaccctgatctcgaaattgaggccgcctttctggaacgcgagaacactgccctggaaaccagggtcgcagagctgagacagagagtgcagagactgcggaacagagtgtctcagtaccgcaccagatatggcccactcggcggaggtaaa

SEQ ID NO: 1532 - DNA, 588 bp, Artificial Sequence
  Synthetic Polynucloetide
atggccttaccagtgaccgccttgctcctgccgctggccttgctgctccacgccgccaggccgcaactgcaactgcaagagtctggccctggcctggtcaagccttctgaaaccctgagcctgacctgtaccgtgtccggcggctctatcagcagcggcgattactactggggctggatcagacagcctccaggcaagggactcgaatggatcggcagcatcagctacagcggctccacctactacaacccaagcctgaagtccagagtgaccatcagcgtggacaccagcagaaaccagttctccctgaagctgagcagcgtgacagccgccgatacagccgtgtattattgcaccagagaggacagcagcaactggcggagtagaggacagggcacactggtcacagtgtcctctacgcgtggaggcggatctatggaccctgatctcgaaattgaggccgcctttctggaacgcgagaacactgccctggaaaccagggtcgcagagctgagacagagagtgcagagactgcggaacagagtgtctcagtaccgcaccagatatggcccactcggcggaggtaaa

SEQ ID NO: 1533 - DNA, 606 bp, Artificial Sequence
  Synthetic Polynucloetide
atggccttaccagtgaccgccttgctcctgccgctggccttgctgctccacgccgccaggccgcagctgcaactgcaagagtctggccccggactggtcaagccttctgaaacactggccctgacctgcaatgtgtccggcggctctatcagcagcagctcctattactggggctggatcagacagcctccaggcaagagactggaatggatcggcagcatctactacagcggcagcacatacttcaaccccagcctgaagtccagagtgaccatcagcgtggacacctccaagaaccagttctccctgaagctgagcagcgtgacagccgccgatacagccgtgtattactgtgctggcggcgactactatggccccgttggacaatggcccagcgattacagaggacagggaacccttgtgaccgtgtcctctacgcgtggaggcggatctatggaccctgatctcgaaattgaggccgcctttctggaacgcgagaacactgccctggaaaccagggtcgcagagctgagacagagagtgcagagactgcggaacagagtgtctcagtaccgcaccagatatggcccactcggcggaggtaaa

SEQ ID NO: 1534 - DNA, 624 bp, Artificial Sequence
  Synthetic Polynucloetide
atggccttaccagtgaccgccttgctcctgccgctggccttgctgctccacgccgccaggccggaagttcagctgcttgagtctggcggaggactggttcaacctggcggaagcctgagactgtcttgtgccgccagcggcttcatcttcagcagctacgccatgagctgggtccgacaggctcctggaaagggccaagaatgggtttccggcgttagcggcacaggcgtgaacacctactacgccgatagcgtgaagggcagattcaccatcagccgggacaacagcaagaacaccctgtacctccagatgaacagcctgagagccgaggacaccgccgtgtactattgtgcctctggcaaaggctgggacagcggctcttggtacgaggactatagaggccagggcaccctggtcacagtttcttcaacgcgtcctcgactgtgccttctaacgcgtggaggcggatctatggaccctgatctcgaaattgaggccgcctttctggaacgcgagaacactgccctggaaaccagggtcgcagagctgagacagagagtgcagagactgcggaacagagtgtctcagtaccgcaccagatatggcccactcggcggaggtaaa

SEQ ID NO: 1535 - DNA, 606 bp, Artificial Sequence
  Synthetic Polynucloetide
atggccttaccagtgaccgccttgctcctgccgctggccttgctgctccacgccgccaggccgcagctccagctgcaagagtctggacctggcctggtcaagcctagcgagacactgagcctgacctgtacagttagcggcggctctgtgtccagcagcagctattactggggctggatcagacagcctcctggcaagagactggaactgatcggcagcatctactacggcggctccacctacttcaaccccagcctgaaaagcagagtgaccatcagcgtggacaccagcaagaaccagttcagcctgaagctgagcagcgtgacagccgccgatacagccgtgtactattgtgccggcggagacacatacggccctgttggacaatggcccagcgactatagaggccagggcacactggtcacagtgtctagcacgcgtggaggcggatctatggaccctgatctcgaaattgaggccgcctttctggaacgcgagaacactgccctggaaaccagggtcgcagagctgagacagagagtgcagagactgcggaacagagtgtctcagtaccgcaccagatatggcccactcggcggaggtaaa

SEQ ID NO: 1536 - DNA, 600 bp, Artificial Sequence
  Synthetic Polynucloetide
atggccttaccagtgaccgccttgctcctgccgctggccttgctgctccacgccgccaggccggaagttcagctgcttgaaagcggtggcggcctggttcaacctggcggatctctgagactgagctgtgccgccagcggcttcatcttctccatctacgccatgtcctgggtccgacaggcccctggaaaaggactggaatgggtgtccggcatctctggcagcggcgtgaacacctactacgccgattctgtgaagggccgcttcatcatcagccgggacaacagcagaaacaccgtgtacctccagatgaacagcctgagagccgatgacaccgccgtgtaccactgcgccaatggcaaaggctgggacggcaacacttggtacgaggattacagaggacagggaaccctcgtgaccgtgtctagtacgcgtggaggcggatctatggaccctgatctcgaaattgaggccgcctttctggaacgcgagaacactgccctggaaaccagggtcgcagagctgagacagagagtgcagagactgcggaacagagtgtctcagtaccgcaccagatatggcccactcggcggaggtaaa

SEQ ID NO: 1537 - DNA, 585 bp, Artificial Sequence
  Synthetic Polynucloetide
atggccttaccagtgaccgccttgctcctgccgctggccttgctgctccacgccgccaggccggaagtgcaggttttggagtctggcggaggactggttcagcctggcggatctctgagactgtcttgtgccgccagcggcttcaccttcagcaactttgccatgagctgggtccgacaggcccctggcaaaggacttgaatgggtgtccacaatcagcggcagcgccggcacaacagattacgccgattctgtgaagggcagattcaccatcagccgggacaacagcaagaaaaccctgtacctccagatgaacagcctgcgcgtggaagataccgccgtgtactactgtgccgatggcagaggccccttcttcgattatcgcggccagggcacactggtcaccgtttcttctacgcgtggaggcggatctatggaccctgatctcgaaattgaggccgcctttctggaacgcgagaacactgccctggaaaccagggtcgcagagctgagacagagagtgcagagactgcggaacagagtgtctcagtaccgcaccagatatggcccactcggcggaggtaaa

SEQ ID NO: 1538 - DNA, 591 bp, Artificial Sequence
  Synthetic Polynucloetide
atggccttaccagtgaccgccttgctcctgccgctggccttgctgctccacgccgccaggccggaggtgcagctggttgaatctggcggaggactggttcagcctggcggatctctgagactgtcttgtgccgccagcggcttcaacatcaaggatacctgtatcggctgggttcgcagagcccctggcaaagaggaagaactggtcgccaaaatctgcaagtacagcggccacaccagatacgccgacagcgtgaagggcagattcaccatcagcgccgacaccagcaagaacaccgcctacctccagatgaacagcctgagagccgaggacaccgccgtgtactattgtgccgctgtgtccgtcagagatgggcactacaattactggggccagggcaccaccgtgaccgtttcttcaacgcgtggaggcggatctatggaccctgatctcgaaattgaggccgcctttctggaacgcgagaacactgccctggaaaccagggtcgcagagctgagacagagagtgcagagactgcggaacagagtgtctcagtaccgcaccagatatggcccactcggcggaggtaaa

SEQ ID NO: 1539 - DNA, 591 bp, Artificial Sequence
  Synthetic Polynucloetide
atggccttaccagtgaccgccttgctcctgccgctggccttgctgctccacgccgccaggccggaagtgcaactggtggaaagcggaggcggacttgttcaaccaggcggaagcctgagactgagctgtgccgcttccggctttaatatcaaagacacatgcatcggatgggttcgccgcgctccagggaaagaagaggaactggttgccgacatctgtccctacaagggcagcacaagatatgccgactccgtgaaaggccggtttaccatctctgccgacacctctaagaatacggcctatctgcaaatgaactctctgcgggccgaagatacagccgtgtattactgcgccatcgtgtctgccagagatggctactataactattggggacagggaaccacagtcacagtgtcctctacgcgtggaggcggatctatggaccctgatctcgaaattgaggccgcctttctggaacgcgagaacactgccctggaaaccagggtcgcagagctgagacagagagtgcagagactgcggaacagagtgtctcagtaccgcaccagatatggcccactcggcggaggtaaa

SEQ ID NO: 1540 - DNA, 591 bp, Artificial Sequence
  Synthetic Polynucloetide
atggccttaccagtgaccgccttgctcctgccgctggccttgctgctccacgccgccaggccggaagtgcagctgcttgagtctggcggaggactggttcaacctggcggaagcctgagactgtcttgtgccgccagcggcttcacctttagcagctacgccatgagctgggtccgacaggctcctggcaaaggactggaatgggtgtccgccatcacaggctctggcggcagcacatattacgccgactctgtgaagggcagattcaccatcagccgggacaacagcaagaacaccctgtacctccagatgaacagcctgagagccgaggacaccgccgtgtactactgtgccaaggatgaggatggcggctctctgctgggacacagaggacagggaacactggtcaccgtgtctagcacgcgtggaggcggatctatggaccctgatctcgaaattgaggccgcctttctggaacgcgagaacactgccctggaaaccagggtcgcagagctgagacagagagtgcagagactgcggaacagagtgtctcagtaccgcaccagatatggcccactcggcggaggtaaa

SEQ ID NO: 1541 - DNA, 591 bp, Artificial Sequence
  Synthetic Polynucloetide
atggccttaccagtgaccgccttgctcctgccgctggccttgctgctccacgccgccaggccggaagtgcagctgcttgagtctggcggcggactgattcaacctggcggaagcctgagactgagctgtgccgcttccggcttcacctttagcagccacgccatgacctgggtccgacaggctcctggaaaaggactggaatgggtgtccgccatcagcagcggcggcagctacacatattacgccgacagcgtgaagggcagattcaccatctccagagacaacagcaagaacaccctgtacctccagatgaacagcctgagagccgaggacaccgccgtgtactactgtgccaaggatgaggatggcggctctctgctgggacacagaggacagggaacactggtcaccgtgtctagcacgcgtggaggcggatctatggaccctgatctcgaaattgaggccgcctttctggaacgcgagaacactgccctggaaaccagggtcgcagagctgagacagagagtgcagagactgcggaacagagtgtctcagtaccgcaccagatatggcccactcggcggaggtaaa

SEQ ID NO: 1542 - DNA, 591 bp, Artificial Sequence
  Synthetic Polynucloetide
atggccttaccagtgaccgccttgctcctgccgctggccttgctgctccacgccgccaggccggaagtgcagctggttgaatctggcggaggactggttcagcctggcggatctctgagactgtcttgtgccgccagcggcttcagcttcagcgacttttggatgagctgggtccgacaggcccctggcaaaggacttgaatgggtgtccgccatcagcggcagcggcgattatacacactacgccgacagcgtgaagggcagattcaccatcagccgggacaacagcaagaacaccgtgtacctccagatgaacagcctgagagccgaggacagcgccgtgtactactgtgccaaggatgaggatggcggctctctgctgggacacagaggacagggaacactggtcaccgtgtctagcacgcgtggaggcggatctatggaccctgatctcgaaattgaggccgcctttctggaacgcgagaacactgccctggaaaccagggtcgcagagctgagacagagagtgcagagactgcggaacagagtgtctcagtaccgcaccagatatggcccactcggcggaggtaaa

SEQ ID NO: 1543 - DNA, 597 bp, Artificial Sequence
  Synthetic Polynucloetide
atggccttaccagtgaccgccttgctcctgccgctggccttgctgctccacgccgccaggccggaagtgcagctgcttgagtctggcggaggactggttcaacctggcggaagcctgagactgtcttgtgccgcctctggcttcgccttcagcatctacgatatgagctgggtccgacaggcccctggcaaaggacttgaatgggtgtccagcatcagcggcagcggcgactacatctactacgccgatagcgtgaagggcagattcaccatcagccgggacatcagcaagaacaccctgtacctccagatgaacagcctgagagccgaggacaccgccgtgtactactgtgccaaagaaggcaccggcgctaacagcagcctggccgattatagaggccagggcacactggtcaccgtgtctagtacgcgtggaggcggatctatggaccctgatctcgaaattgaggccgcctttctggaacgcgagaacactgccctggaaaccagggtcgcagagctgagacagagagtgcagagactgcggaacagagtgtctcagtaccgcaccagatatggcccactcggcggaggtaaa

SEQ ID NO: 1544 - DNA, 597 bp, Artificial Sequence
  Synthetic Polynucloetide
atggccttaccagtgaccgccttgctcctgccgctggccttgctgctccacgccgccaggccggaggttcagctgcttgagtctggcggaggactggttcaacctggcggaagcctgagactgtcttgtgccgccagcggcttcacctttagcagctacgccatgagctgggtccgacaggctcctggcaaaggactggaatgggtgtccagcatcagcggcagcggcgactacatctactacgccgatagcgtgaagggcagattcaccatcagccgggacatcagcaagaacaccctgtacctccagatgaacagcctgagagccgaggacaccgccgtgtactactgtgccaaagaaggcaccggcgctaacagcagcctggccgattatagaggccagggcacactggtcaccgtgtctagtacgcgtggaggcggatctatggaccctgatctcgaaattgaggccgcctttctggaacgcgagaacactgccctggaaaccagggtcgcagagctgagacagagagtgcagagactgcggaacagagtgtctcagtaccgcaccagatatggcccactcggcggaggtaaa

SEQ ID NO: 1545 - DNA, 588 bp, Artificial Sequence
  Synthetic Polynucloetide
atggccttaccagtgaccgccttgctcctgccgctggccttgctgctccacgccgccaggccgcaggtgcagctggttgaatctggcggaggactggttcagcctggcggatctctgagactgtcttgtgccgccagcggcttcaccttcaccaatcacgccatgagctgggtccgacaggcccctggaaaaggactggaactggtgtctagcatcagcggcaacggcagaaccacctactacgccgatagcgtgaagggcagattcaccatcagccgggacatcagcaagaacaccctggacctccagatgaacagcctgagagccgaggataccgccgtgtactactgtgccaaggatggcggagagacactggtggatagcagaggccagggcacactggtcacagtgtcatctacgcgtggaggcggatctatggaccctgatctcgaaattgaggccgcctttctggaacgcgagaacactgccctggaaaccagggtcgcagagctgagacagagagtgcagagactgcggaacagagtgtctcagtaccgcaccagatatggcccactcggcggaggtaaa

SEQ ID NO: 1546 - DNA, 591 bp, Artificial Sequence
  Synthetic Polynucloetide
atggccttaccagtgaccgccttgctcctgccgctggccttgctgctccacgccgccaggccggaagtgcagctgcttgaaagtggcggcggactgattcagcctggcggatctctgagactgagctgtgccgccagcggcttcaccttttctagccacgccatgacctgggtccgacaggcacctggaaaagggcttgaatgggtgtccgccatcagcggctctggcgattacacacactacgccgacagcgtgaagggcagattcaccatcagcagagacaacagcaagaacaccgtgtacctccagatgaacagcctgagagccgaggacagcgccgtgtattattgcgccaaggatgaggatggcggcagcctgcttggacacagaggacaaggcaccctggtcaccgtttcttccacgcgtggaggcggatctatggaccctgatctcgaaattgaggccgcctttctggaacgcgagaacactgccctggaaaccagggtcgcagagctgagacagagagtgcagagactgcggaacagagtgtctcagtaccgcaccagatatggcccactcggcggaggtaaa

SEQ ID NO: 1547 - DNA, 594 bp, Artificial Sequence
  Synthetic Polynucloetide
atggccttaccagtgaccgccttgctcctgccgctggccttgctgctccacgccgccaggccgcaggttcagctgcaagagtctggcggaggactggttcaggctggcgatagcctgagactgtcttgtgccgcttctggcagagccgtgtccagcctgtttatgggctggtttcggagagcccctggcaaagagagagaactggttgccgccatcagccggtacagcctgtacacctactacgccgacagcgtgaagggcagattcaccatcagcgccgacaacgccaagaacgccgtgtacctccagatgaacagcctgaagcctgaggacacagccgtgtactactgcgccagcaaacttgagtacaccagcaacgactacgacagctggggccagggaacccaagtgacagtctcttctacgcgtggaggcggatctatggaccctgatctcgaaattgaggccgcctttctggaacgcgagaacactgccctggaaaccagggtcgcagagctgagacagagagtgcagagactgcggaacagagtgtctcagtaccgcaccagatatggcccactcggcggaggtaaa

SEQ ID NO: 1548 - DNA, 594 bp, Artificial Sequence
  Synthetic Polynucloetide
atggccttaccagtgaccgccttgctcctgccgctggccttgctgctccacgccgccaggccggaagttcagctgcaagagtctggcggaggactggttcaacctggcggaagcctgagactgtcttgtgccgcctctggcagaaccttcagcagcctgttcatgggctggttcagacaggcccctggcaaagagagagaactggtcgccgccatcagccggtacagcctgtacacctactacgccgacagcgtgaagggcagattcaccatcagcgccgacaacgccaagaacgccgtgtacctccagatgaacagcctgaagccagaggacacagccgtgtactactgcgccagcaaacttgagtacaccagcaacgactacgacagctggggccagggaacccaagtgacagtctcttctacgcgtggaggcggatctatggaccctgatctcgaaattgaggccgcctttctggaacgcgagaacactgccctggaaaccagggtcgcagagctgagacagagagtgcagagactgcggaacagagtgtctcagtaccgcaccagatatggcccactcggcggaggtaaa

SEQ ID NO: 1549 - DNA, 594 bp, Artificial Sequence
  Synthetic Polynucloetide
atggccttaccagtgaccgccttgctcctgccgctggccttgctgctccacgccgccaggccggaagttcagctgcaagagtctggcggaggactggttcaacctggcggaagcctgagactgtcttgtgccgcctctggcagaaccttcagcagcctgtttatgggctgggtccgacaggcccctggcaaaggactggaactggtgtctgccatcagccggtacagcctgtacacctactacgccgacagcgtgaagggcagattcaccatcagcagagacaacgccaagaacaccctgtacctccagatgaacagcctgcggcctgaggataccgccgtgtactactgcgccagcaaacttgagtacaccagcaacgactacgacagctggggccagggaacactggtcacagtctcttctacgcgtggaggcggatctatggaccctgatctcgaaattgaggccgcctttctggaacgcgagaacactgccctggaaaccagggtcgcagagctgagacagagagtgcagagactgcggaacagagtgtctcagtaccgcaccagatatggcccactcggcggaggtaaa

SEQ ID NO: 1550 - DNA, 618 bp, Artificial Sequence
  Synthetic Polynucloetide
atggccttaccagtgaccgccttgctcctgccgctggccttgctgctccacgccgccaggccggaagtgcagctggttgaatctggcggaggactggttcagcctggcggatctctgagactgagctgtgaagccagcggcttcgccagcgacgattacatcatcggctggttcagacaggcccctggcaaagagagagagggcgtcagctgcatcagctctaagtacgccaacaccgtgtacaccgacagcgtgaagggcagattcagactgagcagaggcaccgccaagaataccgtgtacctccagatgagcgccctgaagcctgaggataccgccgtgtactactgcgctatggacagccgcagagtgacatgccctgagatcagcaccatgcaccggaacttcgattcttggggccagggcacactggtcacagtgtcatctacgcgtggaggcggatctatggaccctgatctcgaaattgaggccgcctttctggaacgcgagaacactgccctggaaaccagggtcgcagagctgagacagagagtgcagagactgcggaacagagtgtctcagtaccgcaccagatatggcccactcggcggaggtaaa

SEQ ID NO: 1551 - DNA, 618 bp, Artificial Sequence
  Synthetic Polynucloetide
atggccttaccagtgaccgccttgctcctgccgctggccttgctgctccacgccgccaggccggaagtgcagctggttgaatctggcggaggactggttcagcctggcggatctctgagactgtcttgtgccgcctctggcttcgccagcgactactatatcatcggctggttcagacaggcccctggcaaagagagagagggcgtcagctgtatcagcagcagatacgccaacaccaactacgccgacagcgtgaagggcagattcaccatcagccgggacaacgccaagaacaccgtgtacctccagatgaacagcctgaagcctgaggacaccgccgtgtactactgtgccgccgacaccagaagatacacctgtcctgacattgccaccatgcaccggaacttcgattcttggggccagggcacactggtcaccgtttcttctacgcgtggaggcggatctatggaccctgatctcgaaattgaggccgcctttctggaacgcgagaacactgccctggaaaccagggtcgcagagctgagacagagagtgcagagactgcggaacagagtgtctcagtaccgcaccagatatggcccactcggcggaggtaaa

SEQ ID NO: 1552 - DNA, 606 bp, Artificial Sequence
  Synthetic Polynucloetide
atggccttaccagtgaccgccttgctcctgccgctggccttgctgctccacgccgccaggccggaagtgcaactggtggaatctggaggctctctggtgcagccagggggaagcctgagactgtcttgtgccgcttccggcttcaccttcgacgactacgccatgagctgggtgcgccaggtgccaggcaaaggcctggaatgggtgtccagcatcaactggagcggcacccacaccgattacgccgactccgtgaaaggcagattcacaatcagcagaaacaacgccaacaataccctgtacctgcagatgaactccctgaagtctgaggatacagcagtgtattattgcgccaagaactggcgggacgccggcaccacttggtttgagaaaagcggctctgccggacagggaacccaagtgacagtgtcctccacgcgtggaggcggatctatggaccctgatctcgaaattgaggccgcctttctggaacgcgagaacactgccctggaaaccagggtcgcagagctgagacagagagtgcagagactgcggaacagagtgtctcagtaccgcaccagatatggcccactcggcggaggtaaa

SEQ ID NO: 1553 - DNA, 588 bp, Artificial Sequence
  Synthetic Polynucloetide
atggccttaccagtgaccgccttgctcctgccgctggccttgctgctccacgccgccaggccggaggtgcaactggtggaaagcggcggaggcctggtgcaggctggcggatctctgagactgagctgtgccgccagcggcatcaccttcagcatcaacacaatgggctggtacagacaggcccctggcaagcagagggaactggtggccctgatctccagcatcggcgacacctactacgccgacagcgtgaagggccggttcaccatcagccgggacaacgccaagaacaccgtgtacctccagatgaacagcctgaagcccgaggacaccgccgtgtactactgcaagcggttcagaacagccgcccagggcaccgattattggggccagggaacacaagtgaccgtgtcctctacgcgtggaggcggatctatggaccctgatctcgaaattgaggccgcctttctggaacgcgagaacactgccctggaaaccagggtcgcagagctgagacagagagtgcagagactgcggaacagagtgtctcagtaccgcaccagatatggcccactcggcggaggtaaa

SEQ ID NO: 1554 - DNA, 591 bp, Artificial Sequence
  Synthetic Polynucloetide
atggccttaccagtgaccgccttgctcctgccgctggccttgctgctccacgccgccaggccggaagtgcaactggtggaatctgggggcggactggtgcagccaggcggaagtctgaggctgtcttgtgccgcctccggcagcatcttcggcttcaacgacatggcctggtatcggcaggctcccggaaaacagcgcgagctggtggctctgattagcagagtgggcgtgaccagcagcgccgactctgtgaagggcagattcacaatctccagagtgaacgccaaggatacagtgtacctccagatgaactctctgaaacctgaggatacagcagtgtactattgctacatggaccagcggctggacggcagcacactggcctactggggacagggaactcaagtgacagtgtctagcacgcgtggaggcggatctatggaccctgatctcgaaattgaggccgcctttctggaacgcgagaacactgccctggaaaccagggtcgcagagctgagacagagagtgcagagactgcggaacagagtgtctcagtaccgcaccagatatggcccactcggcggaggtaaa

SEQ ID NO: 1555 - DNA, 594 bp, Artificial Sequence
  Synthetic Polynucloetide
atggccttaccagtgaccgccttgctcctgccgctggccttgctgctccacgccgccaggccggacgtgcaactcgtggaatccggcggaggcctggtgcagcctggcggatctctgagactgagctgtgccgccagcggctctatcggcggactgaatgccatggcctggtacagacaggcccctggcaaagaacgggaactggtggccggcatctttggcgtgggcagcaccagatacgccgacagcgtgaagggccggttcaccatcagccgggacaacagcaagaacaccgtgtacctgcagatgaacagcctgcggcccgaggataccgccgtgtactactgcagaatgtccagcgtgaccagaggctccagcgactactggggccagggaacacttgtgaccgtgtccagtctcgagacgcgtggaggcggatctatggaccctgatctcgaaattgaggccgcctttctggaacgcgagaacactgccctggaaaccagggtcgcagagctgagacagagagtgcagagactgcggaacagagtgtctcagtaccgcaccagatatggcccactcggcggaggtaaa

SEQ ID NO: 1556 - DNA, 609 bp, Artificial Sequence
  Synthetic Polynucloetide
atggccttaccagtgaccgccttgctcctgccgctggccttgctgctccacgccgccaggccggaagtgcaactggtggagtccggcggtggactggtacagcctgggggttcactgcgcctgtcctgcgccgccagcggaagaacctattacctcaatgctatgggttggttccgccaggccccaggaaaggagcgcgagttcgtggcggctattgactggtccgaggggaacaaggactatgctgattccgtgaagggcaggtttaccatcagccgggataattcaaaaaatactgtttatttgcagatgaactctcttagaccagaagacactgctgtctattactgcgccgctgacacccctccttggggaccactgatttatatcgaaagctatgattcctgggggcagggcacactcgtcaccgtgagtagcacgcgtggaggcggatctatggaccctgatctcgaaattgaggccgcctttctggaacgcgagaacactgccctggaaaccagggtcgcagagctgagacagagagtgcagagactgcggaacagagtgtctcagtaccgcaccagatatggcccactcggcggaggtaaa

SEQ ID NO: 1557 - DNA, 603 bp, Artificial Sequence
  Synthetic Polynucloetide
atggccttaccagtgaccgccttgctcctgccgctggccttgctgctccacgccgccaggccggaggtgcaactggtggaatccgggggaggcagcgtgcaggctgggggatcactgagactgtcttgtgctgcctccggcgacacctacggcagctattggatgggatggtttcggcaggctcccggaaaagaacgggaaggcgtggccgccatcaacagaggcggcggatacaccgtgtacgccgactctgtgaagggcagattcacaatctccagagacacagccaagaatactgtgtacctgcagatgaactccctgcgccccgacgataccgccgactattattgcgccgcttccggcgtgctgggcggcctgcatgaggactggttcaattattggggacagggaacacttgtgacagtgtccagcacgcgtggaggcggatctatggaccctgatctcgaaattgaggccgcctttctggaacgcgagaacactgccctggaaaccagggtcgcagagctgagacagagagtgcagagactgcggaacagagtgtctcagtaccgcaccagatatggcccactcggcggaggtaaa

SEQ ID NO: 1558 - DNA, 600 bp, Artificial Sequence
  Synthetic Polynucloetide
atggccttaccagtgaccgccttgctcctgccgctggccttgctgctccacgccgccaggccggttcagctcgtggaaagcggtggcggaagtgtgcaggccggaggcagtttgcgcctgagctgcgctgcttccggcgatacatacgggtcttactggatgggctggtttaggcaggcacctggacaagaaagagaagctgtggccgctattaacaggggaggtggctataccgtttatgctgattccgtgaagggccgattcacaatctcccgggataacgccaaaaacactctgtacctgcagatgaactcccttaggcccgatgacacagccgattactattgtgcggcctccggcgtgctgggtggtctgcatgaggattggttcaactactgggggcaaggcaccctcgtaaccgtgagtagcacgcgtggaggcggatctatggaccctgatctcgaaattgaggccgcctttctggaacgcgagaacactgccctggaaaccagggtcgcagagctgagacagagagtgcagagactgcggaacagagtgtctcagtaccgcaccagatatggcccactcggcggaggtaaa

SEQ ID NO: 1559 - DNA, 606 bp, Artificial Sequence
  Synthetic Polynucloetide
atggccttaccagtgaccgccttgctcctgccgctggccttgctgctccacgccgccaggccggaggtgcaactggtggaaagcggcggaggctctgtgcagacaggcggctctctgagactgacctgtgccgccagcggcagaaccagcagatcctatggcatgggctggttcagacaggcccctggcaaagaacgcgagttcgtgtccggcatctcttggagaggcgacagcaccggctacgccgatagcgtgaagggccggttcaccatcagccgggacaacgccaagaacaccgtggacctgcagatgaacagcctgaagcccgaggacaccgccatctactactgtgccgctgccgccggatctgcttggtacggcacactgtacgagtacgactactggggccagggcacccttgtgaccgtgtcatctacgcgtggaggcggatctatggaccctgatctcgaaattgaggccgcctttctggaacgcgagaacactgccctggaaaccagggtcgcagagctgagacagagagtgcagagactgcggaacagagtgtctcagtaccgcaccagatatggcccactcggcggaggtaaa

SEQ ID NO: 1560 - DNA, 606 bp, Artificial Sequence
  Synthetic Polynucloetide
atggccttaccagtgaccgccttgctcctgccgctggccttgctgctccacgccgccaggccggaggtgcagctcgtagaatctggaggtggttccgtgcaagccggaggatcattgcgactgacctgcgcagcgagcggatctacttctcgctcttacggtatgggatggttcagacaggctcctgggaaagagcgcgagttcgtttcaggcatctcctggaggggggacagcaccggctacgcagatagcgtgaagggcaggttcacgatcagccgagacaacgccaaaaacaccgtcgatctgcaaatgaatagtctgaagcccgaagatactgcgatctactactgtgccgccgcagcagggtccacctggtacggcacactctacgagtacgactactgggggcagggaaccctggtaaccgtgtcctctacgcgtggaggcggatctatggaccctgatctcgaaattgaggccgcctttctggaacgcgagaacactgccctggaaaccagggtcgcagagctgagacagagagtgcagagactgcggaacagagtgtctcagtaccgcaccagatatggcccactcggcggaggtaaa

SEQ ID NO: 1561 - DNA, 609 bp, Artificial Sequence
  Synthetic Polynucloetide
atggccttaccagtgaccgccttgctcctgccgctggccttgctgctccacgccgccaggccggatgttcagttggtggagtctggtggcggtttggtgcagccaggtggctccctgcgactcagttgtgcagcctccgggttcattctggattactacgctattggttggtttcgacaggcccccggaaaggagagagagggcgtgctctgcattgatgccagcgacgacattacctactacgccgattctgtgaagggccgcttcaccatcagtagagacaatagcaagaatacagtctacctgcagatgaactccctgcgcccagaagacactgccgtctactactgtgctacccctatcgggctttcttcctcttgccttctcgaatatgactacgattactgggggcaggggacgctggtcaccgtgtctagcacgcgtggaggcggatctatggaccctgatctcgaaattgaggccgcctttctggaacgcgagaacactgccctggaaaccagggtcgcagagctgagacagagagtgcagagactgcggaacagagtgtctcagtaccgcaccagatatggcccactcggcggaggtaaa

SEQ ID NO: 1562 - DNA, 612 bp, Artificial Sequence
  Synthetic Polynucloetide
atggccttaccagtgaccgccttgctcctgccgctggccttgctgctccacgccgccaggccggaggtgcaactggtggaaagcggcggaggactggtgcaggctggcgatagcctgagactgagctgtgccgcctccggcagagccttcagcagatatgccatgggctggttcagacaggcccctggcaaagaacgcgagttcgtggccgccatcggctggggacctagcaagaccaactacgccgacagcgtgaagggccggttcaccatcagccgggacaacgccaagaacaccgtgtacctgcagatgaacaccctgaagcccgaggacaccgccgtgtactcttgcgccgccaagttcgtgaacaccgacagcacctggtcccgcagcgagatgtacacctattggggccagggcaccctcgtgaccgtgtctagtacgcgtggaggcggatctatggaccctgatctcgaaattgaggccgcctttctggaacgcgagaacactgccctggaaaccagggtcgcagagctgagacagagagtgcagagactgcggaacagagtgtctcagtaccgcaccagatatggcccactcggcggaggtaaa

SEQ ID NO: 1563 - DNA, 600 bp, Artificial Sequence
  Synthetic Polynucloetide
atggccttaccagtgaccgccttgctcctgccgctggccttgctgctccacgccgccaggccggaggtgcagctggtagaatccggcgggggacttgtacaggctggtggtagtctgagactgagctgtgtggcctccggcatcagcagcagcaagcggaacatgggatggtataggcaagcccctggtaagcagagggaatccgtggctacaatcagcagcggcggcaacaaggactacaccgacgccgtgaaggacaggttcaccatctccagggacaccaccaagaacaccgtgtacctgcagatgaactccctcaagcccgaggacaccgccgtgtactactgcaagatcgaggccggcacaggctgggccaccagaagaggctacacatactgggggcagggaacactggtgaccgtgagctccacgcgtggaggcggatctatggaccctgatctcgaaattgaggccgcctttctggaacgcgagaacactgccctggaaaccagggtcgcagagctgagacagagagtgcagagactgcggaacagagtgtctcagtaccgcaccagatatggcccactcggcggaggtaaa

SEQ ID NO: 1564 - DNA, 570 bp, Artificial Sequence
  Synthetic Polynucloetide
atggccttaccagtgaccgccttgctcctgccgctggccttgctgctccacgccgccaggccgcaggtgcaactggtgcagtctggcggagggctggtgcagccagggggatctctgagactgagctgtgccgccagcgacttcgacttcgccgcctacgagatgagctgggtgcgccaggctcctggacagggactggaatgggtggccatcatcagccacgacggcatcgacaagtattacaccgacagcgtgaagggccggttcaccatcagccgggacaacagcaagaacaccctgtacctgcagatgaataccctgcgggccgaggacaccgccacctactattgcctgagactgggagccgtgggccagggcacacttgtgacagtgtctagcacgcgtggaggcggatctatggaccctgatctcgaaattgaggccgcctttctggaacgcgagaacactgccctggaaaccagggtcgcagagctgagacagagagtgcagagactgcggaacagagtgtctcagtaccgcaccagatatggcccactcggcggaggtaaa

SEQ ID NO: 1565 - DNA, 594 bp, Artificial Sequence
  Synthetic Polynucloetide
atggccttaccagtgaccgccttgctcctgccgctggccttgctgctccacgccgccaggccgcaggtgcaactggtgcagagcggaggcggactggtgcagcctgggggcagtctgaggctgtcttgtgccgcctccgatttcgccttcgatgattacgagatgtcttgggtgcggcaggccccaggcaaagccctggaatggatcggcgacatcaaccacagcggcaccaccatctacaaccccagcctgaagtccagagtgaccatctccagagacaactccaagaatactctgtacctgcagatgaacacactgagagccgaagatacagccatctactactgcgccagaccccactacggcgactacagcgacgccttcgacatctggggccagggaaccatggtcaccgtgtcctctacgcgtggaggcggatctatggaccctgatctcgaaattgaggccgcctttctggaacgcgagaacactgccctggaaaccagggtcgcagagctgagacagagagtgcagagactgcggaacagagtgtctcagtaccgcaccagatatggcccactcggcggaggtaaa

SEQ ID NO: 1566 - DNA, 579 bp, Artificial Sequence
  Synthetic Polynucloetide
atggccttaccagtgaccgccttgctcctgccgctggccttgctgctccacgccgccaggccggaggtgcagctcgtggaatcaggcggaggtcttgtacagccaggaaattctcttcggctgtcttgcgccgcgagcgggttcaccttcagcagcttcggaatgagctgggtaagacaggcaccggggaaaggcctggagtgggtgagctcaatcagtgggagcgggtcagataccctgtacgcggattccgtgaagggcagattcacaatctctcgggacaatgctaagacaacactttaccttcagatgaactctctgcgacccgaggataccgctgtctactactgtacaataggaggttctctgtccagaagttctcaagggacactggtgaccgtctccagcacgcgtggaggcggatctatggaccctgatctcgaaattgaggccgcctttctggaacgcgagaacactgccctggaaaccagggtcgcagagctgagacagagagtgcagagactgcggaacagagtgtctcagtaccgcaccagatatggcccactcggcggaggtaaa

SEQ ID NO: 1567 - DNA, 582 bp, Artificial Sequence
  Synthetic Polynucloetide
atggccttaccagtgaccgccttgctcctgccgctggccttgctgctccacgccgccaggccggaagttcaactggtggaatccggtggaggactggtgcaagcgggcggctcactgcgccttagctgtgctgccagcggcagtatcttcagcggcaatgtaatgggttggtacaggcgacaagccccaggcaaggagcgagagtgggtagccgcgattgcaagtgggggcagcatctactacagagattctgtgaaaggccgcttcactattagtcgggacaacgcaaaaaacacggtgtatctccaaatgaacagcttgaagccagaggacactgctgtctactattgtaacagtcatcccccaactctcccctattgggggctgggcactcaggtcaccgtgagttccacgcgtggaggcggatctatggaccctgatctcgaaattgaggccgcctttctggaacgcgagaacactgccctggaaaccagggtcgcagagctgagacagagagtgcagagactgcggaacagagtgtctcagtaccgcaccagatatggcccactcggcggaggtaaa

SEQ ID NO: 1568 - DNA, 612 bp, Artificial Sequence
  Synthetic Polynucloetide
atggccttaccagtgaccgccttgctcctgccgctggccttgctgctccacgccgccaggccggaagtgcaactggtggaatctggagggggaagcgtgcaggcaggcggatctctgagactgtcctgcaccacatctggcagagccctgaatatgtacgtgatgggatggtttcggcaggctcccggcaacgagcgggaatttgtggccgctacaagcagcagcggcggcagcacaagctaccccgattctgtgaagggcagattcacaatctcccgcgataatgccaagaatactgtgtacctgcagatgaatagtctgaagcctgaagatacagccgcctacagatgtgccgccagcccctacgtgtccacccccaccatgaacatcctggaagagtacagatactggggcctgggaacacaagtgacagtgtccagcacgcgtggaggcggatctatggaccctgatctcgaaattgaggccgcctttctggaacgcgagaacactgccctggaaaccagggtcgcagagctgagacagagagtgcagagactgcggaacagagtgtctcagtaccgcaccagatatggcccactcggcggaggtaaa

SEQ ID NO: 1569 - DNA, 597 bp, Artificial Sequence
  Synthetic Polynucloetide
atggccttaccagtgaccgccttgctcctgccgctggccttgctgctccacgccgccaggccggaggttcagttggtcgaatcaggcgggggcctcgtccaacccggcggaagcctgcggctgtcttgcgcagcaagtggtagtgtgttcaagatcaacgttatggcctggtatcgccaggctccgggaaaagggagagagctggttgcggggatcattagcggtggctccaccagctacgctgacagtgtgaagggaaggttcactatatcacgcgacaacgcaaagaatacattgtacctccagatgaatagcttgcggcccgaagacacggcagtctactattgtgcctttatcacaacagagagcgactatgacctgggccgccggtattgggggcagggaacccttgtgaccgtttcatccacgcgtggaggcggatctatggaccctgatctcgaaattgaggccgcctttctggaacgcgagaacactgccctggaaaccagggtcgcagagctgagacagagagtgcagagactgcggaacagagtgtctcagtaccgcaccagatatggcccactcggcggaggtaaa

SEQ ID NO: 1570 - DNA, 1032 bp, Artificial Sequence
  Synthetic Polynucloetide
atggccttaccagtgaccgccttgctcctgccgctggccttgctgctccacgccgccaggccggaggtgcaactggtggaaagcggcggaggctctgtgcagacaggcggctctctgagactgacctgtgccgccagcggcagaaccagcagatcctatggcatgggctggttcagacaggcccctggcaaagaacgcgagttcgtgtccggcatctcttggagaggcgacagcaccggctacgccgatagcgtgaagggccggttcaccatcagccgggacaacgccaagaacaccgtggacctgcagatgaacagcctgaagcccgaggacaccgccatctactactgtgccgctgccgccggatctgcttggtacggcacactgtacgagtacgactactggggccagggcacccttgtgaccgtgtcatctctcgagggcggaggcggaagtggaggcggaggatctggcggcggaggctctttcgaagaggtgcaactggtggaatccgggggaggcagcgtgcaggctgggggatcactgagactgtcttgtgctgcctccggcgacacctacggcagctattggatgggatggtttcggcaggctcccggaaaagaacgggaaggcgtggccgccatcaacagaggcggcggatacaccgtgtacgccgactctgtgaagggcagattcacaatctccagagacacagccaagaatactgtgtacctgcagatgaactccctgcgccccgacgataccgccgactattattgcgccgcttccggcgtgctgggcggcctgcatgaggactggttcaattattggggacagggaacacttgtgacagtgtccagcacgcgtggaggcggatctatggaccctgatctcgaaattgaggccgcctttctggaacgcgagaacactgccctggaaaccagggtcgcagagctgagacagagagtgcagagactgcggaacagagtgtctcagtaccgcaccagatatggcccactcggcggaggtaaa

SEQ ID NO: 1571 - DNA, 1089 bp, Artificial Sequence
  Synthetic Polynucloetide
atggccttaccagtgaccgccttgctcctgccgctggccttgctgctccacgccgccaggccggaggtgcagctcgtagaatctggaggtggttccgtgcaagccggaggatcattgcgactgacctgcgcagcgagcggatctacttctcgctcttacggtatgggatggttcagacaggctcctgggaaagagcgcgagttcgtttcaggcatctcctggaggggggacagcaccggctacgcagatagcgtgaagggcaggttcacgatcagccgagacaacgccaaaaacaccgtcgatctgcaaatgaatagtctgaagcccgaagatactgcgatctactactgtgccgccgcagcagggtccacctggtacggcacactctacgagtacgactactgggggcagggaaccctggtaaccgtgtcctctctcgagggaggaggcggctccgggggaggcggaagtggaggcggaggatctgggtctggaggaagcggatctggaggctcagggtcagggggctcaggcagtggaggctctttcgaagttcagctcgtggaaagcggtggcggaagtgtgcaggccggaggcagtttgcgcctgagctgcgctgcttccggcgatacatacgggtcttactggatgggctggtttaggcaggcacctggacaagaaagagaagctgtggccgctattaacaggggaggtggctataccgtttatgctgattccgtgaagggccgattcacaatctcccgggataacgccaaaaacactctgtacctgcagatgaactcccttaggcccgatgacacagccgattactattgtgcggcctccggcgtgctgggtggtctgcatgaggattggttcaactactgggggcaaggcaccctcgtaaccgtgagtagcacgcgtggaggcggatctatggaccctgatctcgaaattgaggccgcctttctggaacgcgagaacactgccctggaaaccagggtcgcagagctgagacagagagtgcagagactgcggaacagagtgtctcagtaccgcaccagatatggcccactcggcggaggtaaa

SEQ ID NO: 1572 - DNA, 1059 bp, Artificial Sequence
  Synthetic Polynucloetide
atggccttaccagtgaccgccttgctcctgccgctggccttgctgctccacgccgccaggccggaggtgcaactggtggaaagcggcggaggcctggtgcaggctggcggatctctgagactgagctgtgccgccagcggcatcaccttcagcatcaacacaatgggctggtacagacaggcccctggcaagcagagggaactggtggccctgatctccagcatcggcgacacctactacgccgacagcgtgaagggccggttcaccatcagccgggacaacgccaagaacaccgtgtacctccagatgaacagcctgaagcccgaggacaccgccgtgtactactgcaagcggttcagaacagccgcccagggcaccgattattggggccagggaacacaagtgaccgtgtcctctctcgagggaggaggcggctccgggggaggcggaagtggaggcggaggatctgggtctggaggaagcggatctggaggctcagggtcagggggctcaggcagtggaggctctttcgaagtgcaactggtggaatctgggggcggactggtgcagccaggcggaagtctgaggctgtcttgtgccgcctccggcagcatcttcggcttcaacgacatggcctggtatcggcaggctcccggaaaacagcgcgagctggtggctctgattagcagagtgggcgtgaccagcagcgccgactctgtgaagggcagattcacaatctccagagtgaacgccaaggatacagtgtacctccagatgaactctctgaaacctgaggatacagcagtgtactattgctacatggaccagcggctggacggcagcacactggcctactggggacagggaactcaagtgacagtgtctagcacgcgtggaggcggatctatggaccctgatctcgaaattgaggccgcctttctggaacgcgagaacactgccctggaaaccagggtcgcagagctgagacagagagtgcagagactgcggaacagagtgtctcagtaccgcaccagatatggcccactcggcggaggtaaa

SEQ ID NO: 1573 - DNA, 960 bp, Artificial Sequence; identical to SEQ ID NO: 1388
  Synthetic Polynucloetide

SEQ ID NO: 1574 - DNA, 1074 bp, Artificial Sequence
  Synthetic Polynucloetide
atggccttaccagtgaccgccttgctcctgccgctggccttgctgctccacgccgccaggccggacgtgcaactcgtggaatccggcggaggcctggtgcagcctggcggatctctgagactgagctgtgccgccagcggctctatcggcggactgaatgccatggcctggtacagacaggcccctggcaaagaacgggaactggtggccggcatctttggcgtgggcagcaccagatacgccgacagcgtgaagggccggttcaccatcagccgggacaacagcaagaacaccgtgtacctgcagatgaacagcctgcggcccgaggataccgccgtgtactactgcagaatgtccagcgtgaccagaggctccagcgactactggggccagggaacacttgtgaccgtgtccagtctcgagggaggaggcggctccgggggaggcggaagtggaggcggaggatctgggtctggaggaagcggatctggaggctcagggtcagggggctcaggcagtggaggctctttcgaagtgcaactggtggaatctggaggctctctggtgcagccagggggaagcctgagactgtcttgtgccgcttccggcttcaccttcgacgactacgccatgagctgggtgcgccaggtgccaggcaaaggcctggaatgggtgtccagcatcaactggagcggcacccacaccgattacgccgactccgtgaaaggcagattcacaatcagcagaaacaacgccaacaataccctgtacctgcagatgaactccctgaagtctgaggatacagcagtgtattattgcgccaagaactggcgggacgccggcaccacttggtttgagaaaagcggctctgccggacagggaacccaagtgacagtgtcctccacgcgtggaggcggatctatggaccctgatctcgaaattgaggccgcctttctggaacgcgagaacactgccctggaaaccagggtcgcagagctgagacagagagtgcagagactgcggaacagagtgtctcagtaccgcaccagatatggcccactcggcggaggtaaa

SEQ ID NO: 1575 - DNA, 1098 bp, Artificial Sequence
  Synthetic Polynucloetide
atggccttaccagtgaccgccttgctcctgccgctggccttgctgctccacgccgccaggccggatgttcagttggtggagtctggtggcggtttggtgcagccaggtggctccctgcgactcagttgtgcagcctccgggttcattctggattactacgctattggttggtttcgacaggcccccggaaaggagagagagggcgtgctctgcattgatgccagcgacgacattacctactacgccgattctgtgaagggccgcttcaccatcagtagagacaatagcaagaatacagtctacctgcagatgaactccctgcgcccagaagacactgccgtctactactgtgctacccctatcgggctttcttcctcttgccttctcgaatatgactacgattactgggggcaggggacgctggtcaccgtgtctagcctcgagggaggtagcggctccgggggaggcggaagtggaggcggaggatctgggtctggaggaagcggatctggaggctcagggtcagggggctcaggcagtggaggctctttcgaagtgcaactggtggagtccggcggtggactggtacagcctgggggttcactgcgcctgtcctgcgccgccagcggaagaacctattacctcaatgctatgggttggttccgccaggccccaggaaaggagcgcgagttcgtggcggctattgactggtccgaggggaacaaggactatgctgattccgtgaagggcaggtttaccatcagccgggataattcaaaaaatactgtttatttgcagatgaactctcttagaccagaagacactgctgtctattactgcgccgctgacacccctccttggggaccactgatttatatcgaaagctatgattcctgggggcagggcacactcgtcaccgtgagtagcacgcgtggaggcggatctatggaccctgatctcgaaattgaggccgcctttctggaacgcgagaacactgccctggaaaccagggtcgcagagctgagacagagagtgcagagactgcggaacagagtgtctcagtaccgcaccagatatggcccactcggcggaggtaaa

SEQ ID NO: 1576 - DNA, 1047 bp, Artificial Sequence
  Synthetic Polynucloetide
atggccttaccagtgaccgccttgctcctgccgctggccttgctgctccacgccgccaggccgcaggtgcaactggtgcagtctggcggagggctggtgcagccagggggatctctgagactgagctgtgccgccagcgacttcgacttcgccgcctacgagatgagctgggtgcgccaggctcctggacagggactggaatgggtggccatcatcagccacgacggcatcgacaagtattacaccgacagcgtgaagggccggttcaccatcagccgggacaacagcaagaacaccctgtacctgcagatgaataccctgcgggccgaggacaccgccacctactattgcctgagactgggagccgtgggccagggcacacttgtgacagtgtctagcctcgagggaggaggcggctccgggggaggcggaagtggaggcggaggatctgggtctggaggaagcggatctggaggctcagggtcagggggctcaggcagtggaggcagcttcgaacaggtgcaactggtgcagagcggaggcggactggtgcagcctgggggcagtctgaggctgtcttgtgccgcctccgatttcgccttcgatgattacgagatgtcttgggtgcggcaggccccaggcaaagccctggaatggatcggcgacatcaaccacagcggcaccaccatctacaaccccagcctgaagtccagagtgaccatctccagagacaactccaagaatactctgtacctgcagatgaacacactgagagccgaagatacagccatctactactgcgccagaccccactacggcgactacagcgacgccttcgacatctggggccagggaaccatggtcaccgtgtcctctacgcgtggaggcggatctatggaccctgatctcgaaattgaggccgcctttctggaacgcgagaacactgccctggaaaccagggtcgcagagctgagacagagagtgcagagactgcggaacagagtgtctcagtaccgcaccagatatggcccactcggcggaggtaaa

SEQ ID NO: 1577 - DNA, 591 bp, Artificial Sequence
  Synthetic Polynucloetide
atggccttaccagtgaccgccttgctcctgccgctggccttgctgctccacgccgccaggccgcaagtgaagctggaagagtctggcggaggactggtgcaggctggaagaagcctgagactgtcttgtgccgccagcgagcacacctttagctctcacgtgatgggctggttcagacaggcccctggcaaagaaagggaaagcgtggccgttatcggctggcgggatattagcaccagctacgccgatagcgtgaagggcagattcaccatcagccgggacaacgccaagaaaaccctgtacctccagatgaacagcctgaagccagaggacaccgccgtgtactactgcgccgccagaagaattgacgccgccgactttgattcttggggccagggaacccaagtgaccgtttctagcacgcgtggaggcggatctatggaccctgatctcgaaattgaggccgcctttctggaacgcgagaacactgccctggaaaccagggtcgcagagctgagacagagagtgcagagactgcggaacagagtgtctcagtaccgcaccagatatggcccactcggcggaggtaaa

SEQ ID NO: 1578 - DNA, 588 bp, Artificial Sequence
  Synthetic Polynucloetide
atggccttaccagtgaccgccttgctcctgccgctggccttgctgctccacgccgccaggccggaagtgcaactggttgaatccggtggcggcctggtgcaagcaggcggatctctcagacttagctgtgccgcctccggcagaaccttcacaatgggatggtttaggcaggctccagggaaagagagagagttcgtcgccgccatctctctgtctcccacactggcctactacgccgagtctgtgaaaggccggttcaccatctccagagataatgccaagaacaccgtggtgctgcaaatgaactctctgaaacccgaggatacagccctgtactattgtgccgctgaccggaagtccgtgatgagcatcagacccgattactggggacagggcacacaagtcacagtgtcctctacgcgtggaggcggatctatggaccctgatctcgaaattgaggccgcctttctggaacgcgagaacactgccctggaaaccagggtcgcagagctgagacagagagtgcagagactgcggaacagagtgtctcagtaccgcaccagatatggcccactcggcggaggtaaa

SEQ ID NO: 1579 - DNA, 990 bp, Artificial Sequence
  Synthetic Polynucloetide
atggccttaccagtgaccgccttgctcctgccgctggccttgctgctccacgccgccaggccgcaagtgaagctggaagagtctggcggaggactggtgcaggctggaagaagcctgagactgtcttgtgccgccagcgagcacacctttagctctcacgtgatgggctggttcagacaggcccctggcaaagaaagggaaagcgtggccgttatcggctggcgggatattagcaccagctacgccgatagcgtgaagggcagattcaccatcagccgggacaacgccaagaaaaccctgtacctccagatgaacagcctgaagccagaggacaccgccgtgtactactgcgccgccagaagaattgacgccgccgactttgattcttggggccagggaacccaagtgaccgtttctagcggaggcggtggaagtggcggcggtggttcaggcggcggaggatctgaagtgcaactggttgaatccggtggcggcctggtgcaagcaggcggatctctcagacttagctgtgccgcctccggcagaaccttcacaatgggatggtttaggcaggctccagggaaagagagagagttcgtcgccgccatctctctgtctcccacactggcctactacgccgagtctgtgaaaggccggttcaccatctccagagataatgccaagaacaccgtggtgctgcaaatgaactctctgaaacccgaggatacagccctgtactattgtgccgctgaccggaagtccgtgatgagcatcagacccgattactggggacagggcacacaagtcacagtgtcctctacgcgtggaggcggatctatggaccctgatctcgaaattgaggccgcctttctggaacgcgagaacactgccctggaaaccagggtcgcagagctgagacagagagtgcagagactgcggaacagagtgtctcagtaccgcaccagatatggcccactcggcggaggtaaa

SEQ ID NO: 1580 - DNA, 582 bp, Artificial Sequence
  Synthetic Polynucloetide
atggccttaccagtgaccgccttgctcctgccgctggccttgctgctccacgccgccaggccggaggtgcaactggttgagtctggcggaggactggttcaggcaggcggatctctgagactgagctgtatcgccaccggcaaggtgttcagcatctacgacatgggctggtacagacaggcccctggcaagcagagagagctggttgccgagatcacaagcagcggcaccacacactacgacgacttcgtgtccggcagattcaccatcagccgggacaacgccaagaacaccgtgtacctccagatgaacaccctgaaggccgaggacaccgccgtgtactactgtagagccaaccacgtgttcggcggcagctattggggacagggaacccaagtgacagtgtctagtacgcgtggaggcggatctatggaccctgatctcgaaattgaggccgcctttctggaacgcgagaacactgccctggaaaccagggtcgcagagctgagacagagagtgcagagactgcggaacagagtgtctcagtaccgcaccagatatggcccactcggcggaggtaaa

SEQ ID NO: 1581 - DNA, 600 bp, Artificial Sequence
  Synthetic Polynucloetide
atggccttaccagtgaccgccttgctcctgccgctggccttgctgctccacgccgccaggccgcaggtgcagcttgttgaaagcggaggtggcctggttcaacctggcggaagcctgagactgtcctgtgaagccagcggctttaccctggactactacgccatcggctggtttagacaagctcccggcaaagagagagagggcgtcatctgcatcagcagatccgacggcagcacctactatgccgacagcgtgaagggacgcttcaccatctccagagacaatgccaaaaagacggtctacctgcaaatgatctccctcaagcctgaggataccgccgcctactattgtgccgctggcgctgattgcagcggctacctgagagactacgagttcagaggccagggcacacaagtgaccgtcagctctacgcgtggaggcggatctatggaccctgatctcgaaattgaggccgcctttctggaacgcgagaacactgccctggaaaccagggtcgcagagctgagacagagagtgcagagactgcggaacagagtgtctcagtaccgcaccagatatggcccactcggcggaggtaaa

SEQ ID NO: 1582 - DNA, 969 bp, Artificial Sequence
  Synthetic Polynucloetide
atggccttaccagtgaccgccttgctcctgccgctggccttgctgctccacgccgccaggccggaggtgcaactggttgagtctggcggaggactggttcaggcaggcggatctctgagactgagctgtatcgccaccggcaaggtgttcagcatctacgacatgggctggtacagacaggcccctggcaagcagagagagctggttgccgagatcacaagcagcggcaccacacactacgacgacttcgtgtccggcagattcaccatcagccgggacaacgccaagaacaccgtgtacctccagatgaacaccctgaaggccgaggacaccgccgtgtactactgtagagccaaccacgtgttcggcggcagctattggggacagggaacccaagtgacagtgtctagtgaggtggccgctttggagaaacaggtgcagcttgttgaaagcggaggtggcctggttcaacctggcggaagcctgagactgtcctgtgaagccagcggctttaccctggactactacgccatcggctggtttagacaagctcccggcaaagagagagagggcgtcatctgcatcagcagatccgacggcagcacctactatgccgacagcgtgaagggacgcttcaccatctccagagacaatgccaaaaagacggtctacctgcaaatgatctccctcaagcctgaggataccgccgcctactattgtgccgctggcgctgattgcagcggctacctgagagactacgagttcagaggccagggcacacaagtgaccgtcagctctacgcgtggaggcggatctatggaccctgatctcgaaattgaggccgcctttctggaacgcgagaacactgccctggaaaccagggtcgcagagctgagacagagagtgcagagactgcggaacagagtgtctcagtaccgcaccagatatggcccactcggcggaggtaaa

SEQ ID NO: 1583 - DNA, 618 bp, Artificial Sequence
  Synthetic Polynucloetide
atggccttaccagtgaccgccttgctcctgccgctggccttgctgctccacgccgccaggccgcaagtgaagctggaagagtctggcggcagactggtgcagcctagaggaagcctgagactgtcttgtgccggcagcggcagaacctttagcacatacggcatggcctggttcagacaggcccctggaaaagagagagagttcgtcgccagcaaggccagcatgaactactccggcaggacctactacgccgacagcgtgaagggcagattcacaatcgccagagacaacgccaagaacatggtgttcctccagatgaacaatctgaagcccgaggacaccgccgtgtactattgtgccgctggcacaggctgtagcacctacggctgtttcgacgcccagatcatcgactactggggcaagggcacactggtcacagtttctagcacgcgtggaggcggatctatggaccctgatctcgaaattgaggccgcctttctggaacgcgagaacactgccctggaaaccagggtcgcagagctgagacagagagtgcagagactgcggaacagagtgtctcagtaccgcaccagatatggcccactcggcggaggtaaa

SEQ ID NO: 1584 - DNA, 591 bp, Artificial Sequence
  Synthetic Polynucloetide
atggccttaccagtgaccgccttgctcctgccgctggccttgctgctccacgccgccaggccgcaagtcaaactggaagaaagcggtggcggcctggtgcaacctggcgaatctctgagactgagctgtagcgccagcggctccatcttcaaggtgttcagagtgttcgccatgagctggtacaggcaaggccctggcaagcagagagagctggtcgcctctatcagcagcggcgagacaaccacatacgccgactctgtgaaaggccggttcaccatcagccgggataatgccaagaataccgcctatctccagatggactccctgaagcctgaagatacagctgtgtactactgcaacgccgaccataccttcaccggcgatttttggggccagggaacccaagtgaccgtgtctagtacgcgtggaggcggatctatggaccctgatctcgaaattgaggccgcctttctggaacgcgagaacactgccctggaaaccagggtcgcagagctgagacagagagtgcagagactgcggaacagagtgtctcagtaccgcaccagatatggcccactcggcggaggtaaa

SEQ ID NO: 1585 - DNA, 996 bp, Artificial Sequence
  Synthetic Polynucloetide
atggccttaccagtgaccgccttgctcctgccgctggccttgctgctccacgccgccaggccgcaagtgaagctggaagagtctggcggcagactggtgcagcctagaggaagcctgagactgtcttgtgccggcagcggcagaacctttagcacatacggcatggcctggttcagacaggcccctggaaaagagagagagttcgtcgccagcaaggccagcatgaactactccggcaggacctactacgccgacagcgtgaagggcagattcacaatcgccagagacaacgccaagaacatggtgttcctccagatgaacaatctgaagcccgaggacaccgccgtgtactattgtgccgctggcacaggctgtagcacctacggctgtttcgacgcccagatcatcgactactggggcaagggcacactggtcacagtttctagcgaggtggccgctttggagaaacaagtcaaactggaagaaagcggtggcggcctggtgcaacctggcgaatctctgagactgagctgtagcgccagcggctccatcttcaaggtgttcagagtgttcgccatgagctggtacaggcaaggccctggcaagcagagagagctggtcgcctctatcagcagcggcgagacaaccacatacgccgactctgtgaaaggccggttcaccatcagccgggataatgccaagaataccgcctatctccagatggactccctgaagcctgaagatacagctgtgtactactgcaacgccgaccataccttcaccggcgatttttggggccagggaacccaagtgaccgtgtctagtacgcgtggaggcggatctatggaccctgatctcgaaattgaggccgcctttctggaacgcgagaacactgccctggaaaccagggtcgcagagctgagacagagagtgcagagactgcggaacagagtgtctcagtaccgcaccagatatggcccactcggcggaggtaaa

SEQ ID NO: 1586 - DNA, 585 bp, Artificial Sequence
  Synthetic Polynucloetide
atggccttaccagtgaccgccttgctcctgccgctggccttgctgctccacgccgccaggccgcaagtgaagctggaagagtctggcggagagctggttcaacctggcggacctctgagactgtcttgtgccgccagcggcaacatcttcagcatcaaccggatgggctggtacagacaggcccctggaaaacagagagccttcgtcgcctctatcaccgtgcggggcatcaccaattacgccgactctgtgaagggcagattcaccatcagcgtggacaagagcaagaacaccatctacctccagatgaacgccctgaagcctgaggacaccgccgtgtactactgcaatgccgtgtccagcaacagggaccccgattattggggccagggcacccaagtgacagtgtctagtacgcgtggaggcggatctatggaccctgatctcgaaattgaggccgcctttctggaacgcgagaacactgccctggaaaccagggtcgcagagctgagacagagagtgcagagactgcggaacagagtgtctcagtaccgcaccagatatggcccactcggcggaggtaaa

SEQ ID NO: 1587 - DNA, 621 bp, Artificial Sequence
  Synthetic Polynucloetide
atggccttaccagtgaccgccttgctcctgccgctggccttgctgctccacgccgccaggccgcctgttcaactggttgaatctggcggcggactggtgcaggctggcgatagtctcagactgagctgtgccgcctccggcagaacatttggcatcggcacaatgggatggttccggcagcctcctggaaaagaacgcgaatttgtggccgccatcagatggtctacaggcggcaccagatacgccgacagcgtgaaaggccggtttaccatcagcagagacaacgccaagctgaccgtggatctccagatggatagcctgaaaccagaggatacagccgtctattactgcgccgctgacaggctgagcctggatctgtctggcagataccactacaaccctgccgtgtacgactactggggacagggaacacaagtcaccgtgtcctctacgcgtggaggcggatctatggaccctgatctcgaaattgaggccgcctttctggaacgcgagaacactgccctggaaaccagggtcgcagagctgagacagagagtgcagagactgcggaacagagtgtctcagtaccgcaccagatatggcccactcggcggaggtaaa

SEQ ID NO: 1588 - DNA, 1017 bp, Artificial Sequence
  Synthetic Polynucloetide
atggccttaccagtgaccgccttgctcctgccgctggccttgctgctccacgccgccaggccgcaagtgaagctggaagagtctggcggagagctggttcaacctggcggacctctgagactgtcttgtgccgccagcggcaacatcttcagcatcaaccggatgggctggtacagacaggcccctggaaaacagagagccttcgtcgcctctatcaccgtgcggggcatcaccaattacgccgactctgtgaagggcagattcaccatcagcgtggacaagagcaagaacaccatctacctccagatgaacgccctgaagcctgaggacaccgccgtgtactactgcaatgccgtgtccagcaacagggaccccgattattggggccagggcacccaagtgacagtgtctagtggaggcggtggaagtggcggcggtggttcaggcggcggaggatctcctgttcaactggttgaatctggcggcggactggtgcaggctggcgatagtctcagactgagctgtgccgcctccggcagaacatttggcatcggcacaatgggatggttccggcagcctcctggaaaagaacgcgaatttgtggccgccatcagatggtctacaggcggcaccagatacgccgacagcgtgaaaggccggtttaccatcagcagagacaacgccaagctgaccgtggatctccagatggatagcctgaaaccagaggatacagccgtctattactgcgccgctgacaggctgagcctggatctgtctggcagataccactacaaccctgccgtgtacgactactggggacagggaacacaagtcaccgtgtcctctacgcgtggaggcggatctatggaccctgatctcgaaattgaggccgcctttctggaacgcgagaacactgccctggaaaccagggtcgcagagctgagacagagagtgcagagactgcggaacagagtgtctcagtaccgcaccagatatggcccactcggcggaggtaaa

SEQ ID NO: 1589 - DNA, 591 bp, Artificial Sequence
  Synthetic Polynucloetide
atggccttaccagtgaccgccttgctcctgccgctggccttgctgctccacgccgccaggccggccgtgcaactggttgaatctggcggaggactggtgcaggctggcgattctctgagactgacctgtacagccagcggcagagccttcagcacctacttcatggcctggttcagacaggcccctggcaaagagagagagttcgtcgccggaatcgcttggagcggaggctctacagcctacgccgattctgtgaagggcagattcaccatcagccgggacaacgccaagaacaccgtgtacctccagatgaacagcctgaagtccgaggacaccgccgtgtactactgtgccagcagaggcatcgaggtggaagagtttggagcctggggccagggaacccaagtgacagtttcttctacgcgtggaggcggatctatggaccctgatctcgaaattgaggccgcctttctggaacgcgagaacactgccctggaaaccagggtcgcagagctgagacagagagtgcagagactgcggaacagagtgtctcagtaccgcaccagatatggcccactcggcggaggtaaa

SEQ ID NO: 1590 - DNA, 594 bp, Artificial Sequence
  Synthetic Polynucloetide
atggccttaccagtgaccgccttgctcctgccgctggccttgctgctccacgccgccaggccgcaggttcaactggtggaaagtggcggtggcttggtgcaagcaggcggctctcttagactgtcttgtgctgcctctggcggcaccctgagcaagaataccgtggcatggtttaggcaggctcccggaaaagagcggggctttgtcgccagcatcacctgggatggcagaaccacctactacgccgacagcgtgaaaggccggttcaccatctccagagataatgccaagaatacggtctacttgcaaatgaactccctgaagcctgaagatacagccgtgtacgtgtgcgccgatctcggcaaatggcctgctggacctgccgattattggggacagggcacacaagtcaccgtgtcctctacgcgtggaggcggatctatggaccctgatctcgaaattgaggccgcctttctggaacgcgagaacactgccctggaaaccagggtcgcagagctgagacagagagtgcagagactgcggaacagagtgtctcagtaccgcaccagatatggcccactcggcggaggtaaa

SEQ ID NO: 1591 - DNA, 918 bp, Artificial Sequence
  Synthetic Polynucloetide
atggccttaccagtgaccgccttgctcctgccgctggccttgctgctccacgccgccaggccggacgtgcagatgatccagacccccgatagcctggccgtgtccctgggacagagagccaccatctcttgcagagccagcgagagcgtggacaactacggcatcagcttcatgcactggtatcagcagaagcccggccagagccccaagctgctgatctacagagcctccaacctggaaagcggcatccccgccagattttccggcagcggcagcagaaccgacttcaccctgaccatcaaccccgtggaaaccgacgacgtggcaacctactactgccagcagaacaacaaggacccccccacctttggcggaggcaccaagctggaaatcaagggcggaggcggaagtggaggcggaggatctggcggcggaggctctgggggaggcggctctcaggtgcaactccagcagtctggcgctgagcttgtgaagcctggggccagcgtgaagattagctgcaaggccagcggctacgccttcagcagctactggatgaactgggtcaagcagcggcctggcaagggcctggaatggatcggccaaatctaccccggcgacggcgacaccacctacaacggcaagttcaagggcaaggccaccctgacagccgacaagagcagcagcaccgtgtacatgcaactgaacagcctgaccagcgaggacagcgccgtgtacttctgcgtgcggtactactacggcagctccggctacttcgactattggggccagggcaccacactgaccgtgtcctctacgcgtggaggcggatctaaagttgctgctcttaaagaaaaggtcgcggctctgaaagaaaaagtggcggcgctcaaggagaaagttgcagctctcaaagaa

SEQ ID NO: 1592 - DNA, 891 bp, Artificial Sequence
  Synthetic Polynucloetide
atggccttaccagtgaccgccttgctcctgccgctggccttgctgctccacgccgccaggccggacgtgcagatgatccagacccccagcagcctgtctgccagcctgggcgatagagtgaccatcagctgtcgggccagccaggacatcggcaactacctgaactggtatcagcagaaacccgacggcaccgtgaagctgctgatctactacaccagcagactgcacagcggcgtgcccagcagattttctggcagcggctctggcaccgagtacagcctgaccatctccaacctggaacaggaagatattgctacctacttctgtcagcaaggcagcgccctgccccctacatttggcggcggaacaaagctggaaatcaacggcggaggcggaagtggaggcggaggatctggcggcggaggctctgctctccagctccagcagtctggcgcagaactcgtgcggcctggcgcttctgtgaccctgagctgtaaagccagcggctacaccttcaccgactacgagatgcactgggtcaagcagacccctgtgcacggcctggaatggatcggagccatcgaccctgagacaggcggcaccgcctacaaccagaagttcgagggcaaggccatcctgaccgccgacaagagcagcagcacagcctacatggaactgcggagcctgacctccgaggacagccccgtgtactactgtgccagacggcggtactacggcagcagctccttcgactattggggccagggcaccaccctgaccgtgtctagtacgcgtggaggcggatctaaagttgctgctcttaaagaaaaggtcgcggctctgaaagaaaaagtggcggcgctcaaggagaaagttgcagctctcaaagaa

SEQ ID NO: 1593 - DNA, 897 bp, Artificial Sequence
  Synthetic Polynucloetide
atggccttaccagtgaccgccttgctcctgccgctggccttgctgctccacgccgccaggccggacatcgtgctgacacagagccctgccaccctgtctctgagccctggcgatagagccaccatcagctgtagagccagcgagagcgtgaccatcctgggcagccacctgatctactggtatcagcagaagcccggccagccccccagactgctgattcagctggcctccaatgtgcagaccggcgtgccagccagattttccggcagcggcagcagaaccgacttcaccctgaccatcagcagcgtggaacccgaggacttcgccgtgtactactgcctccagagccggaccatccccagaacattcggccagggcaccaagctggaaatcaagagaggcggaggcggaagtggaggcggaggatctggcggcggaggctctcaggtgcagctggtgcagtctggccccgaagtgaagaaacccggcgagtccgtgaagatcagctgcaaggccagcggctacaccttccggcactacagcatgaactgggtcaagcaggccccaggccagggcctgaagtggatgggcagaatcaacaccgagagcggcgtgcccatctacgccgacgacttcaagggccggttcagcttcaccgtggacaccagcgccagcaccgcctacctggaaatctccagcctgaccagcgaggataccgccgtgtatttctgctccaacgactacctgtacagcctggatttctggggccagggaaccaccctgacagtgtcctctacgcgtggaggcggatctaaagttgctgctcttaaagaaaaggtcgcggctctgaaagaaaaagtggcggcgctcaaggagaaagttgcagctctcaaagaa

SEQ ID NO: 1594 - DNA, 897 bp, Artificial Sequence
  Synthetic Polynucloetide
atggccttaccagtgaccgccttgctcctgccgctggccttgctgctccacgccgccaggccggacatccagatgacccagagccctagctcactgagcgccagcgtgggcgacagggtgaccattacctgctccgccagccaggacatcagcaactacctgaactggtaccagcagaagcccggcaaggcccccaagctgctgatctactacacctccaacctgcactccggcgtgcccagcaggttcagcggaagcggcagcggcaccgatttcaccctgaccatctccagcctgcagcccgaggacttcgccacctactactgccagcagtacaggaagctcccctggactttcggccagggcaccaaactggagatcaagcgtggcggaggcggaagtggaggcggaggatctggcggcggaggctctcaggtgcagctggtccagagcggcgccgaagtgaagaagcccggcagctccgtgaaagtgagctgcaaggccagcggcggcaccttcagcaactactggatgcactgggtgaggcaggcccccggacagggcctggagtggatgggcgccacctacaggggccacagcgacacctactacaaccagaagttcaagggccgggtgaccatcaccgccgacaagagcaccagcaccgcctacatggaactgagcagcctcaggagcgaggacaccgctgtgtattactgcgccaggggcgccatctacgacggctacgacgtgctggacaactggggccagggcacactggtgaccgtgtccagcacgcgtggaggcggatctaaagttgctgctcttaaagaaaaggtcgcggctctgaaagaaaaagtggcggcgctcaaggagaaagttgcagctctcaaagaa

SEQ ID NO: 1595 - DNA, 912 bp, Artificial Sequence
  Synthetic Polynucloetide
atggccttaccagtgaccgccttgctcctgccgctggccttgctgctccacgccgccaggccggacatcgtgatgacccagagccccgatagcctggccgtgtctctgggagagagagccaccatcaactgcgagagcagccagagcctgctgaacagcggcaaccagaagaactacctgacctggtatcagcagaagcccggccagccccccaagcccctgatctattgggccagcaccagagaaagcggcgtgcccgatagattcagcggcagcggaagcggcaccgacttcaccctgaccatcagttctcttcaggccgaggacgtggccgtgtactactgccagaacgactacagctacccctacaccttcggccagggcaccaagctggaaatcaagagaggcggaggcggaagtggaggcggaggatctggcggcggaggctctgaagtgcagctggtgcagtctggggccgaagtgaagaagcctggcgagagcctgaagatcagctgcaagggcagcggctacagcttcaccgactactacatgaagtgggccagacagatgcccggcaagggcctggaatggatgggcgacatcatccccagcaacggggccaccttctacaaccagaaattcaagggccaagtgaccatctccgccgacaagagcatcagcaccacctacctccagtggtccagcctgaaggccagcgacaccgccatgtactattgcgccagaagccatctgctgcgggccagttggttcgcctattggggccagggaacaatggtcacagtgtccagcacgcgtggaggcggatctaaagttgctgctcttaaagaaaaggtcgcggctctgaaagaaaaagtggcggcgctcaaggagaaagttgcagctctcaaagaa

SEQ ID NO: 1596 - DNA, 897 bp, Artificial Sequence
  Synthetic Polynucloetide
atggccttaccagtgaccgccttgctcctgccgctggccttgctgctccacgccgccaggccggacatccagatgacccagtctaccagttccctgagtgcatccctcggagacagggtgacgatcagttgcagcgcaagccaagggatcaataactatctgaactggtatcagcagaaaccggacggaacagtcgaactcctgatttattacaccagcacccttcagagtggcgtcccttcccggttcagtggctccggaagcgggaccgattactccctgaccatttctaatctggagccagaggacataggaacgtattattgccagcagtatagtaaactgccacgaacttttggaggggggacgaaactggagatcaaaggcggaggcggaagtggaggcggaggatctggcggcggaggctctcaggtgcaactccagcagtccggaagcgagcttatgatgccaggggcatcagtgaagatcagctgcaaggctactggctacaccttctctaattactggatagagtgggttaaacaaaggccagggcacggcctggaatggatcggcgagatcctgcctgggacaggccgaaccatttataacgagaagttcaaaggcaaggctactttcaccgcagatataagctctaatacagtgcaaatgcagctctcttccctgacaagtgaggatagtgccgtgtattattgcgcacgaagagattactatggaaatttttattacgctatggattattggggtcaaggaacaagtgtgaccgttagcagcacgcgtggaggcggatctaaagttgctgctcttaaagaaaaggtcgcggctctgaaagaaaaagtggcggcgctcaaggagaaagttgcagctctcaaagaa

SEQ ID NO: 1597 - DNA, 882 bp, Artificial Sequence
  Synthetic Polynucloetide
atggccttaccagtgaccgccttgctcctgccgctggccttgctgctccacgccgccaggccggacatccagatgacccagagccctgccagcctgtccgtgtctgtgggcgagacagtgaccatcacctgtcgggccagcgagaacatctacagcaacctggcctggtatcagcagaagcagggcaagagcccccaactgctggtgtacgccgccaccaatctggccgatggcgtgcccagcagattttccggctctggcagcggcacccagtacagcctgaagatcaacagcctccagagcgaggacttcggcagctactactgccagcacttctggggcacctggacctttggaggaggcaccaccctggaaatcaagggcggaggcggaagtggaggcggaggatctggcggcggaggctctgaagtgcaactccagcagagcggccctgagcttgtgaagcctggcgcttccgtgaagatgagctgcaaggccagcggctacaccttcaccgactactacatgaagtggatgaagcagagccacggcaagtccctggaatggatcggcgacatcaaccccaacaacggcggcaccacctacaaccagaagttcaagggcaaggccaccctgaccgtggacaagagcagcagcaccgcctacatgcaactgaacagcctgaccagcgaggacagcgccgtgtactactgcgccagagactacggctacggctatttcgactactggggccagggcacaaccctgacagtgtcctctacgcgtggaggcggatctaaagttgctgctcttaaagaaaaggtcgcggctctgaaagaaaaagtggcggcgctcaaggagaaagttgcagctctcaaagaa

SEQ ID NO: 1598 - DNA, 894 bp, Artificial Sequence
  Synthetic Polynucloetide
atggccttaccagtgaccgccttgctcctgccgctggccttgctgctccacgccgccaggccggacgagatcgtgctgacacagagccccgccaccctgtcactgtctccaggcgaaagagccaccctgagctgtagcgccagcagcagcgtgtcctacatgcactggtatcagcagaagcccggccaggcccccagactgctgatctacgataccagcaagctggcctccggcatccccgccagattttctggcagcggctccggcaccgacttcaccctgacaatcagcagcctggaacccgaggacgtggccgtgtactactgttttcaaggcagcgtgtaccccttcaccttcggccagggcaccaagctggaaatcaagagaggtggcggtggctcgggcggtggtgggtcgggtggcggcggatctcaggtgcagctccaggaatctggccctggcctcgtgaagcctagccagaccctgagcctgacctgtaccgtgtctggcggcagcatcagcacaagcggcatgggcgtgggctggatcagacagcaccctggcaagggcctggaatggatcggccacatttggtgggacgacgacaagcggtacaaccccgccctgaagtccagagtgaccatcagcgtggacaccagcaagaaccagttcagcctgaagctgagcagcgtgacagccgccgataccgccgtgtattattgcgcccggatggaactgtggtcctactacttcgactactggggccagggaaccctcgtgaccgtgtctagtacgcgtggaggcggatctaaagttgctgctcttaaagaaaaggtcgcggctctgaaagaaaaagtggcggcgctcaaggagaaagttgcagctctcaaagaa

SEQ ID NO: 1599 - DNA, 891 bp, Artificial Sequence
  Synthetic Polynucloetide
atggccttaccagtgaccgccttgctcctgccgctggccttgctgctccacgccgccaggccggacatccagatgacacagactacatcctccctgtctgcctctctgggagacagagtcaccatcagttgcagggcaagtcaggacattagtaaatatttaaattggtatcagcagaaaccagatggaactgttaaactcctgatctaccatacatcaagattacactcaggagtcccatcaaggttcagtggcagtgggtctggaacagattattctctcaccattagcaacctggagcaagaagatattgccacttacttttgccaacagggtaatacgcttccgtacacgttcggaggggggaccaagctggagatcacaggtggcggtggctcgggcggtggtgggtcgggtggcggcggatctgaggtgaaactgcaggagtcaggacctggcctggtggcgccctcacagagcctgtccgtcacatgcactgtctcaggggtctcattacccgactatggtgtaagctggattcgccagcctccacgaaagggtctggagtggctgggagtaatatggggtagtgaaaccacatactataattcagctctcaaatccagactgaccatcatcaaggacaactccaagagccaagttttcttaaaaatgaacagtctgcaaactgatgacacagccatttactactgtgccaaacattattactacggtggtagctatgctatggactactggggtcaaggaacctcagtcaccgtctcctcaacgcgtggaggcggatctaaagttgctgctcttaaagaaaaggtcgcggctctgaaagaaaaagtggcggcgctcaaggagaaagttgcagctctcaaagaa

SEQ ID NO: 1600 - DNA, 891 bp, Artificial Sequence
  Synthetic Polynucloetide
atggccttaccagtgaccgccttgctcctgccgctggccttgctgctccacgccgccaggccggagatcgtgatgacccagagccctgccaccctgtctctgagccctggcgaaagagccaccctgagctgtagagccagccaggacatcagcaagtacctgaactggtatcagcagaagcccggccaggcccccagactgctgatctaccacaccagcagactgcacagcggcatccccgccagattttctggctctggcagcggcaccgactacaccctgacaatcagcagcctccagcccgaggacttcgccgtgtacttctgtcagcaaggcaacaccctgccctacaccttcggccagggcaccaagctggaaatcaagggcggaggcggaagtggaggcggaggatctggcggcggaggctctcaggtgcaactccaggaatctggccctggcctcgtgaagcccagcgagacactgagcctgacctgtaccgtgtccggcgtgtccctgcctgactatggcgtgtcctggatcagacagccccctggcaagggcctggaatggatcggagtgatttggggcagcgaaaccacctactacaacagctccctgaagtccagagtgaccatctccaaggacaactccaagaaccaggtgtccctgaagctgagcagcgtgacagccgccgacaccgccgtgtattactgcgccaagcactactactacggcggcagctacgctatggactactggggccagggaaccctcgtgaccgtgtctagtacgcgtggaggcggatctaaagttgctgctcttaaagaaaaggtcgcggctctgaaagaaaaagtggcggcgctcaaggagaaagttgcagctctcaaagaa

SEQ ID NO: 1601 - DNA, 897 bp, Artificial Sequence
  Synthetic Polynucloetide
atggccttaccagtgaccgccttgctcctgccgctggccttgctgctccacgccgccaggccggagatcgtgctgacacagagccctgccaccctgtctctgagccctggcgaaagagccaccctgagctgtagagccagccagagcgtgtccagctacctggcctggtatcagcagaagcccggccaggctccccggctgctgatctacgatgccagcaatagagccaccggcatccccgccagattttccggctctggcagcggcaccgacttcaccctgaccatcagctccctggaacccgaggacttcgccgtgtactactgccagcagcggagcaactggcccatcacattcggccagggcacccggctggaaatcaaaggcggaggcggaagtggaggcggaggatctggcggcggaggctctgaagtgcagctggtggaatcaggcggcggactggtgcagcctggcagaagcctgagactgagctgtgccgccagcggcttcaccttcaacgactacgccatgcactgggtgcgccaggcccctggaaaaggactggaatgggtgtccacaatcagctggaacagcggcagcatcggctacgccgatagcgtgaagggccggttcaccatcagccgggacaacgccaagaagtccctgtacctccagatgaacagcctgcgggccgaggacacagccctgtactattgcgccaaggacatccagtacggcaactactactacggcatggacgtgtggggccagggaaccaccgtgaccgtgtcatctacgcgtggaggcggatctaaagttgctgctcttaaagaaaaggtcgcggctctgaaagaaaaagtggcggcgctcaaggagaaagttgcagctctcaaagaa

SEQ ID NO: 1602 - DNA, 906 bp, Artificial Sequence
  Synthetic Polynucloetide
atggccttaccagtgaccgccttgctcctgccgctggccttgctgctccacgccgccaggccggacatcgtgatgacccagacccccctgagcctgcctgtgacacctggcgagcctgccagcatctcctgcagaagcagcaagagcctgctgcacagcaacggcatcacctacctgtactggtatctgcagaaacccggccagagcccccaactgctgatctaccagatgagcaacctggtgtccggcgtgcccgacagattttctggcagcggctccggcaccgacttcaccctgaagatcagccgggtggaagccgaggacgtgggcgtgtactactgcgcccagaacctggaactgccctacacctttggcggcggaacaaaggtggaaatcaagcggggcggaggcggaagtggaggcggaggatctggcggcggaggctctcaggtgcaactggtgcagagcggagccgaagtgaaaaagcccggcagcagcgtgaaggtgtcctgcaaggccagcggctacgccttcagctactcctggatcaactgggtgcgccaggcccctggacagggcctggaatggatgggcagaatcttccccggcgacggcgacaccgactacaacggcaagttcaagggcagagtgaccatcaccgccgacaagagcaccagcaccgcctacatggaactgagcagcctgcggagcgaggataccgccgtgtactattgtgccagaaacgtgttcgacggctactggctggtgtactggggccagggaacacttgtgaccgtgtccagcacgcgtggaggcggatctaaagttgctgctcttaaagaaaaggtcgcggctctgaaagaaaaagtggcggcgctcaaggagaaagttgcagctctcaaagaa

SEQ ID NO: 1603 - DNA, 909 bp, Artificial Sequence
  Synthetic Polynucloetide
atggccttaccagtgaccgccttgctcctgccgctggccttgctgctccacgccgccaggccggacatccagatgacccagagccccagcagcctgtctgccagcgtgggcgacagagtgaccatcacctgtcggagcagccagagcatcgtgcactccgtgggcaacaccttcctggaatggtatcagcagaagcccggcaaggcccccaagctgctgatctacaaggtgtccaacagattcagcggcgtgcccagcaggtttagcggctctggcagcggcaccgacttcaccctgaccatctctagcctccagcccgaggacttcgccacctactactgttttcaaggcagccagttcccctacaccttcggccagggaacaaaggtggaaatcaagcggggcggaggcggaagtggaggcggaggatctggcggcggaggctctgaagtgcaactggtggaaagcggaggcggcctggtgcagcctggcggatctctgagactgagctgtgccgccagcggctacgagttcagccggtcctggatgaactgggtgcgccaggcccctggcaagggactggaatgggtgggaagaatctaccccggcgacggcgacaccaactacagcggcaagttcaagggccggttcaccatcagcgccgacaccagcaagaacaccgcctacctccagatgaacagcctgcgggccgaggataccgccgtgtactactgtgccagagatggcagctcctgggactggtacttcgacgtgtggggacagggaacccttgtgaccgtgtccagcacgcgtggaggcggatctaaagttgctgctcttaaagaaaaggtcgcggctctgaaagaaaaagtggcggcgctcaaggagaaagttgcagctctcaaagaa

SEQ ID NO: 1604 - DNA, 891 bp, Artificial Sequence
  Synthetic Polynucloetide
atggccttaccagtgaccgccttgctcctgccgctggccttgctgctccacgccgccaggccggagatcgtgctgacacagagccctggcaccctgagcctgtctccaggcgaaagagccacactgagctgtcgggcctctcagagcgtgggaggctacctggcttggtatcagcagaagccaggccaggcccccagactgctgatctacgacgccagcaatcgggccacaggcatccccgccagattttctggcagcggctccggcaccgacttcaccctgacaatcagcagcctggaacccgaggacttcgccgtgtactactgccagcagcggaacaactggccccccatgtacacattcggccagggcaccaagctggaaatcaagagaggcggaggcggaagtggaggcggaggatctggcggcggaggctctcaggtgcaactggtgcagagcggagccgaagtgaagaaacccggcagcagcgtgaaggtgtcctgcaaggcttccggcggcaccttcagcagctacgccatttcttgggtgcgccaggctcctggacagggcctggaatggatgggcggcatcatccctatcctgggcaccgccaactacgcccagaaattccagggcagagtgaccatcaccgccgacgagagcaccagcaccgcctacatggaactgagcagcctgcggagcgaggacacagccgtgtattattgcgccagatggggcggaggggccttcgacatttggggccagggaacaatggtcaccgtgtccagcacgcgtggaggcggatctaaagttgctgctcttaaagaaaaggtcgcggctctgaaagaaaaagtggcggcgctcaaggagaaagttgcagctctcaaagaa

SEQ ID NO: 1605 - DNA, 882 bp, Artificial Sequence
  Synthetic Polynucloetide
atggccttaccagtgaccgccttgctcctgccgctggccttgctgctccacgccgccaggccggacatccagatgacccagagccccgccaccatcgagaacacaagcctgtctgccagcgtgggcgacagagtgaccatcacctgtagagccagccagggcatcagctcttggctgacctggtatcagcagaagcccgagaaggcccccaagagcctgatctacgccgccagctctctgcagtctggcgtgcccagcagattttccggcagcggctctggcaccgacttcaccctgacaatcagcagcctgcagcccgaggacttcgccacctactactgccagcagtacgacagctaccccatcaccttcggccagggcacccggctggaaatcaagggcggaggcggaagtggaggcggaggatctggcggcggaggctctcaggtgcaactgcagcagtggggagccggactgctgaagcctagcgagacactgagcctgacctgcgccgtgtacggcggcagcttcagcgcctactattggagctggatcagacagccccctggcaagggcctggaatggatcggcgacatcaatcacggcggaggcaccaactacaaccccagcctgaagtcccgcgtgaccatctccgtggacaccagcaagaaccagttctccctgaagctgaacagcgtgacagccgccgacacagccgtgtactactgtgccagcctgaccgcctattggggccagggatctcttgtgaccgtgtccagcacgcgtggaggcggatctaaagttgctgctcttaaagaaaaggtcgcggctctgaaagaaaaagtggcggcgctcaaggagaaagttgcagctctcaaagaa

SEQ ID NO: 1606 - DNA, 894 bp, Artificial Sequence
  Synthetic Polynucloetide
atggccttaccagtgaccgccttgctcctgccgctggccttgctgctccacgccgccaggccggagatcgtgctgacccagagccctgatagcctggccgtgtctctgggcgagagagccaccatcaactgcaaggccagccagagcgtggacttcgacggcgacagctacctgaactggtatcagcagaagcccggccagccccccaaggtgctgatctatgccgccagcacactgcagagcggcgtgcccagcagattttctggcagcggctccggcaccgacttcaccctgaccatcaacagcctggaagccgaggacgccgccacctactactgccagcagagcaacgaggacccctggacctttggcggcggaacaaaggtggaaatcaagggcggaggcggaagtggaggcggaggatctggcggcggaggctctcaggtgcaactggtgcagtccggcgctgaagtgaagaaacctggggccagcgtgaaggtgtcctgcaaggtgtccggctacacctttaccgactactacattacctgggtgcgccaggcccctggacaggccctggaatggatgggctggatctaccccggcagcggcaacaccaagtacagccagaagttccagggcagattcgtgttcagcgtggacaccagcgccagcaccgcctacctgcaactgtctagcctgaaggccgaagataccgccgtgtactactgcgccaactacggcaactattggttcgcctattggggccagggaacccttgtgaccgtgtcctctacgcgtggaggcggatctaaagttgctgctcttaaagaaaaggtcgcggctctgaaagaaaaagtggcggcgctcaaggagaaagttgcagctctcaaagaa

SEQ ID NO: 1607 - DNA, 888 bp, Artificial Sequence
  Synthetic Polynucloetide
atggccttaccagtgaccgccttgctcctgccgctggccttgctgctccacgccgccaggccggacatccagatgacccagagccccagcagcctgtctgccagcgtgggcgacagagtgaccatcacctgtagagccagccagggcatcagctcttggctggcctggtatcagcagaagcccgagaaggcccccaagagcctgatctacgccgcctctagtctccagagcggcgtgcccagcagattttctggcagcggctccggcaccgacttcaccctgacaatcagctccctccagcccgaggacttcgccacctactactgccagcagtacaacagctaccctcccacctttggcggaggcaccaaggtggaaatcaagggcggaggcggaagtggaggcggaggatctggcggcggaggctctgaagtgcaactggtgcagtctggcggagggctggtgcatcctgggggaagcctgagactgagctgtgccggctctggcttcgccttcagcagcagcaccatgcactggatcagacaggcccctggcaagggcctggaatggatcagcctgatcggaagcggagggggcatctactacggcgacagcgtgaagggccggttcaccatcagccgggacaacgccaagaacagcctgtacctccagatgaactccctgcgggccgaggacatggccgtgtactattgtgtgcggggctacttcgactgggtggactacttcgattactggggccagggcaccctcgtgaccgtgtcatctacgcgtggaggcggatctaaagttgctgctcttaaagaaaaggtcgcggctctgaaagaaaaagtggcggcgctcaaggagaaagttgcagctctcaaagaa

SEQ ID NO: 1608 - DNA, 906 bp, Artificial Sequence
  Synthetic Polynucloetide
atggccttaccagtgaccgccttgctcctgccgctggccttgctgctccacgccgccaggccggacgtcgtgatgacccagagccctctgagcctgcctgtgacactgggacagcctgccagcatctcctgtcggagcagccagagcatcgtgcacagcgacggcaacacctacctggaatggtatcagcagcggccaggccagagccccagacggctgatctacaaggtgtccaacagattcagcggcgtgcccgacagattctccggcagcggctctggcaccgacttcaccctgaagatcagcagagtggaagccgaggacgtgggcgtgtactactgttttcaaggcagccacgccccctggacctttggcggaggaacaaaggtggaaatcaagggcggaggcggaagtggaggcggaggatctggcggcggaggctctgaagtgcaactggtggaatcaggcggcggactggtgcagcctggcggatctctgagactgagctgtgccgccagcggcttcaccttcagcagctacggaatgcactgggtgcgccaggcccctggcaaaggactggaatgggtggcctacatcaccaccagaagcagcaccatctactacgccgacagcgtgaagggccggttcaccatctccagagacaacgccaagaacagcctgtacctccagatgaactccctgcgggccgaggacaccgccgtgtactattgcaccagagagcccctgaccggctactacgctatggactattggggccagggcaccagcgtgaccgtgtctagtacgcgtggaggcggatctaaagttgctgctcttaaagaaaaggtcgcggctctgaaagaaaaagtggcggcgctcaaggagaaagttgcagctctcaaagaa

SEQ ID NO: 1609 - DNA, 876 bp, Artificial Sequence
  Synthetic Polynucloetide
atggccttaccagtgaccgccttgctcctgccgctggccttgctgctccacgccgccaggccgcagatcgtgctgacacagagccctgccctgatgagcgccagccctggcgagaaagtgaccatgacctgtagcgccagcagcagcgtgcgctacatgtactggtatcagcagaagcccagaagcagccccaagccctggattcacctgaccagcaatctggcctctggcgtgcccgctagattttccggctctggcagcggcaccagctacagcctgaccatcagcagcatggaagccgaggacgccgccacctactactgccagcagtggtccagccaccccttcacatttggctccggcaccaagctggaaatcaagggcggaggcggaagtggaggcggaggatctggcggcggaggctctgatgtgcaactccaggaaagcggccctggccttgtgaagcctagccagagcctgtccctgacctgtaccgtgaccggcttcagcatcaccagcgactactcttggaactggatcagacagttccctggcaacaaactggaatggatgggctacatcagctactccggccacacctcctacaaccccagcctggaaagccggatctccatcaccagagacaccagcaagaaccagttcttcttgcaactgaacagcgtgaccaccgaggataccgccacatattactgtaccagaggcaactgggacgtggtgtactggggccagggcacacttgtgaccgtgtctgctacgcgtggaggcggatctaaagttgctgctcttaaagaaaaggtcgcggctctgaaagaaaaagtggcggcgctcaaggagaaagttgcagctctcaaagaa

SEQ ID NO: 1610 - DNA, 903 bp, Artificial Sequence
  Synthetic Polynucloetide
atggccttaccagtgaccgccttgctcctgccgctggccttgctgctccacgccgccaggccggagatcgtgctgacacagagccctggaagcctggccgtgtctcctggcgagcgcgtgacaatgagctgcaagagcagccagagcgtgttcttcagcagctcccagaagaactacctggcctggtatcagcagatccccggccagagccccagactgctgatctactgggccagcaccagagaaagcggcgtgcccgatagattcaccggcagcggctctggcaccgacttcaccctgacaatcagcagcgtgcagcccgaggacctggctatctactactgccaccagtacctgagcagccggaccttcggccagggcaccaagctggaaatcaagagaggcggaggcggaagtggaggcggaggatctggcggcggaggctctcaggtgcaactgcagcagcctggcgctgaggtcgtgaagccaggcgcttccgtgaagatgtcctgcaaggccagcggctacaccttcaccagctactacatccactggatcaagcagacccctggacagggcctggaatgggtgggagtgatctaccccggcaacgacgacatcagctacaaccagaagttccagggcaaggccaccctgaccgccgacaagtctagcaccaccgcctacatgcaactgtccagcctgaccagcgaggacagcgccgtgtactactgcgccagagaagtgcggctgcggtacttcgatgtgtggggccagggaaccaccgtgaccgtgtcatctacgcgtggaggcggatctaaagttgctgctcttaaagaaaaggtcgcggctctgaaagaaaaagtggcggcgctcaaggagaaagttgcagctctcaaagaa

SEQ ID NO: 1611 - DNA, 915 bp, Artificial Sequence
  Synthetic Polynucloetide
atggccttaccagtgaccgccttgctcctgccgctggccttgctgctccacgccgccaggccggacatcgtgatgacacagtcaccagatagcctcaccgtctccctgggggagcggaccaccattaattgtaaatccagccaaagcgtgctggactcaagcaagaacaagaatagcctcgcctggtatcagcagaagcccggtcagcctccaaagctgctgctttcttgggcctccaccagagagtccgggattcctgataggtttagtggttcaggctccggcacagattttactctgaccattgattctctccagccagaggattctgcaacttattactgccagcaaagcgcccactttcctataacttttggccagggaacccgacttgaaatcaagggcggaggcggaagtggaggcggaggatctggcggcggaggctctcaggtgcagctggtgcagagcggtgccgaagtgaagaaaccaggtgcatccgttaaagtttcatgtaaggctagtggatataccttcaccaattacggaatgaactgggtgaaacaggcccctggccagggactgaagtggatggggtggattaacacctacaccggggagccgacttatgcagacgactttaaggggcgggtcacgatgacctccgacacctccaccagtaccgcctacctggagctgcacaaccttaggtcagacgataccgccgtgtattactgtgcccgatggtcttggtccgacggatactatgtctacttcgactattggggccaggggaccacagttaccgtgtcctctacgcgtggaggcggatctaaagttgctgctcttaaagaaaaggtcgcggctctgaaagaaaaagtggcggcgctcaaggagaaagttgcagctctcaaagaa

SEQ ID NO: 1612 - DNA, 915 bp, Artificial Sequence
  Synthetic Polynucloetide
atggccttaccagtgaccgccttgctcctgccgctggccttgctgctccacgccgccaggccggatgtgctgctgacccagagccctctgagcctgcctgtgacactgggacagcctgccagcatctcctgtcggagcagccagaccatcgtgcacagcaacggcaacacctacctggaatggttccagcagcggccaggccagagccccagactgctgatctaccaggtgtccaacagattcagcggcgtgcccgacagattctccggcagcggctctggcaccgacttcaccctgaagatcagccgggtggaagccgaggacgtgggcgtgtactactgttttcaaggcagccacgtgccccggacctttggcggaggaacaaaggtggaaatcaagagaggcggaggcggaagtggaggcggaggatctggcggcggaggctctcagatccaactggtgcagagcggcagcgagctgaagaaacctggggccagcgtgaaggtgtcctgcaaggccagcggctacacctttaccaactacggcatgaactgggtgcgccaggcccctggacagggcctgaaatggatgggctggatcaacaccaacaccggcgagcctaagtacgccgaagagttcaagggcagattcgccctgagcctggacaccagcgtgtccacagcctacctccagatcaacagcctgaaggccgaggataccgccgtgtacttctgcgccagaggctacggcaactacgccagaggggcttggctggcctattggggccagggaacactcgtgaccgtgtcctctacgcgtggaggcggatctaaagttgctgctcttaaagaaaaggtcgcggctctgaaagaaaaagtggcggcgctcaaggagaaagttgcagctctcaaagaa

SEQ ID NO: 1613 - DNA, 900 bp, Artificial Sequence
  Synthetic Polynucloetide
atggccttaccagtgaccgccttgctcctgccgctggccttgctgctccacgccgccaggccggaccacatcgtgctgacccagagccctagcagcctgtctgccagcctgggcgacagagtgaccatcagctgtagagccagccaggacatcagcacctacctgaactggtatcagcagaaacccgacggcaccgtgaagctgctgatcttctacaccagcagactgcacgccggggtgcccagcagattttctggcagcggctctggcacccaccacagcctgaccatctccaacctggaacaggaagatattgctacctacttctgtcagcaaggcaacagcctgcccttcaccttcggcagcggcaccaagctggaaatcaagagaggcggaggcggaagtggaggcggaggatctggcggcggaggctctcaggtgcagctgaaagagagcggccctgagctggaaaagcctggggccagcgtgaagattagctgcaaggccagcggctacagcttcaccgcctacagcatgaactgggtcaagcagaacaacggcatgagcctggaatggatcggcagcatcgacccctactacggcgacaccaaatacgcccagaagttcaagggcaaggccaccctgaccgtggataaggccagcagcaccgcctacctccagctgaagtctctgaccagcgaggacagcgccgtgtactactgcgccagacggatgattaccaccggcgactggtacttcgacgtgtggggagccggaaccaccgtgacagtgtctagcacgcgtggaggcggatctaaagttgctgctcttaaagaaaaggtcgcggctctgaaagaaaaagtggcggcgctcaaggagaaagttgcagctctcaaagaa

SEQ ID NO: 1614 - DNA, 900 bp, Artificial Sequence; identical to SEQ ID NO: 1613
  Synthetic Polynucloetide

SEQ ID NO: 1615 - DNA, 900 bp, Artificial Sequence
  Synthetic Polynucloetide
atggccttaccagtgaccgccttgctcctgccgctggccttgctgctccacgccgccaggccggacatcgtgatgacccagagccccgatagcctggccgtgtctctgggagagagagccaccatcaactgccgggccagcaagagcgtgtccaccagcggctacagcttcatgcactggtatcagcagaagcccggccagccccccaagctgctgatctacctggcctccaacctggaaagcggcgtgcccgatagattcagcggcagcggctctggcaccgacttcaccctgaccatcagttctcttcaggccgaggacgtggccgtgtactactgccagcacagcagagaggtgccctggacattcggccagggcacaaaggtggaaatcaagcggggcggaggcggaagtggaggcggaggatctggcggcggaggctctcaggtgcagctggtgcagtctggggccgaagtgaagaaacctggggccagcgtgaaggtgtcctgcaaggccagcggatacacctttaccaactacggcatgaactgggtgcgccaggcccctggacagggcctggaatggatgggctggatcaacacctacaccggcgagcccacatacgccgacgccttcaagggcagattcgccttcagcctggacaccagcacctccaccgcctacctccagatcaacagcctgcggagcgacgacaccgccgtgtattattgcgccagagattacggcgactacgggatggactattggggccagggaaccaccgtgaccgtgtcctctacgcgtggaggcggatctaaagttgctgctcttaaagaaaaggtcgcggctctgaaagaaaaagtggcggcgctcaaggagaaagttgcagctctcaaagaa

SEQ ID NO: 1616 - DNA, 888 bp, Artificial Sequence
  Synthetic Polynucloetide
atggccttaccagtgaccgccttgctcctgccgctggccttgctgctccacgccgccaggccggacatcgtgatgacccagacccccctgaccctgagcgtgacaatcggacagcctgccagcatctcctgcaagagcagccagagcctgctggacagcgacggcaagacctacctgaactggctgctgcagaggccaggccagagccccgagagactgatctacctggtgtccaagctggactccggcgtgcccgatagattcacaggcagcggctccggcaccgacttcaccctgaagatcagccgggtggaagccgaggacctgggcgtgtactgttgttggcagggcacccacttcccttacaccttcggcggagggaccaaggtggaaatcaagggcggcggaggcggaagtggaggcggaggatctggcggcggaggctctcaggtgcaactgcagcagcctggcgctgaacttgtgcggccaggcgcctctgtgaagctgagctgtaaagccagcggctacaccttcaccagctactggatgaactgggtcaagcagcgcccaggccagggcctggaatggatcggaatgatcgaccccagcgacagcgagacacactacaaccacatcttcaaggacaaggccaccctgaccgtggacaagtccagcagcacagcctacctgcaactgtccagcctgaccagcgaggacagcgccgtgtactactgcgcccggaacctgtatctgtggggccagggaacaagcgtgaccgtgtctagcacgcgtggaggcggatctaaagttgctgctcttaaagaaaaggtcgcggctctgaaagaaaaagtggcggcgctcaaggagaaagttgcagctctcaaagaa

SEQ ID NO: 1617 - DNA, 897 bp, Artificial Sequence
  Synthetic Polynucloetide
atggccttaccagtgaccgccttgctcctgccgctggccttgctgctccacgccgccaggccggacatccagttgacccagtcccccagctcactcagcgccagtgtgggggaccgggtgaccattacctgtaaagccagtcagagtgtggactatgagggggatagcttcctgaattggtatcagcagaagcctggcaaagccccaaagctgctgatctacgctgcatctaatctggagtcaggcgtgccttctaggttctccggtagtgggtctgggaccgatttcacattgaccatttcatccctccaacccgaggatttcgctacatattactgtcagcagtccaatgaggaccctctcacctttggccagggcaccaaagttgaaattaagagaggcggaggcggaagtggaggcggaggatctggcggcggaggctctgaagtccaacttgtggagtctggagggggcctggtgcagcccggcggctctctcagactgtcttgtgcggcaagcggctacaccttcagctcttactggatagaatgggtgaggcaggcacctggaaagggactggagtggattggagagattctgccaggagggggagatacaaattacaatgaaatcttcaaggggcgggccaccttttcagcggataccagcaagaatacagcttacctgcagatgaatagcctccgggcagaagataccgctgtttattattgcacgagacgggtgccaataagactggactattgggggcaagggactcttgtcaccgtcagttcaacgcgtggaggcggatctaaagttgctgctcttaaagaaaaggtcgcggctctgaaagaaaaagtggcggcgctcaaggagaaagttgcagctctcaaagaa

SEQ ID NO: 1618 - DNA, 921 bp, Artificial Sequence
  Synthetic Polynucloetide
atggccttaccagtgaccgccttgctcctgccgctggccttgctgctccacgccgccaggccggacatcgtgatgagccagagccctagcagcctggccgtgtccgtgggcgagaaagtgaccatgagctgcaagagcagccagtccctgctgcacagcagcaaccagaagaactacctggcctggtatcagcagaagcccggccagtcccccaaggtgctgatctactgggccagcaccagagaaagcggcgtgcccgatagattcaccggcagcggctctggcaccgacttcaccctgaccatcaccagcgtgaagtccgaggacctggctgtgtactactgccagcagtattacagctacccctggaccttcggcggaggcacccggctggaaatcaaaagaggcggaggcggaagtggaggcggaggatctggcggcggaggctctgaagtgcaactccagcagagcgtggccgagcttgtgaagcctggcgcttccgtgaagatgtcctgcaaggtgtccggctacaccctgacagaccacaccatccactggatgaagcagcggcctgagcagggcctggaatggatcggctacatctaccccagggacggcatcaccggctacaacgagaagttcaagggcaaggccacactgaccgccgacaccagcagcagcacagcctacatgcaactgaacagcctgaccagcgaggacagcgccgtgtacttctgtgccagatggggctacagctacagaaactacgcctactactacgactactggggccagggcacaaccctgaccgtgtctagtacgcgtggaggcggatctaaagttgctgctcttaaagaaaaggtcgcggctctgaaagaaaaagtggcggcgctcaaggagaaagttgcagctctcaaagaa

SEQ ID NO: 1619 - DNA, 912 bp, Artificial Sequence
  Synthetic Polynucloetide
atggccttaccagtgaccgccttgctcctgccgctggccttgctgctccacgccgccaggccggagatcgtgctgacacagagccctggcaccctgagcctgtctccaggcgaaagagccacactgagctgtcgggccagccagagcgtgtccagctcttacctggcctggtatcagcagaagcccggccaggctccccggctgctgatctacggaacaagcagcagagccaccggcatccccgacagattttctggcagcggctccggcaccgacttcaccctgacaatcagcagactggaacccgaggacttcgccgtgtactactgccagcagtacggcagcagccccttcacctttggcggaggcaccaaggtggaaatcaagagaggcggaggcggaagtggaggcggaggatctggcggcggaggctctcaggtgcaactccaggaatctggccccggactggctaagcccagcgagacactgagcctgacctgtaccgtgtccggcgacagcatcaccagctactactggtcctggatcagacagccccctggcaagggcctggaatggatcggctacatctactacagcggcagcaccaactacaaccccagcctgaagtccagagtgaccatcagcgtggacaccagcaagaaccagttctccctgaagctgagcagcgtgacagccgccgacaccgccgtgtattattgcgccagagatcagcggagaatcgccgctgccggcacccacttttacggcatggatgtgtggggccagggcaccaccgtgaccgtgtcatctacgcgtggaggcggatctaaagttgctgctcttaaagaaaaggtcgcggctctgaaagaaaaagtggcggcgctcaaggagaaagttgcagctctcaaagaa

SEQ ID NO: 1620 - DNA, 882 bp, Artificial Sequence
  Synthetic Polynucloetide
atggccttaccagtgaccgccttgctcctgccgctggccttgctgctccacgccgccaggccggacatccagatgacccagagccccagcagcctgtctgccagcgtgggcgacagagtgaccatcacctgtagagccagccagagcatcagcctgtggctgaactggtatcagcagaagcccggcaaggcccccaagctgctgatctacgccgccagcacactccagagcggcgtgccaagcagattttccggcagcggctccggcaccgacttcaccctgacaatcagctccctccagcccgaggacttcgccacctactactgccagcagtactacaccagcccctacaccttcggccagggcaccaaggtggaaatcaagagaggcggaggcggaagtggaggcggaggatctggcggcggaggctctcaggtgcaactgctggaatctggcggcggactggtgcagcctggcggatctctgagactgagctgtgccgccagcggcttcaccttcagcagctacgccatgagctgggtgcgccaggcccctggaaaaggactggaatgggtgtccgtgatccggtccagcggcagcagcacctattacgccgatagcgtgaagggccggttcaccatcagccgggacaacagcaagaacaccctgtacctccagatgaacagcctgcgggccgaggacaccgccgtgtactattgtgctaggggaggcggctacttcgactactggggccagggaacactcgtgaccgtgtcctctacgcgtggaggcggatctaaagttgctgctcttaaagaaaaggtcgcggctctgaaagaaaaagtggcggcgctcaaggagaaagttgcagctctcaaagaa

SEQ ID NO: 1621 - DNA, 891 bp, Artificial Sequence
  Synthetic Polynucloetide
atggccttaccagtgaccgccttgctcctgccgctggccttgctgctccacgccgccaggccggacatccagatgacccagagccccagcagcctgtctgccagcgtgggcgacagagtgaccatcacctgtagagccagccagagcatcagcagctacctgaactggtatcagcagaagcccggcaaggcccccaaactgctgatctacgccgtgtccacactccagagcggcgtgcccagcagattttctggcagcggctccggcaccgacttcaccctgacaatcagctccctccagcccgaggacttcgccacctactactgtcagcagagcggcaccttccctcccaccacatttggacagggcaccaaggtggaaatcaagagaggcggaggcggaagtggaggcggaggatctggcggcggaggctctcaggtgcaactgctggaatctggcggcggactggtgcagcctggcggatctctgagactgagctgtgccgccagcggcttcaccttcagcagccacggaatgcactgggtgcgccaggcccctggaaagggactggaatgggtgtccgtgatctccggcagcggcagcaataccggctacgccgatagcgtgaagggccggttcaccatcagccgggacaacagcaagaacaccctgtacctccagatgaacagcctgcgggccgaggacaccgccgtgtactattgtgccagacagtggggcagctacgccttcgattcttggggccagggcaccctcgtgaccgtgtcatctacgcgtggaggcggatctaaagttgctgctcttaaagaaaaggtcgcggctctgaaagaaaaagtggcggcgctcaaggagaaagttgcagctctcaaagaa

SEQ ID NO: 1622 - DNA, 867 bp, Artificial Sequence
  Synthetic Polynucloetide
atggccttaccagtgaccgccttgctcctgccgctggccttgctgctccacgccgccaggccgatgacccagagccccaagttcctgctggtgtctgccggcgacagagtgaccctgacatgcaaggccagccagagcgtgaacaacgacgtgtactggtatcagcaggaacccggccagtcccccaagctgctgatctactgggccagcaccagagaaagcggcgtgcccgatagattcaccggcagcggctctggcaccgacttcaccctgacaatcagcagcgtgcaggccgaggacctggccgtgtactactgcaagcagagctacaacctgtacaccttcggcggaggcaccaagctggaaatcaagagaggcggcggaggatctggcggaggcggatctgggggcggaggctctgaatctggaagaggactggtgcagcctggcggcagcagaaagctgtcttgtgccgccagcggcttcaccttcagcaccagcggaatgcactgggtgcgccaggcccctgagaagggactggaatgggtggcctacatcagctccggcagcaccaccatctaccacgccgataccgtgaagggccggttcaccatcagccgggacaaccccaagaataccctgttcctccagatgaccagcctgcggagcgaggacaccgccatgtactattgctgcgccagaagcggccagttcggcaactacttcgactactggggccagggcaccaccctgaccgtgtcatctacgcgtggaggcggatctaaagttgctgctcttaaagaaaaggtcgcggctctgaaagaaaaagtggcggcgctcaaggagaaagttgcagctctcaaagaa

SEQ ID NO: 1623 - DNA, 882 bp, Artificial Sequence
  Synthetic Polynucloetide
atggccttaccagtgaccgccttgctcctgccgctggccttgctgctccacgccgccaggccgcagagcccatctagcctggctgtgtctgccggcgagaaagtgaccatgagctgcaagagcagccagagcctgctgaacagccggacccggaagaactacctggcctggtatcagcagaagcccggccagagccccaagctgctgatctactgggccagcaccagagaaagcggcgtgcccgatagattcaccggctctggcagcggcaccgacttcaccctgacaatcagcagcgtgcaggccgaggacctggccgtgtactactgcaagcagagcaacctgtacaccttcggcggaggcaccaagctggaaatcaagggcggaggcggaagtggaggcggaggatctggcggcggaggctctcaggtgcagctggaagagtctggacccgagcttgtgaagcctggggccagcgtgaagctgtcctgtaaagccagcggctacaccttcaccgagtacatcatccactgggtcaagcagcggagcggccagggcctggaatggatcggctggttttaccctggctccggcagcatcaagtacaacgagaagttcaaggacaaggccaccctgaccgccgacaagtccagcagcaccgtgtacatggaactgagcggcctgaccagcgaggacagcgccgtgtatttctgcgccagacacgacggctacagctacttcgactattggggccagggcaccacactgaccgtgtcctctacgcgtggaggcggatctaaagttgctgctcttaaagaaaaggtcgcggctctgaaagaaaaagtggcggcgctcaaggagaaagttgcagctctcaaagaa

SEQ ID NO: 1624 - DNA, 891 bp, Artificial Sequence
  Synthetic Polynucloetide
atggccttaccagtgaccgccttgctcctgccgctggccttgctgctccacgccgccaggccggacatccagatgacccagagccccagcagcctgtctgcctctctgggcgagagagtgtccctgacctgtcgggccacacaggaactgagcggctacctgtcttggctgcagcagaagcccgacggcaccatcaagcggctgatctacgccgccagcaccctggatagcggcgtgcccaagagattcagcggcaacagaagcggcagcgactacagcctgaccatcagctccctggaaagcgaggacttcgccgactactactgcctgcagtacgccatctacccctacaccttcggcggaggcaccaagctggaaatcaagggcggaggcggaagtggaggcggaggatctggcggcggaggctctgaggtgcaactgcagcagtctggccccgagcttgtgaagcctggcgcctccgtgaagatgagctgcaaggccagcggctacacctttaccagctacttcatccactgggtcaagcagaaacccggccagggcctggaatggatcggcttcatcaacccttacaacgacggcagcaagtacaacgagaagttcaagggcaaggccaccctgaccagcgacaagagcagcagcaccgcctacatggaactgtccagcctgacatccgaggacagcgccgtgtactactgcaccagggacgacggctactacggctacgccatggactactggggccagggaacaagcgtcaccgtgtcctctacgcgtggaggcggatctaaagttgctgctcttaaagaaaaggtcgcggctctgaaagaaaaagtggcggcgctcaaggagaaagttgcagctctcaaagaa

SEQ ID NO: 1625 - DNA, 906 bp, Artificial Sequence
  Synthetic Polynucloetide
atggccttaccagtgaccgccttgctcctgccgctggccttgctgctccacgccgccaggccggacaccatcgtgctgacacagagccctgcttccctggccgtgtccctgggacagagagccaccatctcttgcagagccagcgagagcgtggacagctacggcaacagcttcatgcactggtatcagcagaagcccggccagccccccaagctgctgatctacctggcctccaacctggaaagcggcgtgcccgccagattttctggcagcggcagcagaaccgacttcaccctgaccatcgaccccgtggaagccgatgatgccgccacctactactgccagcagaacaactacgacccctggaccttcggcggaggcaccaagctggaaatcaagggcggaggcggaagtggaggcggaggatctggcggcggaggctctgaagtgcaactccagcagagcggccctgagcttgtgaagcctggcgcttccgtgaagatgagctgcaaggccagcggctacaccttcaccagctacgtgatgcactgggtcaagcagaaacctggacagggcctggaatggatcggctacatcaacccctacaacgacggcaccaagtacaacgagaagttcaagggcaaggccaccctgacaagcgacaccagcagcagcaccgcctacatggaactgaacagcctgaccagcgaggacagcgccgtgtacttctgcgccagacccatctacttcgacaacgactacttcgattactggggccagggcaccaccctgaaggtgtcctctacgcgtggaggcggatctaaagttgctgctcttaaagaaaaggtcgcggctctgaaagaaaaagtggcggcgctcaaggagaaagttgcagctctcaaagaa

SEQ ID NO: 1626 - DNA, 888 bp, Artificial Sequence
  Synthetic Polynucloetide
atggccttaccagtgaccgccttgctcctgccgctggccttgctgctccacgccgccaggccggacatccagatgacccagagccccagcagcctgtctgccagcgtgggcgacagagtgaccatcacatgcaaggccagccaggacgtgggaatcgccgtggcctggtatcagcagaaacccggcaaggtgcccaagctgctgatctactgggccagcaccagacacaccggcgtgcccgatagattttccggcagcggctccggcaccgacttcaccctgacaatcagctccctccagcccgaggacgtggcaacctactactgccagcagtacagcagctacccctacaccttcggccagggcaccaaggtggaaatcaagggcggaggcggaagtggaggcggaggatctggcggcggaggctctgaagtgcaactggtggaatcaggcggcggactggtgcagcctggcggatctctgagactgagctgtgccgccagcggcttcgacttcagccggtactggatgagctgggtgcgccaggcccctggcaaaggactggaatggatcggcgagatcaaccccgacagcagcaccatcaactacgcccccagcctgaaggacaagttcatcatcagccgggacaacgccaagaacagcctgtacctccagatgaactccctgcgggccgaggacaccgccgtgtactattgcgccagacccgacggcaactactggtacttcgacgtgtggggccagggaaccctcgtgaccgtgtcatctacgcgtggaggcggatctaaagttgctgctcttaaagaaaaggtcgcggctctgaaagaaaaagtggcggcgctcaaggagaaagttgcagctctcaaagaa

SEQ ID NO: 1627 - DNA, 891 bp, Artificial Sequence
  Synthetic Polynucloetide
atggccttaccagtgaccgccttgctcctgccgctggccttgctgctccacgccgccaggccggacatcgtgatgacccagagccagaagagcatgagcaccagcgtgggcgacagagtgagcatcacctgcaaggccagccaggacgtgatcaccggcgtggcctggtaccagcagaagcccggccagagccccaagctgctgatctacagcgccagctacagatacaccggcgtgcccgacagattcaccggcagcggcagcggcaccgacttcaccttcaccatcagcaacgtgcaggccgaggacctggccgtgtactactgccagcagcactacagcacccccctgaccttcggcgccggcaccaagctggagctgaagggcggaggcggaagtggaggcggaggatctggcggcggaggctctcaggtgcagctgcagcagcccggcgccgagctggtgagacccggcgccagcgtgaagctgagctgcaaggccagcggctacagcttcaccacctactggatgaactgggtgaagcagagacccggccagggcctggagtggatcggcatgatccaccccagcgacagcgagaccagactgaaccagaagttcaaggacaaggccaccctgaccgtggacaagagcagcagcaccgcctacatgcagctgagcagccccaccagcgaggacagcgccgtgtactactgcgccagaagcaccatgatcgccaccagagccatggactactggggccagggcaccagcgtgaccgtgagcagcacgcgtggaggcggatctaaagttgctgctcttaaagaaaaggtcgcggctctgaaagaaaaagtggcggcgctcaaggagaaagttgcagctctcaaagaa

SEQ ID NO: 1628 - DNA, 909 bp, Artificial Sequence
  Synthetic Polynucloetide
atggccttaccagtgaccgccttgctcctgccgctggccttgctgctccacgccgccaggccgcagagcgtgctgacacagcctccatccgtgtctggcgctccaggccagagagtgaccatctcctgtaccggcagcggcagcaacatcggagccccctacgacgtgtcctggtatcagcaactgcctggcaccgcccccaagctgctgatctaccacaacaacaagcggcccagcggcgtgcccgatagattcagcggctctaagagcggcaccagcgccagcctggctatcactggactccaggccgaggacgaggccgactactactgtgccacagtggaagccggcctgagcggctctgtgtttggcggcggaacaaagctgaccgtgctgggagctggcggaggcggaagtggaggcggaggatctggcggcggaggctctcaggtgcaactggtgcagagcggagccgaagtgaagaaacctggggccagcgtgaaggtgtcctgcaaggtgtccggctacaccctgaccgagctgagcattcactgggtgcgccaggcccctggcaagggactggaatggatgggcggcttcgaccccgaagagaacgagatcgtgtacgcccagcggttccagggcagagtgacaatgaccgaggacaccagcaccgacaccgcctacatggaactgagcagcctgcggagcgaggataccgccgtgtactactgcgccatcgtgggcagcttcagccctctgacactgggcctgtggggccagggaactatggtcaccgtgtccagcacgcgtggaggcggatctaaagttgctgctcttaaagaaaaggtcgcggctctgaaagaaaaagtggcggcgctcaaggagaaagttgcagctctcaaagaa

SEQ ID NO: 1629 - DNA, 909 bp, Artificial Sequence
  Synthetic Polynucloetide
atggccttaccagtgaccgccttgctcctgccgctggccttgctgctccacgccgccaggccgcagagcgtgctgacacagcctccatccgtgtctggcgctccaggccagagagtgaccatctcctgtaccggcagcggcagcaacatcggagccccctacgacgtgtcctggtatcagcaactgcctggcaccgcccccaagctgctgatctaccacaacaacaagcggcccagcggcgtgcccgatagattcagcggctctaagagcggcaccagcgccagcctggctatcactggactccaggccgaggacgaggccgactactactgccagagctacgacagcagcagcatcagcaccatcttcggcggaggcaccaagctgacagtgctgggagctggcggaggcggaagtggaggcggaggatctggcggcggaggctctcaggtgcaactggtgcagagcggagccgaagtgaagaaacctggggccagcgtgaaggtgtcctgcaaggtgtccggctacaccctgaccgagctgagcattcactgggtgcgccaggcccctggcaagggactggaatggatgggcggcttcgaccccgaagagaacgagatcgtgtacgcccagcggttccagggcagagtgacaatgaccgaggacaccagcaccgacaccgcctacatggaactgagcagcctgcggagcgaggataccgccgtgtactactgtgccatcgtgggcagcttcagcggaatcgcctacagaccttggggccagggcacaatggtcaccgtgtctagcacgcgtggaggcggatctaaagttgctgctcttaaagaaaaggtcgcggctctgaaagaaaaagtggcggcgctcaaggagaaagttgcagctctcaaagaa

SEQ ID NO: 1630 - DNA, 903 bp, Artificial Sequence
  Synthetic Polynucloetide
atggccttaccagtgaccgccttgctcctgccgctggccttgctgctccacgccgccaggccggacatccagatgacccagagccccagcagcctgtctgccagcgtgggcgacagagtgaccatcacctgtagcgccagcagcagcgtgtcctacatgtactggtatcagcagaagcccggcaaggcccccaagctgctgatctacctgaccagcaatctggcctccggcgtgcccagcagattttctggcagcggctccggcaccgacttcaccctgacaatcagctccctccagcccgaggacttcgccacctactactgtcagcagtggcggagcaaccccttcaccttcggccagggcaccaagctggaaatcaagagaggcggaggcggaagtggaggcggaggatctggcggcggaggctctcagatcaccctgaaagagtccggccccaccctcgtgaagcctacccagaccctgacactgacctgcaccttcagcggcttcagcctgagcacaagcggcatgggcgtgggctggatcagacagcctcctggaaaggccctggaatggctggcccacatttggtgggacgacgtgaagcggtacagccccagcctgaagtcccggctgaccattaccaaggacaccagcaagaaccaggtggtgctgaccatgacaaacatggaccccgtggacaccgccacatattactgcgcccggatcgtgtccttcgacaacgacgtggtgtccgctatggactactggggccagggaaccctcgtgaccgtgtctagtacgcgtggaggcggatctaaagttgctgctcttaaagaaaaggtcgcggctctgaaagaaaaagtggcggcgctcaaggagaaagttgcagctctcaaagaa

SEQ ID NO: 1631 - DNA, 888 bp, Artificial Sequence
  Synthetic Polynucloetide
atggccttaccagtgaccgccttgctcctgccgctggccttgctgctccacgccgccaggccggagatcgtgatgacccagagccctgccaccctgtccgtgtctccaggcgaaagagccaccctgagctgcaaggcttcccagagcgtgtccaacgacgtcgtgtggtatcagcagaagcccggccaggcccccagactgctgatctactacgccagcaacagatacaccggcatccccgccagattcagcggctctggcagcggcaccgagttcaccctgacaatcagcagcctccagagcgaggacttcgccgtgtactactgtcagcaggactacaccagcccctggaccttcggccagggcaccaagctggaaatcaagagaggcggaggcggaagtggaggcggaggatctggcggcggaggctctcaggtgcaactggtgcagagcggagccgaagtgaagaaacctggggccagcgtgaaggtgtcctgcaaggccagcggctacacctttaccaactacggcatgaactgggtgcgccaggctcctggacagggcctggaatggatgggctggatcaacacctacaccggcgagcccacctacgccgacgacttcaagggcagagtgaccatgaccaccgacaccagcacctccaccgcctacatggaactgcggagcctgagaagcgacgacaccgccgtgtattattgcgcccggatcggcgacagcagccccagcgattattggggccagggaaccctcgtgaccgtgtcctctacgcgtggaggcggatctaaagttgctgctcttaaagaaaaggtcgcggctctgaaagaaaaagtggcggcgctcaaggagaaagttgcagctctcaaagaa

SEQ ID NO: 1632 - DNA, 888 bp, Artificial Sequence
  Synthetic Polynucloetide
atggccttaccagtgaccgccttgctcctgccgctggccttgctgctccacgccgccaggccggacatcctgctgacccagagccccgtgatcctgtccgtgtctcctggcgagagagtgtccttcagctgtcgggccagccagagcatcggcaccaacatccactggtatcagcagcggaccaacggcagccccagactgctgattaagtacgccagcgagtccatcagcggcatccccagcagattttccggcagcggctccggcaccgacttcaccctgagcatcaacagcgtggaaagcgaggacattgccgactactactgccagcagaacaacaactggcccaccaccttcggagccggcaccaagctggaactgaagggcggaggcggaagtggaggcggaggatctggcggcggaggctctcaggtgcagctgaagcagagcggacctggcctggtgcagcctagccagagcctgtccatcacctgtaccgtgtccggcttcagcctgaccaactacggcgtgcactgggtgcgccagagccctggaaaaggactggaatggctgggagtgatttggagcggcggcaacaccgactacaacacccccttcaccagcagactgtctatcaacaaggacaacagcaagagccaggtgttcttcaagatgaacagcctccagagcaacgacaccgccatctactactgtgctagagccctgacctactatgactacgagttcgcctactggggccagggcacactcgtgacagtgtctgctacgcgtggaggcggatctaaagttgctgctcttaaagaaaaggtcgcggctctgaaagaaaaagtggcggcgctcaaggagaaagttgcagctctcaaagaa

SEQ ID NO: 1633 - DNA, 888 bp, Artificial Sequence
  Synthetic Polynucloetide
atggccttaccagtgaccgccttgctcctgccgctggccttgctgctccacgccgccaggccggagatccagctggtgcagagcggagccgaagtgaagaagcctggcgagagcctgcggatcagctgcaagggcagcggcttcaacatcgaggactactacatccactgggtgcgccagatgcccggcaagggcctggaatggatgggcagaatcgaccccgagaacgacgagactaagtacggccccatcttccagggccacgtgaccatcagcgccgacaccagcatcaacaccgtgtacctccagtggtccagcctgaaggccagcgacaccgccatgtactactgcgcctttagaggcggcgtgtactggggccagggcaccacagtgacagtgtctagcggcggaggcggaagtggaggcggaggatctggcggcggaggctctgatgtcgtgatgacccagagccccgacagcctggctgtgtctctgggagagagagccaccatcaactgcaagtccagccagtccctgctggacagcgacggcaagacctacctgaactggctccagcagaagcccggccagccccccaagagactgatctccctggtgtccaagctggactccggcgtgcccgatagattttccggctctggcagcggcaccgacttcaccctgacaatcagctcccttcaggccgaggacgtggccgtgtactattgctggcagggcacacacttccccggcacctttggcggaggcaccaaggtggaaatcaagacgcgtggaggcggatctaaagttgctgctcttaaagaaaaggtcgcggctctgaaagaaaaagtggcggcgctcaaggagaaagttgcagctctcaaagaa

SEQ ID NO: 1634 - DNA, 912 bp, Artificial Sequence
  Synthetic Polynucloetide
atggccttaccagtgaccgccttgctcctgccgctggccttgctgctccacgccgccaggccggagctgcagatgacccagagccctagcagcctgtctgccagcgtgggcgacagagtgaccatcacctgtagagccagccagagcatcagcagctacctgaactggtatcagcagaagcccggccagccccccaaactgctgatctactgggccagcaccagagaaagcggcgtgcccgatagattcagcggcagcgagagcggcaccaactacaccctgaccatcagctccctgcagcccgaggacttcgccacctacttttgccagcagagcgacagcctgcccatcacctttggacagggcacccggctggacattcagggcggaggcggaagtggaggcggaggatctggcggcggaggctctgaggtgcaactgctggaatctgggggcggagtggtgcagcctggcagaagcctgagactgagctgtgccgccagcggcttcaccttcagctcctacggaatgcactgggtgcgccaggcccctggcaaaggactggaatgggtggccgtgatctcctacgacggcagcaacaagtactacgccgacagcgtgaagggccggttcaccatcagccgggacaacagcaagaacaccctgtacctgcagatgaacagcctgcgggccgaggacaccgccgtgtactactgcgccaaggatatgggctggggcagcggctggcggccttactactactacggcatggacgtgtggggccagggcaccaccgtgacagtgtcatctacgcgtggaggcggatctaaagttgctgctcttaaagaaaaggtcgcggctctgaaagaaaaagtggcggcgctcaaggagaaagttgcagctctcaaagaa

SEQ ID NO: 1635 - DNA, 909 bp, Artificial Sequence
  Synthetic Polynucloetide
atggccttaccagtgaccgccttgctcctgccgctggccttgctgctccacgccgccaggccggagcttgtgatgacccagagccccagcagcctgacagtgacagccggcgagaaagtgaccatgagctgcaagagcagccagagcctgctgaacagcggcaaccagaagaactacctgacctggtatcagcagaagcccggccagccccccaagctgctgatctactgggccagcaccagagaaagcggcgtgcccgatagattcaccggctctggcagcggcaccgacttcaccctgacaatcagcagcgtgcaggccgaggacctggccgtgtactactgccagaacgactacagctaccccctgaccttcggagccggcaccaagctggaaatcaagggcggaggcggaagtggaggcggaggatctggcggcggaggctctgaagtgcagctgctggaacagtctggcgccgaacttgtgcggcctggcaccagcgtgaagatcagctgtaaagccagcggctacgccttcaccaactactggctgggctgggtcaagcagaggcctggacacggcctggaatggatcggcgacatctttcccggctccggcaacatccactacaacgagaagttcaagggcaaggccaccctgaccgccgacaagtctagcagcaccgcctacatgcagctgtccagcctgacctttgaggacagcgccgtgtatttctgtgcccggctgcggaactgggacgagcccatggattattggggccagggcaccaccgtgaccgtgtctagtacgcgtggaggcggatctaaagttgctgctcttaaagaaaaggtcgcggctctgaaagaaaaagtggcggcgctcaaggagaaagttgcagctctcaaagaa

SEQ ID NO: 1636 - DNA, 903 bp, Artificial Sequence
  Synthetic Polynucloetide
atggccttaccagtgaccgccttgctcctgccgctggccttgctgctccacgccgccaggccggacatccaaatgacacagagtccttctagtttgagtgcgagcgtgggggacagggtgaccattacctgcagggccagccagagcataagctcataccttaattggtaccagcaaaaaccaggtaaggcccctaagctcctgatctacgcggcctcttcacttcaatctggggtcccttcccgcttcagtggctccggcagcggcaccgacttcacgctcactatatcaagtctgcagcctgaggatctcgccacctattactgtcaacaaagttattccacccctttcacctttggaccgggcacgaaagtggatattaagggcggaggcggaagtggaggcggaggatctggcggcggaggctctgtgcacgaggtccagcttgtgcagtccggggcagaggtcaagaagcctggttctagcgtaaaagtgagttgcaaagcctcaggtgggacattttcatcctacgcgatcagttgggttagacaggctcctggtcaagggctggaatggatgggcggaattattccaatcttcggaacagcgaattacgcgcagaagttccagggtagagtaaccatcactgctgacaagtccacctccaccgcatacatggaattgtctagtctccggagcgaggatacggcggtgtattattgtgctacgttcgccctgtttggcttccgcgaacaggctttcgacatctgggggcagggcacgacagtcacggttagtagtacgcgtggaggcggatctaaagttgctgctcttaaagaaaaggtcgcggctctgaaagaaaaagtggcggcgctcaaggagaaagttgcagctctcaaagaa

SEQ ID NO: 1637 - DNA, 885 bp, Artificial Sequence
  Synthetic Polynucloetide
atggccttaccagtgaccgccttgctcctgccgctggccttgctgctccacgccgccaggccgtacatccacgtgacacagagccctagcagcctgtccgtgtccatcggcgatagagtgaccatcaactgccagacctctcaaggcgtgggcagcgacctgcactggtatcagcacaaacctggcagagcccctaagctgctgatccaccatgccagctctgtggaagatggcgtgcccagcagattttccggcaccggatttcacaccagcttcaacctgacaatcaacgacctccaggccgacgacatcggcacctactactgtcaagtgctccagagcttcggcagaggcagcagactggatacaaaaggcggaggcggaagtggaggcggaggatctggcggcggaggctctagggcacacctggtgcagtctggcaccgccatgaagaaacctggcgcttccgtcagagtgtcctgtcagacaagcggctacaccttcacagcccacatcctgttctggttcagacaggccccaggcagaggactggaatgggtcggatggatcaagccccagtacggggccgtgaatttcggcggaggcttcagagacagagtgaccctgaccagggacgtgtaccgggaaatcgcctacatggacatccggggcctgaagcctgatgacaccgccgtgtactactgcgccagggatagaagctacggcgacagctcttgggctctcgatgcttggggacagggcacaacagtggtggtgtctgctacgcgtggaggcggatctaaagttgctgctcttaaagaaaaggtcgcggctctgaaagaaaaagtggcggcgctcaaggagaaagttgcagctctcaaagaa

SEQ ID NO: 1638 - DNA, 900 bp, Artificial Sequence
  Synthetic Polynucloetide
atggccttaccagtgaccgccttgctcctgccgctggccttgctgctccacgccgccaggccggacatcgtgctgacccagagccctctgagcctggccgtgtctctgggacagcctgccatcatcagctgcaaggccagccagagcgtgtcctttgccggcacctctctgatgcactggtatcaccagaagcccggccagcagcccagactgctgatctacagagccagcaacctggaagccggcgtgcccgatagattttccggcagcggcagcaagaccgacttcaccctgaccatcagccccgtggaagccgaagatgccgccacctactactgccagcagagcagagagtacccctacaccttcggcggaggcaccaagctggaaatcaagaggggcggaggcggaagtggaggcggaggatctggcggcggaggctctcaggtccaactggtgcagagcggagccgaggtcgtgaagcctggcgcttccgtgaagattagctgcaaagccagcggctacacctttaccggctactttatgaactgggtcaagcagagccctggccagagcctggaatggatcggcagaatccacccctacgacggcgacaccttctacaaccagaagttccagggcaaggccaccctgacagtggacaagagcagcaacaccgcccacatggaactgctgagcctgaccagcgaggacttcgccgtgtactactgcaccagatacgacggcagccgggctatggactattggggccagggcaccaccgtgaccgtgtctagtacgcgtggaggcggatctaaagttgctgctcttaaagaaaaggtcgcggctctgaaagaaaaagtggcggcgctcaaggagaaagttgcagctctcaaagaa

SEQ ID NO: 1639 - DNA, 888 bp, Artificial Sequence
  Synthetic Polynucloetide
atggccttaccagtgaccgccttgctcctgccgctggccttgctgctccacgccgccaggccggacgttgtgatgacccagacccccctgagcctgcctgtgacacctggcgaacctgccagcatcagctgtcggagcagccagagcctggtgcacagaaacggcaacacctacctgcactggtatctccagaagcccggccagagccccaagctgctgatccacaaggtgtccaacagattcagcggcgtgcccgacagattctccggcagcggctctggcaccgacttcaccctgaagatcagccgggtggaagccgaggacctgggcgtgtacttctgtagccagagcacccatgtgccccccctgacatttggagccggcaccaagctggaactgaagggcggaggcggaagtggaggcggaggatctggcggcggaggctctgaagtgcagctggtgcagtctggcgctgaggtggaaaagcctggggccagcgtgaagattagctgcaaggccagcggcagcagcttcaccggctacaacatgaactgggtgcgccagaacatcggcaagagcctggaatggatcggagccatcgacccctactacggcggcaccagctacaaccagaagttcaagggcagagccaccctgaccgtggacaagagcaccagcaccgcctacatgcacctgaagtccctgcggagcgaggacaccgccgtgtactactgtgtgtccggcatggaatattggggccagggcaccagcgtgaccgtgtctagtacgcgtggaggcggatctaaagttgctgctcttaaagaaaaggtcgcggctctgaaagaaaaagtggcggcgctcaaggagaaagttgcagctctcaaagaa

SEQ ID NO: 1640 - DNA, 882 bp, Artificial Sequence
  Synthetic Polynucloetide
atggccttaccagtgaccgccttgctcctgccgctggccttgctgctccacgccgccaggccggagatcgtgatgacccagacccctgccaccctgtctgtgtctgccggcgagagagtgaccattacctgcaaggccagccagagcgtgtccaacgacgtgacctggtatcagcagaagcccggccaggcccccagactgctgatctacagcgccagcaacagatacagcggcgtgcccgccagattttccggcagcggctacggcaccgagttcaccttcaccatcagcagcgtgcagagcgaggacttcgccgtgtacttctgtcagcaagactacagcagcttcggccagggcaccaagctggaaatcaagaggggcggaggcggaagtggaggcggaggatctggcggcggaggctctcaggtgcagctggtggaatctggacctggcgtggtgcagcctggcagaagcctgagaatcagctgtgccgtgtccggcttcagcgtgaccaactacggcgtgcactgggtgcgccagccacctggaaaaggactggaatggctgggcgtgatctgggctggcggcatcaccaactacaacagcgccttcatgtcccggctgaccatctccaaggacaacagcaagaacaccgtgtacctccagatgaacagcctgcgggccgaggacaccgccatgtactactgtgcttccagaggcggccactacggctacgccctggattattggggccagggaaccctcgtgaccgtgtcctctacgcgtggaggcggatctaaagttgctgctcttaaagaaaaggtcgcggctctgaaagaaaaagtggcggcgctcaaggagaaagttgcagctctcaaagaa

SEQ ID NO: 1641 - DNA, 891 bp, Artificial Sequence
  Synthetic Polynucloetide
atggccttaccagtgaccgccttgctcctgccgctggccttgctgctccacgccgccaggccggacatccagatgacccagaccgccagcagcctgcctgcctctctgggcgacagagtgaccatctcctgtagcgccagccaggacatcagcaactacctgaactggtatcagcagaaacccgacggcaccgtgaagctgctgatcttctacagcagcaacctgcacagcggcgtgcccagcagattttctggcggcggaagcggcaccgactacagcctgaccatcagcaatctggaacccgaggacattgccacctacttttgccaccagtacagcaagctgccctggacctttggcggaggcaccaagctggaaatcaagagaggcggaggcggaagtggaggcggaggatctggcggcggaggctctgaagtgaccctggtggaaagcggcggagacttcgtgaagcctggcggctctctgaaggtgtcctgtgccgccagcggcttcgcctttagccactacgccatgagctgggtgcgccagacccctgccaagagactggaatgggtggcctacatcagcagcggcggctccggcacctactactccgatagcgtgaagggccggttcaccatcagccgggacaacgccaagaacaccctgtacctccagatgcggagcctgcggagcgaggacagcgccatgtatttctgcaccagagtgaagctgggcacctattacttcgactcttggggccagggcaccaccctgaccgtgtcatctacgcgtggaggcggatctaaagttgctgctcttaaagaaaaggtcgcggctctgaaagaaaaagtggcggcgctcaaggagaaagttgcagctctcaaagaa

SEQ ID NO: 1642 - DNA, 897 bp, Artificial Sequence
  Synthetic Polynucloetide
atggccttaccagtgaccgccttgctcctgccgctggccttgctgctccacgccgccaggccgcagttcgtgctgacccagagcccttctgcctctgctgccctgggagcctctgccaagctgacctgtacactgagcagcgcccacaagacctacaccatcgactggtatcagcagcagaagggaaaggcccccagatacctgatccaagtgaagtccgacggcacctacacaaaggccaccggcgtgcccgatagattcagcggcagtagcagcggagccgatagatacctgattatccccagcgtgcaggccgacgacgaggccgattactactgcggcaccgattacaccggcggctacgtgttcggcggaggcacacaactgaccgtgacaggcggaggcggaagtggaggcggaggatctggcggcggaggctctgagcaactgaaagagtctggcggcggactgttcaagcccaccgataccctgaccctgacctgcaccgtgtccggcttcagcctgagctactacggcgtgaactgggtgcgccaggcccctggcaatggcctggaatggatcggcacaatcggcggcagcggcgacacctactatgcctcttgggccaagtccagaagcaccatcatcagaaacaccaacgagaacaccgtgaccctgaagatgaccagcctgacagccgccgacaccgccacctacttttgcgtcagatacgccaacatcggctacgagtatttcaacgtgtggggacccggcaccctcgtgaccgtgtcatctacgcgtggaggcggatctaaagttgctgctcttaaagaaaaggtcgcggctctgaaagaaaaagtggcggcgctcaaggagaaagttgcagctctcaaagaa

SEQ ID NO: 1643 - DNA, 894 bp, Artificial Sequence
  Synthetic Polynucloetide
atggccttaccagtgaccgccttgctcctgccgctggccttgctgctccacgccgccaggccggacatccagatgacccagagccccagcagcctgtctgccagcgtgggcgacagagtgaccatcacctgtagagccagccagggcatcagctcttggctggcctggtatcagcagaagcccgagaaggcccccaagagcctgatctacgccgcctctagtctccagagcggcgtgcccagcagattttctggcagcggctccggcaccgacttcaccctgacaatcagctccctccagcccgaggacttcgccacctactactgccagcagtacaacagctacccccccacctttggcggaggcaccaaggtggaaatcaagggcggaggcggaagtggaggcggaggatctggcggcggaggctctgaagtgcaactggtggaatcaggcggcggactggtgcagcctggcgagtctctgagactgagctgtgtggcctccggcttcaccttcagccggtacaagatgaactgggtgcgccaggcccctggcaagggactggaatgggtgtcctacatcagccgcagcggcagagacatctactacgccgacagcgtgaagggccggttcaccatcagcagagacaacgccaagaacagcctgtacctccagatgaactccctgcgggacgaggacaccgccgtgtactactgtgccggaaccgtgaccacctattactacttcggcatggacgtgtggggccacggcaccaccgtgacagtgtcatctacgcgtggaggcggatctaaagttgctgctcttaaagaaaaggtcgcggctctgaaagaaaaagtggcggcgctcaaggagaaagttgcagctctcaaagaa

SEQ ID NO: 1644 - DNA, 891 bp, Artificial Sequence
  Synthetic Polynucloetide
atggccttaccagtgaccgccttgctcctgccgctggccttgctgctccacgccgccaggccgcagtctgtggtcacacagccacctagcatgtctgccgctccaggccagcaagtgaccatctcttgtagcggcggcaacagcaacatcgagcggaactacgtgtcctggtatctgcaactgcctggcacagcccctaagctggtcatcttcgacaacgacagacggcccagcggcatccccgatagattttctggcagcaagagcggcaccagcgccacactgggaattaccggacttcagacaggcgacgaggccgactactactgtggcacatgggactctagcctgagaggctgggttttcggcggaggcacaaagctgacagtgcttggtggcggaggcggaagtggaggcggaggatctggcggcggaggctctgaagtgcagctcgttgagtctggcggcggactgattcaacctggcggaagcctgagactgagctgtgccgcttccggcttcaccttcagcaactacgccatgaactgggttcgacaggcccctggcaaaggactggaatgggtgtccaccatcaacggcagaggcagcagcaccatctacgccgattctgtgaagggcagattcaccatcagccgggacaacagcaagaacaccctgtacctccagatgaactccctgagagccgaggacaccgccacctattactgtgcccggtacatcagcagaggactgggcgattcttggggccagggcacactggttacagtgacgcgtggaggcggatctaaagttgctgctcttaaagaaaaggtcgcggctctgaaagaaaaagtggcggcgctcaaggagaaagttgcagctctcaaagaa

SEQ ID NO: 1645 - DNA, 894 bp, Artificial Sequence
  Synthetic Polynucloetide
atggccttaccagtgaccgccttgctcctgccgctggccttgctgctccacgccgccaggccgcagtctgtgctgacacagcctccatctgcctctggcacacctggacagagagtgaccatcagctgtagcggcagcagaagcaacgtcggcggcaactacgtgttctggtatcagcaggtcccaggcgctacccctaagctgctgatctacagaagcaatcagcggcctagcggcgtgcccgatagatttgccggaagcaagagcggcagctctgccagccttgccatctctggactgagaagcgaggacgaggccgactactactgtgccacctgggatgatagcctgagcggcttcgtgtttggcaccggcaccaaagtgacagtgcttggtggcggaggcggaagtggaggcggaggatctggcggcggaggctctgaagttcagctggttgaatctggcggcggactggttaagcctggcggatctctgagactgtcttgtgccgccagcggcttcaccttcagcgattactacatgagctggatcagacaggcccctggcaaaggactggaatgggtgtcctacatcagcagcagcggctccaccatctactacgccgatagcgtgaagggcagattcaccatcagccgggacaacgccaagaacagcctgtacctccagatgaactccctgagagccgaggacaccgccgtgtactattgcgccagaggctacggcaaagcctacgatcaatggggccagggcacactggtcaccgtttcttctacgcgtggaggcggatctaaagttgctgctcttaaagaaaaggtcgcggctctgaaagaaaaagtggcggcgctcaaggagaaagttgcagctctcaaagaa

SEQ ID NO: 1646 - DNA, 891 bp, Artificial Sequence
  Synthetic Polynucloetide
atggccttaccagtgaccgccttgctcctgccgctggccttgctgctccacgccgccaggccggacatccagatgacccagagccccagcagcctgtctgccagcgtgggcgacagagtgaccatcacctgtagagccagccaggacgtgaacaccgccgtggcctggtatcagcagaagcctggcaaggcccccaagctgctgatctacagcgccagcttcctggaaagcggcgtgcccagcagattcagcggaagcagaagcggcaccgacttcaccctgaccatcagctccctccagcccgaggacttcgccacctactactgccagcagcactacaccacccctcccaccttcggccagaccaaggtggaaatcaagagaggcggaggcggaagtggaggcggaggatctggcggcggaggctctgaagtgcaactggtggaatctggcggcggactggtgcagcctggcggatctctgagactgagctgtgccgccagcggcttcaacatcaaggacacctacatccactgggtgcgccaggcccctggaaagggactggaatgggtggcccggatctaccccaccaacggctacaccagatacgccgacagcgtgaagggccggttcaccatcagcgccgacaccagcaagaataccgcctacctccagatgaacagcctgcgggccgaggataccgccgtgtactactgctcaagatggggaggcgacggcttctacgctatggacgtgtggggccagggcacccttgtgaccgtgtcatctacgcgtggaggcggatctaaagttgctgctcttaaagaaaaggtcgcggctctgaaagaaaaagtggcggcgctcaaggagaaagttgcagctctcaaagaa

SEQ ID NO: 1647 - DNA, 930 bp, Artificial Sequence
  Synthetic Polynucloetide
atggccttaccagtgaccgccttgctcctgccgctggccttgctgctccacgccgccaggccgcagtctgccctgacacagcctcctagcgcctctggctctcccggccagagcatcaccatcagctgtaccggcaccagcaacaacttcgtgtcctggtatcagcagcacgccggcaaggcccccaagctcgtgatctacgacgtgaacaagcggcccagcggcgtgcccgatagattcagcggcagcaagagcggcaacaccgccagcctgacagtgtctggcctccagaccgatgacgaggccgtgtactactgcggcagcctcgtgggcaactgggacgtgatctttggcggaggcaccaagctgaccgtgctgggcggaggcggaagtggaggcggaggatctggcggcggaggctctcagccccagctccaggaatctggccccacactggtggaagccagcgagacactgagcctgacctgtgccgtgtccggcgattctaccgccgcctgcaatagcttctggggctgggtgcgccagcctcctggaaagggactggaatgggtgggaagcctgagccactgcgccagctattggaaccggggctggacctaccacaaccccagcctgaagtccagactgaccctggccctggacacccccaagaacctggtgttcctgaagctgaacagcgtgacagccgccgacaccgccacctactactgtgccagatttggcggcgaggtgctgcggtacaccgactggcctaaacctgcctgggtggacctgtggggcagaggaacactcgtgaccgtgtccagcacgcgtggaggcggatctaaagttgctgctcttaaagaaaaggtcgcggctctgaaagaaaaagtggcggcgctcaaggagaaagttgcagctctcaaagaa

SEQ ID NO: 1648 - DNA, 915 bp, Artificial Sequence
  Synthetic Polynucloetide
atggccttaccagtgaccgccttgctcctgccgctggccttgctgctccacgccgccaggccggagctggtgctgacacagagccctggcaccctgtctctgtctgccggcgaaagagccaccctgagctgtagagccagccagagcgtgtcctctggcagcctggcttggtatcagcagaagccaggccaggcccccagactgctgatctacggcgcttctaccagagccaccggcatccccgatagattcagcggctctggctccggcaccgacttcaccctgacaatcggcagactggaacccgaggacctggccgtgtactactgccagcagtacggcaccagcccctacacattcggccagggcaccaagctggaaatcggcggaggcggaagtggaggcggaggatctggcggcggaggctctctggaacagagcggagccgaagtgaagaaacccggcagcagcgtgcaggtgtcctgcaaagcaagcggcggcaccttctctatgtacggcttcaactgggtgcgccaggctcctggacacggcctggaatggatgggcggcatcatccccatcttcggcacctccaactacgcccagaaattccggggcagagtgaccttcaccgccgaccaggccacaagcaccgcctacatggaactgaccaacctgcggagcgacgacaccgccgtgtattattgcgccagagacttcggccccgactgggaggatggcgacagctacgatggcagcggcagaggcttcttcgacttctggggccagggaacccttgtgaccgtgtcctcaacgcgtggaggcggatctaaagttgctgctcttaaagaaaaggtcgcggctctgaaagaaaaagtggcggcgctcaaggagaaagttgcagctctcaaagaa

SEQ ID NO: 1649 - DNA, 855 bp, Artificial Sequence
  Synthetic Polynucloetide
atggccttaccagtgaccgccttgctcctgccgctggccttgctgctccacgccgccaggccggacatccagatgacccagagccccagcagcctgtctgccagcgtgggcgacagagtgaccatcacctgtcaggccagccaggacatcaacaactacctgaactggtatcagcagaagcccggcaaggcccccaagctgctgatctacgacgccagcaatctgcagaccggcgtgcccagcagattttccggctctggcagcggcaccgacttcaccttcaccatcgaggacattgccacctactactgccagcagtacaccttcggccctggcaccaaggtggacatcaaaggcggaggcggaagtggaggcggaggatctggcggcggaggctctgaagtgcaactgctggaatctggcggcggactggtgcagcctggcggatctctgagactgagctgtgccgccagcggcttcacctttagctggtacagcatgacctgggtgcgccaggcccctggcaaaggactggaatgggtgtccagcatcgtgccctggggcgatttcacccagtacgccgatagcgtgaagggccggttcaccatcagccgggacaacagcaagaacaccctgtacctgcagatgaacagcctgcgggccgaggacaccgccgtgtactattgtgccaagggacctggctggggcagcttcgatctgtggggcagaggaacccttgtgaccgtgtccagcacgcgtggaggcggatctaaagttgctgctcttaaagaaaaggtcgcggctctgaaagaaaaagtggcggcgctcaaggagaaagttgcagctctcaaagaa

SEQ ID NO: 1650 - DNA, 885 bp, Artificial Sequence
  Synthetic Polynucloetide
atggccttaccagtgaccgccttgctcctgccgctggccttgctgctccacgccgccaggccggacatccagatgacccagagccccagcagcctgtctgccagcgtgggcgacagagtgaccatcacctgtaccgccagcctgagcgtgtccagcacctacctgcactggtatcagcagaagcccggcagcagccccaagctgtggatctacagcaccagcaacctggcctccggcgtgcccagcagattttctggcagcggctctggcaccagctacaccctgaccatcagctccctccagcccgaggacttcgccacctactactgccaccagtaccacagaagccccctgacctttggcggaggcaccaaggtggaaatcaagagaggcggaggcggaagtggaggcggaggatctggcggcggaggctctgaagtgcaactggtggaatctggcggcggactggtgcagcctggcggatctctgagactgagctgtgccgccagcggcttcagcctgaccaaatacggcgtgcactgggtgcgccaggcccctggaaaaggactggaatgggtgggagtgaagtgggctggcggctccaccgactacaacagcgccctgatgagccggttcaccatcagcaaggacaacgccaagaacagcctgtacctccagatgaactccctgcgggccgaggacaccgccgtgtactactgtgccagagatcaccgggacgctatggactactggggccagggaacactcgtgaccgtgtcctctacgcgtggaggcggatctaaagttgctgctcttaaagaaaaggtcgcggctctgaaagaaaaagtggcggcgctcaaggagaaagttgcagctctcaaagaa

SEQ ID NO: 1651 - DNA, 897 bp, Artificial Sequence
  Synthetic Polynucloetide
atggccttaccagtgaccgccttgctcctgccgctggccttgctgctccacgccgccaggccggacatccagatgacccagagccccagcagcctgtctgccagcgtgggcgacagagtgaccatcacatgcaaggccagccaggacgtgggaacagccgtggcctggtatcagcagaagcctggcaaggcccccaagctgctgatctacagcgccagctacagatccaccggcgtgcccagcagattttccggctctggcagcggcaccgacttcaccctgaccatctctagcctccagcccgaggacttcgccacctactactgccagcaccactactccgccccctggacatttggcggaggcaccaaggtggaaatcaagggcggaggcggaagtggaggcggaggatctggcggcggaggctctgaagtgcaactggtggaatcaggcggcggactggtgcagcctggcggatctctgagactgagctgtgccgccagcggcttcaccttcagcagaaacggcatgagctgggtgcgccaggcccctggaaaaggactggaatgggtggcaaccgtgtccagcggcggcagctacatctactacgccgacagcgtgaagggccggttcaccatctccagagacaacgccaagaacagcctgtacctccagatgaactccctgcgggccgaggacaccgccgtgtactattgtgccagacagggcaccaccgccctggctaccagattcttcgatgtgtggggccagggcaccctcgtgaccgtgtcatctacgcgtggaggcggatctaaagttgctgctcttaaagaaaaggtcgcggctctgaaagaaaaagtggcggcgctcaaggagaaagttgcagctctcaaagaa

SEQ ID NO: 1652 - DNA, 885 bp, Artificial Sequence
  Synthetic Polynucloetide
atggccttaccagtgaccgccttgctcctgccgctggccttgctgctccacgccgccaggccggacatccagatgacccagagcttcagcagcctgagcgccagcgtgggcgacagagtgaccatcacctgtagagccagccaggacatcagcaactacctgaactggtatcagcagaagcccggcaaggcccccaagctgctgatctactacaccagcagactgcacagcggcgtgcccagcagattttctggcagcggctccggcaccgactacaccctgacaatcagctccctgcagcccgaggacttcgctacctacttctgtcagcaaggcaacaccctgccctggacctttggcggaggcaccaagctggaaatcaagagaggcggaggcggaagtggaggcggaggatctggcggcggaggctctgaagtgcaactggtgcagtccggcggagggctggtgcagagcggaggatctctgagactgagctgcagagccagcggctacaccttcacccggtactggatgctgtgggtgcgccagaggccaggcaagggactggaatgggtggccgagatcaacccccggaacgaccggaccaactacaacgagaagttcaagacccggttcaccatcagcgtggacagaagcaagaacaccctgtacctgcagatggacagcctgcgggccgaggataccgccgtgtacttttgtgctctgggaggcggctacgctatggactactggggccagggaacccttgtgaccgtgtcctctacgcgtggaggcggatctaaagttgctgctcttaaagaaaaggtcgcggctctgaaagaaaaagtggcggcgctcaaggagaaagttgcagctctcaaagaa

SEQ ID NO: 1653 - DNA, 885 bp, Artificial Sequence
  Synthetic Polynucloetide
atggccttaccagtgaccgccttgctcctgccgctggccttgctgctccacgccgccaggccggacatccagatgacccagagcccccctagcctgtctgcctctgtgggcggcaaagtgaccatcacatgcaaggccagccaggacatcgaccgctacatggcctggtatcaggacaagcccggcaagggacccaagctgctgatccacgataccagcaccctccagcccggcatccccagcagattttctggcagcggctccggcagagactacagcttcagcatcagcaacctggaacccgaggacattgccacctactactgcctccagtacgacaacctgtggaccttcggcggaggcaccaagctggaaatcaagagaggcggaggcggaagtggaggcggaggatctggcggcggaggctctcaggtgcaactggtgcagagcggagccgagcttgtgaagcctggcgcttccgtgaagatgagctgcaaagccagcggctacatcttcaccaactacaacatccactgggtcaagaagtccccaggccagggcctggaatggatcggagccatctaccccggaaacggcgacgccccttacagccagaagttccaggacagagccaccctgaccgccgacaccagcagcagcaccacctacatggaactgagcagcctgaccagcgaggacagcgccgtgtactattgcgtgcgggccaactgggatgtggccttcgcctattggggccagggcacactggtgtccgtgtcctctacgcgtggaggcggatctaaagttgctgctcttaaagaaaaggtcgcggctctgaaagaaaaagtggcggcgctcaaggagaaagttgcagctctcaaagaa

SEQ ID NO: 1654 - DNA, 888 bp, Artificial Sequence
  Synthetic Polynucloetide
atggccttaccagtgaccgccttgctcctgccgctggccttgctgctccacgccgccaggccggacatccagatgacccagagccctgccagcctgtctgcctctgtgggcgagacagtgaccatcacctgtcgggtgtccggcaacatccacaactacctggcctggtatcagcagaagcagggcaagagcccccaactgctggtgtacaacgccaagaccctggccgatggcgtgcccagcagattttctggctctggcagcggcacccagtacagcctgaagatcaacagcctccagcccgaggacttcggcagctactactgccagcacttctggtccaacccctacaccttcggcggaggcaccaagctggaaatcaagggcggaggcggaagtggaggcggaggatctggcggcggaggctctcaggtgcaactccagcagtctggcgcttccgtgaaggtgtcctgcaaggccagcgaactcgtgcggcctggcacaggctacgccttcaccaattacctgatcgagtgggtcaagcagaggcccggacagggcctggaatggatcggagtgattaacccaggcagcggcggcaccaactacaacgagaagttcaagggcaaggccaccctgaccgccgacaagagcagcagcacagcctacatgcaactgagcagcctgaccagcgacgacagcgccgtgtacttctgcgcccggtacagaagctacgactggtacttcgacgtgtggggagccggcaccaccgtgacagtgtcatctacgcgtggaggcggatctaaagttgctgctcttaaagaaaaggtcgcggctctgaaagaaaaagtggcggcgctcaaggagaaagttgcagctctcaaagaa

SEQ ID NO: 1655 - DNA, 888 bp, Artificial Sequence
  Synthetic Polynucloetide
atggccttaccagtgaccgccttgctcctgccgctggccttgctgctccacgccgccaggccggacatccagatgacacagtctccggcgtcactgtccgcctccgtgggggagactgtgactattatttgtagggcatcagttaacatctactcttatttggcctggtaccagcagaagcaaggcaagagtcctcagctgctggtgtataatgcgaagatcctggcagagggcgtgccgagccggttctccggcagcggctcaggtacccaattttccctcaagatcaattcactgcagccagaggactttggcagttactattgtcaacaccactacggcacattcactttcgggtccggtacaaaattggagattaagcgaggcggaggcggaagtggaggcggaggatctggcggcggaggctctcaggtacagttgaaagaaagcgggcctggactggtagcgccttcccaatctctctccatcacgtgcaccatctctggcttctccctgacttcctatggagttcactgggtgaggcagccccccggcaagggactggaatggctggtcgtcatctggtccgacgggtccacaacctacaactccgctctgaaaagtcggctctctatttctaaagataatagcaagagccaggtgtttctgaaaatgaactctctgcagaccgatgatacggccatttactactgcgcttcacactatggctcaaccttggcattcgcttcctggggccacggaacactggtgaccgtttccgcagccacgcgtggaggcggatctaaagttgctgctcttaaagaaaaggtcgcggctctgaaagaaaaagtggcggcgctcaaggagaaagttgcagctctcaaagaa

SEQ ID NO: 1656 - DNA, 912 bp, Artificial Sequence
  Synthetic Polynucloetide
atggccttaccagtgaccgccttgctcctgccgctggccttgctgctccacgccgccaggccggacattgtgatgacccagtctcacaaattcatgtccacatcagtaggagacagggtcagcgtcacctgcaaggccagtcagaatgtgggtaataatgtagcctggtatcaacagaaaccagggcaatctcctaaagtactgatttactcggcatcctaccggtacagtggagtccctgatcgcttcacaggcagtggatctgggacagatttcactctcaccatcagtaatgtgcagtctgaagacttggcagagtatttctgtcagcaatataacacctatccattcacgttcggctcggggacaaagttggaaataaaaggcggaggcggaagtggaggcggaggatctggcggcggaggctctgaggtacagctggaggaaagcggtggaggactggtgcaacctggagggtctatgaagctctcttgcgtagcttctgggttcacgttctccaattactggatgaactgggtgcggcagtcccccgagaaaggcctggaatgggtagcagaaattcggttcaagtcccataactatgctacacactttgccgagtctgtcaaaggccggttcactattagtcgagacgacagcaagtcttcagtctacctgcagatgaataacttgcgggcagaggacacaggtatctactactgcaccaggagaatcggcaactccgactatgactggtggtactttgacgtctggggagcaggcaccagcgtgacggtgagttcagcctcaacgcgtggaggcggatctaaagttgctgctcttaaagaaaaggtcgcggctctgaaagaaaaagtggcggcgctcaaggagaaagttgcagctctcaaagaa

SEQ ID NO: 1657 - DNA, 888 bp, Artificial Sequence
  Synthetic Polynucloetide
atggccttaccagtgaccgccttgctcctgccgctggccttgctgctccacgccgccaggccggacatccagatgacccagagcagcagcagcttcagcgtgtccctgggcgacagagtgaccatcacatgcaaggccagcgaggacatctacatccggctggcctggtatcagcagaagcccggcaacgcccccagactgctgattagcgccgccacctctctggaaaccggcatccccagcagattctccggctctggcagcggcgaggactacaccctgacaatcaccagcctccagaccgaggacgtggcaacctactactgccagcagtattggaccaccccctggacctttggcggaggcaccaagctggaaatcaagagaggcggaggcggaagtggaggcggaggatctggcggcggaggctctgatgtgcagctccaggaatctggccccggactcgtgaagcctagccagagcctgagcctgacatgcaccgtgaccggctacagcatcaccatcgactacacctggaactggatcagacagttccccggcaacaaactggaatggatgggctacatcacctacagcggcagcaccgactacaaccccagcctgaagtccagaagctccatcaccagagacacctctatgaaccagttcttcttgcagctgaacagcgtgaccaccgaggacaccgccacctactattgcgccagactgggcagaagatacgccctggactattggggccagggcaccagcgtgacagtgtcctctacgcgtggaggcggatctaaagttgctgctcttaaagaaaaggtcgcggctctgaaagaaaaagtggcggcgctcaaggagaaagttgcagctctcaaagaa

SEQ ID NO: 1658 - DNA, 885 bp, Artificial Sequence
  Synthetic Polynucloetide
atggccttaccagtgaccgccttgctcctgccgctggccttgctgctccacgccgccaggccggatgtgcagctccaggaaagcggccctggcctcgtgaagcctagccagagcctgagcctgacatgcaccgtgaccggctacagcatcaccagcgactacacctggaactggatcagacagttccccggcaacaagctggaatggatgggctacatcacctacagcggcagcaccagctacaaccccagcctgaagtcccggaactccatcaccagagacaccagcaagaaccagttcttcttgcagctgaacagcgtgaccaccgaggacaccgccacctactactgcgccagactgggcagacggtacaccatggactattggggccagggcacctccgtgaccgtgtctagcggaggcggaggaagtggcggcggaggatctgggggaggcggaagcgatatccagatgacccagtccagcagcagcttcagcgtgtccctgggcgacagagtgaccatcacctgtatggcctccgaggacatctacatccggctggcctggtatcagcagaagcccggcaacgcccccagactgctgattagcgccgccacctctctggaaaccggcgtgccaagcagattcagcggctctggcagcggcaaggactacaccctgagcatcacctccttgcagaccgaggacgtgggcacctactattgccagcagtattggagcagcccctggacctttggcggaggcacaaagctggaaatcaacacgcgtggaggcggatctaaagttgctgctcttaaagaaaaggtcgcggctctgaaagaaaaagtggcggcgctcaaggagaaagttgcagctctcaaagaa

SEQ ID NO: 1659 - DNA, 885 bp, Artificial Sequence
  Synthetic Polynucloetide
atggccttaccagtgaccgccttgctcctgccgctggccttgctgctccacgccgccaggccggacatccagatgacccagagcagcagcagcttcagcgtgagcctgggcgacagagtgaccatcacctgcatggccagcgaggacatctacatcagactggcctggtaccagcagaagcccggcaacgcccccagactgctgatcagcgccgccaccagcctggagaccggcgtgcccagcagattcagcggcagcggcagcggcaaggactacaccctgagcatcaccagcctgcagaccgaggacgtgggcacctactactgccagcagtactggagcagcccctggaccttcggcggcggcaccaagctggagatcaacggcggaggcggaagtggaggcggaggatctggcggcggaggctctgacgtgcagctgcaggagagcggccccggcctggtgaagcccagccagagcctgagcctgacctgcaccgtgaccggctacagcatcaccagcgactacacctggaactggatcagacagttccccggcaacaagctggagtggatgggctacatcacctacagcggcagcaccagctacaaccccagcctgaagagcagaaacagcatcaccagagacaccagcaagaaccagttcttcctgcagctgaacagcgtgaccaccgaggacaccgccacctactactgcgccagactgggcagaagatacacaatggactactggggccagggcaccagcgtgaccgtgagcagcacgcgtggaggcggatctaaagttgctgctcttaaagaaaaggtcgcggctctgaaagaaaaagtggcggcgctcaaggagaaagttgcagctctcaaagaa

SEQ ID NO: 1660 - DNA, 891 bp, Artificial Sequence
  Synthetic Polynucloetide
atggccttaccagtgaccgccttgctcctgccgctggccttgctgctccacgccgccaggccggaccagatcgtgctgacccagtcccccgctattatgtccgcatcaccgggcgaaaaagtgacgatctcctgtagcgcttcatctagcgtctcctacatgtattggtatcaacagaaacctgggtctagcccaaagccgtggatctacagaaccagtaaccttgccagtggggtgccagcccgcttcagcggtagtggcagtggaacttcctatagcctcacaataagcaacatggaggctgaagatgccgctgcctattactgccagcagtaccacagttacccaaccacgttcggcgggggaactaagctcgaagtaaaaggcggaggcggaagtggaggcggaggatctggcggcggaggctctgaggtgcagctggtggaatctgggggcggcctggtccaacctaagggatcactcaagctctcttgtgcggccagcggattctctttcaatacctatgctatgaattgggtgagacaggcgcccggaaagggcctcgaatggatagcccatatccggtcaaaatcaaacaatttcgcaacctactatgcggactccgtgaaggaccgattttccatctcccgagatgcctccgagaatattctgttcctgcagatgaataacctcaagacagaggacaccgccatgtactactgtgtgcgccagggcggtgactttcccatggattactgggggcaggggaccagcgtgaccgtgagctctacgcgtggaggcggatctaaagttgctgctcttaaagaaaaggtcgcggctctgaaagaaaaagtggcggcgctcaaggagaaagttgcagctctcaaagaa

SEQ ID NO: 1661 - DNA, 894 bp, Artificial Sequence
  Synthetic Polynucloetide
atggccttaccagtgaccgccttgctcctgccgctggccttgctgctccacgccgccaggccggacatccagatgacccagagccccagcagcctgtctgccagcgtgggcgacagagtgaccatcacctgtagagccagccagagcatcagcagctacctgaactggtatcagcagaagcccggcaaggcccccaaactgctgatctacgacgccagcaacctggaaaccggcgtgcccagcagattttccggcagcggctctggcaccgacttcaccttcaccatcagctccctccagcccgaggacattgccacctactactgccagcagtacgacaacctgcccctgacctttggcggaggcaccaaggtggacatcaagagaggcggaggcggaagtggaggcggaggatctggcggcggaggctctcaggtgcaactggtggaatctggcggcggagtggtgcagcctggcagaagcctgagactgagctgtgccgccagcggcttcacctttagcagctacgccatgcactgggtgcgccaggcccctggaaaaggcctggaatgggtggccgtgatctcctacgacggctccaacaagtattacgccgacagcgtgaagggccggttcaccatctccagagacaacagcaagaacaccctgtacctccagatgaacagcctgcgggccgaggacaccgccgtgtactattgtgccagggctcacaacagcagctcttggagcttcgactactggggccagggcaccctcgtgaccgtgtcatctacgcgtggaggcggatctaaagttgctgctcttaaagaaaaggtcgcggctctgaaagaaaaagtggcggcgctcaaggagaaagttgcagctctcaaagaa

SEQ ID NO: 1662 - DNA, 921 bp, Artificial Sequence
  Synthetic Polynucloetide
atggccttaccagtgaccgccttgctcctgccgctggccttgctgctccacgccgccaggccggacgtcgtgatgacccagagccctctgagcctgcctgtgtccctgggcgatcaggccagcatctcctgcagatccagccagagactggtgcacagcaacggcaacacctacctgcactggtatctgcagaagcccggccagagccccaagctgctgatctaccgggtgtccaacagattccccggcgtgcccgatagattcagcggctctggcagcggcaccgacttcaccctgaagatcagccgggtggaagccgaggacctgggcatctatttctgcagccagagcacccacgtgccctacacctttggcggaggcaccaagctggaaatcaagcggggcggaggcggaagtggaggcggaggatctggcggcggaggctctgaagtgcggctgcagcagtctggccccgacctgattaagcctggggccagcgtgaagatgagctgcaaggccagcggctacaccttcaccggctacgtgatgcactgggtcaagcagaggccaggccagggcctggaatggatcggcttcatcaacccctacaacgacgacatccagagcaacgagcggttccggggcaaggccaccctgaccagcgataagagcagcaccaccgcctacatggaactgagcagcctgacctccgaggacagcgccgtgtactactgtgctaggggagccggctacaacttcgacggggcctacagattcttcgacttttggggccagggcaccacactgaccgtgtcctctacgcgtggaggcggatctaaagttgctgctcttaaagaaaaggtcgcggctctgaaagaaaaagtggcggcgctcaaggagaaagttgcagctctcaaagaa

SEQ ID NO: 1663 - DNA, 894 bp, Artificial Sequence
  Synthetic Polynucloetide
atggccttaccagtgaccgccttgctcctgccgctggccttgctgctccacgccgccaggccgagctacgagctgacccagcctcctagcgtgtccgtgtctcctggacagaccgccaccatctcttgcagcggcgatcaactgggcgggaagtacggccactggtatcagaagaagcccggccagagccccgtgctggtgctgtaccaggacagaaaacggcctgccggcatccccgagagattcagcggaagcagcagcggcaacaccatcaccctgaccatcagcggcacccaggccgtggatgaggccgactactactgccaggcttgggacaccaatctgggcggcgtgttcggcggaggcaccaaagtgacagtgctgggacagggcggaggcggaagtggaggcggaggatctggcggcggaggctctcaggtgcaactggtggaaagcggagccgaagtgaagaaacctggggccagcgtgaaggtgtcctgcaaggccagcggctacacctttaccggctactacatgcactgggtgcgccaggctccaggccagggactggaatggatgggccggatcaaccccaatagcggcggcaccaactacgcccagaaattccagggcagagtgaccatgaccagagacaccagcatcagcaccgcctacatggaactgagccggctgagaagcgacgacaccgccgtgtactactgcgccagccctagaggcagaggcagcgccttcgatatttggggccagggcacactcgtgaccgtgtcctctacgcgtggaggcggatctaaagttgctgctcttaaagaaaaggtcgcggctctgaaagaaaaagtggcggcgctcaaggagaaagttgcagctctcaaagaa

SEQ ID NO: 1664 - DNA, 903 bp, Artificial Sequence
  Synthetic Polynucloetide
atggccttaccagtgaccgccttgctcctgccgctggccttgctgctccacgccgccaggccgaacttcatgctgacccagccccacagcgtgtccgagagccctggcaagaccgtgaccatctcctgcaccagaagcagcggctctatcgccagcaaatacgtgcagtggtatcagcagaggcccggcagcagccctaccaccgtgatctacgaggacaaccagaggcctagcggcgtgcccgatagattcagcggcagcatcgacaccagcagcaacagcgccagcctgaccatcagcggcctgagaacagaggacgaggccgactactactgccacagctacgacagcaacaaccactccgtgttcggcggaggcaccaaagtgacagtgctgggacagggcggaggcggaagtggaggcggaggatctggcggcggaggctctgaagtgcaactggtggaaagcgggggaggcgtggtgcagccaggcggatctctgagactgagctgtgccgccagcggcttcaccttcagcagctacgccatgagctgggtgcgccaggcccctggaaaaggcctggaatgggtgtccgccatctctggctctggcggcagcacctactacgccgatagcgtgaagggccggttcagcatcagccgggacaacagcaagaacaccctgtacctccagatgaacagcctgcgggccgaggacaccgccgtgtactactgtgccagaaccagaagctccggggccttcgacatctggggccagggaacactcgtgaccgtgtcctctacgcgtggaggcggatctaaagttgctgctcttaaagaaaaggtcgcggctctgaaagaaaaagtggcggcgctcaaggagaaagttgcagctctcaaagaa

SEQ ID NO: 1665 - DNA, 891 bp, Artificial Sequence
  Synthetic Polynucloetide
atggccttaccagtgaccgccttgctcctgccgctggccttgctgctccacgccgccaggccggacatccagatgaaccagagccccagcagcctgagcgccagcctgggcgataccatcaccatcacctgtcacgccagccagaacatcaacgtgtggctgagctggtatcagcagaagcccggcaacatccccaagctgctgatctacaaggccagcaacctgcacaccggcgtgcccagcagattttctggcagcggctctggcaccggcttcaccattaccatcagctccctccagcccgaggacattgccacctactactgccagcagggccagagctacccctggacatttggcggaggcaccaagctggaaatcaagagaggcggaggcggaagtggaggcggaggatctggcggcggaggctctgaagtgcaactccagcagagcggcccagagcttgtgaagcctggcgcttccgtgaagattagctgcaaagccagcggctacagcttcaccggctacttcatgaactgggtcaagcagagccacggcaagagcctggagtacatcggcagattcaacccctacaacggcgagacactgtacaaccagaagttcaagggcaaggccaccctgaccgtggacaagagcagcagcaccgtgcacatggaactgctgagcgtgaccagcgaggacagcgccgtgtactactgtggcagaagcggcaacgacgacgctatggactattggggccagggcaccagcgtgaccgtgtctagtgctacgcgtggaggcggatctaaagttgctgctcttaaagaaaaggtcgcggctctgaaagaaaaagtggcggcgctcaaggagaaagttgcagctctcaaagaa

SEQ ID NO: 1666 - DNA, 882 bp, Artificial Sequence
  Synthetic Polynucloetide
atggccttaccagtgaccgccttgctcctgccgctggccttgctgctccacgccgccaggccggacatcctgctgacacagagccccgccatcctgtccgtgtctccaggcgagagagtgtcctttagctgccgggccagccagaacatcggcaccagcatccactggtatcagcagcggaccaacggcagccccagactgctgattaagtacgccagcgagtccgtgtccggcatccccagcagattttctggcagcggctccggcaccgacttcaccctgagcatcaacagcgtggaaagcgaggacattgccgactactactgccagcacaccaatagctggcccaccacctttggcggaggcaccaagctggaaatcaagagaggcggaggcggaagtggaggcggaggatctggcggcggaggctctcaggtgcaactccagcagtccgacgccgagcttgtgaagcctggcgcttccgtgaagattagctgcaaggccagcggctacaccttcaccgaccacgccattcactgggtcaagcagaagcccgagcagggcctggaatggatcggctacttcagccccggcaacggcgacatcaagtacaacgagaagttcaagggcaaggccaccctgaccgccgacaagagcagcagcacagcctacatgcaactgaacagcctgaccagcgaggactccgccgtgtacttctgcaagcggagctacggcaactacgactactggggccagggcaccacactgaccgtgtctagtacgcgtggaggcggatctaaagttgctgctcttaaagaaaaggtcgcggctctgaaagaaaaagtggcggcgctcaaggagaaagttgcagctctcaaagaa

SEQ ID NO: 1667 - DNA, 897 bp, Artificial Sequence
  Synthetic Polynucloetide
atggccttaccagtgaccgccttgctcctgccgctggccttgctgctccacgccgccaggccggacatcgtgatgacccagagccccgatagcctggccgtgtctctgggagagagagccaccatcaactgcaagagcagccagagcctgctgaacagcggcgaccagaagaactacctgacctggtatcagcagaagcccggccagccccccaagctgctgatctactgggccagcaccagagaaagcggcgtgcccgatagattcagcggcagcggaagtggcaccgacttcaccctgaccatcagttctcttcaggccgaggacgtggccgtgtactactgccagaacgactacagctaccccctgaccttcggccagggcaccaaggtggaaatcaagggcggaggcggaagtggaggcggaggatctggcggcggaggctctcaggtgcagctggtgcagtctggggccgaagtgaagaaaaccggcagcagcgtgaaggtgtcctgcaaggccagcggctacacctttaccgaccacgccattcacgtgtggcggcaggctccaggacaggccctggaatggatgggccacttcagccccggcaacaccgacatcaagtacaacgacaagttcaagggcagagtgaccctgaccgtggaccgcagcatgagcaccgcctacatggaactgagcagcctgcggagcgaggacaccgccatgtactattgcaagaccagcaccttctttttcgactactggggccagggaacaatggtcaccgtgtccagcacgcgtggaggcggatctaaagttgctgctcttaaagaaaaggtcgcggctctgaaagaaaaagtggcggcgctcaaggagaaagttgcagctctcaaagaa

SEQ ID NO: 1668 - DNA, 894 bp, Artificial Sequence
  Synthetic Polynucloetide
atggccttaccagtgaccgccttgctcctgccgctggccttgctgctccacgccgccaggccggacatccagatgacccagagccccagcagcctgtctgccagcgtgggcgacagagtgaccatcacatgcaaggccagccaggacgtgtccattgccgtggcctggtatcagcagaagcccggcaaggcccccaaggtgctgatctacagcgccagctacagatacaccggcgtgcccgacagattcagcggctctggcagcggcaccgacttcaccttcaccatcagctccctccagcccgaggatattgccgtgtactactgccagcagcactacatcacccccctgacctttggcggaggcaccaaggtggaaatcaagggcggaggcggaagtggaggcggaggatctggcggcggaggctctcagatccaactggtgcagagcggccacgaagtgaagaaacctggggccagcgtgaaggtgtcctgcaaagccagcggctacacctttaccaactacggcatgaactgggtgcgccaggcccctggacagggcctggaatggatgggctggatcaacaccaagaccggcgagcccacctacgccgaagagttcaagggcagattcgtgttcagcctggaaaccagcgcctccaccgcctacctccagatcagctctctgaaggccgaggacaccgccatgtacttttgcggcagaggcggctacggcagcagctactggtacttcgatgtgtggggccagggcaccaccgtgaccgtgtcatctacgcgtggaggcggatctaaagttgctgctcttaaagaaaaggtcgcggctctgaaagaaaaagtggcggcgctcaaggagaaagttgcagctctcaaagaa

SEQ ID NO: 1669 - DNA, 903 bp, Artificial Sequence
  Synthetic Polynucloetide
atggccttaccagtgaccgccttgctcctgccgctggccttgctgctccacgccgccaggccgcaggctgtcgtgacacagcctcctagcgcctctggcacaccaggccagagagtgaccatctcctgtagcggcagcagcagcaacatcggcagcaacaccgtgaactggtatcagcaggtgcccggcaccgctcccaagctgctgatctacagcaacaaccagcggcccagcggcgtgcccgatagattttctggcagcaagagcggcaccagcgccagcctggctatctctggactccagtccgaggacgaggccgactactattgcgccgcctgggacgatagcctgaacggctgggtgttcggcggaggcaccaagctgacagtgctgggcggaggcggaagtggaggcggaggatctggcggcggaggctctcagatgcaactggtgcagagcggagccgaagtgaaagagcctggcgagagcctgcggatctcctgcaagggcagcggctacagcttcaccaatttctggatctcttgggtgcgccagatgcccggcaagggcctggaatggatgggcagagtggaccccggctactcctacagcacctacagccctagcttccagggccacgtgaccatcagcgccgacaagagcaccagcaccgcctacctccagtggaacagcctgaaggccagcgacaccgccatgtactactgcgccagagtgcagtacagcggctattacgattggttcgacccctggggccagggcacactcgtgacagtgtcaagcacgcgtggaggcggatctaaagttgctgctcttaaagaaaaggtcgcggctctgaaagaaaaagtggcggcgctcaaggagaaagttgcagctctcaaagaa

SEQ ID NO: 1670 - DNA, 885 bp, Artificial Sequence
  Synthetic Polynucloetide
atggccttaccagtgaccgccttgctcctgccgctggccttgctgctccacgccgccaggccggacatccagatgacccagagccccagcacactgagcgccagcgtgggcgacagagtgaccatcacctgtcgggccagccagaacatcaacaagtggctggcctggtatcagcagaggcccggaaaagccccccagctgctgatctacaaggccagcagcctggaaagcggcgtgcccagcagattttctggcagcggctctggcaccgagtacaccctgaccatcagctccctccagcccgacgacttcgccacctactactgccagcagtacaacagctacgccaccttcggccagggcaccaaggtggaaatcaagagaggcggaggcggaagtggaggcggaggatctggcggcggaggctctcaggtgcagctggtgcagtctggggccgaagtgaagaagcctggcgagagcctgaagatcagctgcaagggctccggctacaacttctctaacaagtggatcggctgggtgcgccagctgcctggcagaggactggaatggatcgccatcatctaccccggctacagcgacatcacctacagccccagcttccagggccgcgtgacaatcagcgccgacaccagcatcaacaccgcctacctgcactggcacagcctgaaggccagcgacaccgccatgtactactgcgtgcggcatacagccctggctggcttcgattattggggcctgggcaccctcgtgaccgtgtctagtacgcgtggaggcggatctaaagttgctgctcttaaagaaaaggtcgcggctctgaaagaaaaagtggcggcgctcaaggagaaagttgcagctctcaaagaa

SEQ ID NO: 1671 - DNA, 900 bp, Artificial Sequence
  Synthetic Polynucloetide
atggccttaccagtgaccgccttgctcctgccgctggccttgctgctccacgccgccaggccgcagagcgtcgtgacacagcctcctagcgtgtcagtggcccctggcaagaccgccagaatcacctgtggccggaacaacatcggcagcaagagcgtgcactggtatcagcagaagcccggccaggctcctgtgctggtggtgtacgacgacagcgacagacccagcggcatccccgagagattcagcggcagcaactccggcaataccgccaccctgaccatcagcagagtggaagccggcgacgaggccgactactactgccaagtgtgggacagcagcagcgatcacgtggtgtttggcggaggcaccaagctgacagtgctgggtggcggaggcggaagtggaggcggaggatctggcggcggaggctctgaagtgcaactggtgcagtctggcggaggggtcgtgcggcctggcggatctctgagactgtcttgtgccgccagcggcttcaccttcgacgactacggcatgagctgggtgcgccaggcccctggaaaaggcctggaatgggtgtccggcatcaactggaatggcggcagcaccggctacgccgattctgtgcggggcagattcaccatcagccgggacaacgccaagaacagcctgtacctgcagatgaactccctgcgggccgaggacaccgccctgtactattgcgccagagagcggggctacggctaccacgaccctcacgattattggggccagggcacccttgtcaccgtgtcctctacgcgtggaggcggatctaaagttgctgctcttaaagaaaaggtcgcggctctgaaagaaaaagtggcggcgctcaaggagaaagttgcagctctcaaagaa

SEQ ID NO: 1672 - DNA, 897 bp, Artificial Sequence
  Synthetic Polynucloetide
atggccttaccagtgaccgccttgctcctgccgctggccttgctgctccacgccgccaggccggacatcgtgctgacacagagccctgcttctctggccgtgtctctgggacagagagccaccatcagctgtagagccagcgagagcgtggacaactacggcaacaccttcatgcactggtatcagcagaagcccggccagcctcctaagctgctgatctacagagccagcaacctggaaagcggcatccccgccagattttctggcagcggcagcagaaccgacttcaccctgaccatcaatcccgtggaagccgacgacgtggcaacctactactgccagcagagcaacgaggaccctcctacatttggagccggcaccaagctggaactgaaaggcggaggcggaagtggaggcggaggatctggcggcggaggctctcagattcagctggtgcagtctggccccgagctgaagaaacctggcgagacagtgaagatcagctgcaaggccagcggctacatcttcaccaattacggcatgaactgggtcaagcaggcccctggcaagagcttcaagtggatgggctggatcaacacctacaccggcgagagcacatacagcgccgacttcaagggcagattcgccttcagcctggaaaccagcgccagcacagcctacctgcacatcaacgacctgaagaacgaggacaccgccacctacttttgcgccagaagcggcggctacgaccctatggattattggggccagggcaccagcgtgaccgtttcttctacgcgtggaggcggatctaaagttgctgctcttaaagaaaaggtcgcggctctgaaagaaaaagtggcggcgctcaaggagaaagttgcagctctcaaagaa

SEQ ID NO: 1673 - DNA, 891 bp, Artificial Sequence
  Synthetic Polynucloetide
atggccttaccagtgaccgccttgctcctgccgctggccttgctgctccacgccgccaggccggagatcgtgctgacacagagccctggcaccctgagcctgtctccaggcgaaagagccacactgagctgtcgggccagccagagcgtgtccaatacctacctggcctggtatcaccagaggcccggacaggctccccggctgctgatctatggcgcttctagcagagccaccggcatccccgatagattcagcggctctggcagcggcaccgacttcgccctgacaatcagctccctggaacccgaggacttcgccgtgtactactgccagcagtacagcaactcctggaccttcggccagggcaccaaggtggaaatcaagagaggcggaggcggaagtggaggcggaggatctggcggcggaggctctcaggtgcaactggtggaatctggcgggggagtggtgcagcctggcagaagcctgagactgtcttgtgccgccagcggcttcaccttcagcagctacgacatgcactgggtgcgccaggcccctggcaaaggactggaatgggtggccgtgatctcctacgacggcaccaacgagtattacgccgacagcgtgaagggccggttcaccatctccagagacaccagcaagaacaccctgtacctccagatgaacagcctgcgggccgaggacacagccgtgtattattgcgccagagagcggtacttcgactggtccttcgactactggggccagggaaccctggtgtccgtgtctagtacgcgtggaggcggatctaaagttgctgctcttaaagaaaaggtcgcggctctgaaagaaaaagtggcggcgctcaaggagaaagttgcagctctcaaagaa

SEQ ID NO: 1674 - DNA, 888 bp, Artificial Sequence
  Synthetic Polynucloetide
atggccttaccagtgaccgccttgctcctgccgctggccttgctgctccacgccgccaggccggagctgacacaggaccctgctgtgtctgttgccctgggccagacagtgcggattacctgtcaaggcgacagcctgagaagcaactacgccaactggtatcagcagaagcccggacaggctcccgtgctggttatctacggccagaacaacagacccagcggcatccccgatagattcagcggctctagctctggcaataccgccagcctgacaatcactggcgctcaggctgccgatgaggccgactactactgcgatagcagagtgtccaccggcaatcacgtggtgtttggcggcggaacaaagctgacagtgctcggacaaggcggaggcggaagtggaggcggaggatctggcggcggaggctctgaagttcagctggtgcagagcggagccgaagtgaagaaacctggggcctctgtgaaggtgtcctgcaaggcttccggctacacctttaccagctacgccatgcactgggtccgacaggcacctggacaacggcttgaatggatgggctggatcaacgccggcaacggcaacaccaagtacagccagaaattccagggccgcgtgaccatcaccagagatacaagcgccagcaccgcctacatggaactgtctagcctgagatccgaggacaccgccgtgtactactgtgccagagacatcagctacggcagcttcgactattggggccagggcacactggtcaccgttagctctacgcgtggaggcggatctaaagttgctgctcttaaagaaaaggtcgcggctctgaaagaaaaagtggcggcgctcaaggagaaagttgcagctctcaaagaa

SEQ ID NO: 1675 - DNA, 876 bp, Artificial Sequence
  Synthetic Polynucloetide
atggccttaccagtgaccgccttgctcctgccgctggccttgctgctccacgccgccaggccggacatccagatgacacagagccctagcagcctgtctgccagcgtgggagacagagtgaccatcacctgtagcgccaccagcagcatcagctacatgcactggtatcagcagaagcccggcaaggcccctaaaggctggatctacgataccagcaaactggcccacggcgtgcccagcagattttctggttctggcagcggcaccgacttcaccctgacaatatctagcctccagcctgaggacttcgccacctactactgccaccagagaagaagctaccccttcaccttcggccagggcaccaaggtggaaatcaaaggcggaggcggaagtggaggcggaggatctggcggcggaggctctgaagtgcaactggttcagagcggagccgaagtgaagaaacctggggcctctgtgaaggtgtcctgcaaggcttccggctacacctttaccaatttctggattcactgggtccgacaggctccaggccaaggactggaatggatcggagagatcgaccccagcgacagctacaccaactacaaccagaaattcaaaggccgggtcaccatcaccagagacaccagcacaagcaccgcctacctggaactgagcagcctgagaagcgaggacaccgccgtgtactactgcgccagggaaatcaccaccgtggattattggggccagggaaccctggtcaccgtgtcatctacgcgtggaggcggatctaaagttgctgctcttaaagaaaaggtcgcggctctgaaagaaaaagtggcggcgctcaaggagaaagttgcagctctcaaagaa

SEQ ID NO: 1676 - DNA, 897 bp, Artificial Sequence
  Synthetic Polynucloetide
atggccttaccagtgaccgccttgctcctgccgctggccttgctgctccacgccgccaggccggacatccagatgacacagagccctagcagcctgtctgccagcgtgggagacagagtgaccatcacatgcaaggccagccagggcttcaacaaatacgtggcctggtatcagcagaagcccggcaaggctcctaagctgctgatctactacaccagcacactccagcctggcgtgcccagcagattttctggctctggcagcggcagagactacaccctgacaatatccagcctccagccagaggacttcgccacctactactgtctccagtacggcaacctgctgtacgcctttggacagggcaccaaggtggaaatcaagagaggcggaggcggaagtggaggcggaggatctggcggcggaggctctgaagttcagcttgtgcagagcggagccgaagtgaagaaacctggggcctctgtgaaggtgtcctgcaaagccagcggctacacctttaccagctactggatcggctgggtccgacaggctcctggacaaggactggaatggatcggcgacatctatcccggcggaggctacaccaactacaacgagaagttcaagggccgcgtgacaatcaccagagacacctctacaagcaccgcctacctggaactgagcagcctgagaagcgaggacaccgccgtgtactactgcgccagactggatggcagcagctacagaggcgctatggattcttggggccagggcacactggtcaccgtttcttctacgcgtggaggcggatctaaagttgctgctcttaaagaaaaggtcgcggctctgaaagaaaaagtggcggcgctcaaggagaaagttgcagctctcaaagaa

SEQ ID NO: 1677 - DNA, 885 bp, Artificial Sequence
  Synthetic Polynucloetide
atggccttaccagtgaccgccttgctcctgccgctggccttgctgctccacgccgccaggccggacatccagatgacacagagccctagcagcctgtctgccagcgtgggagacagagtgaccatcacctgtagagccagccaggacatccggtactacctgaactggtatcagcagaagcccggcaaggcccctaagctgctgatctatgtggcctccagcctccagagcggagtgccttctagattttctggcagcggctccggcaccgagtttaccctgacagtgtctagcttgcagcccgaggacttcgccacctactactgcctgcaagtgtacagcacccctcggacctttggacagggcaccaaggtggaaatcaaaggcggaggcggaagtggaggcggaggatctggcggcggaggctctgaagtgcagcttgttgaatctggcggcggactggctaagcctggcggatctctgagactgtcttgtgccgccagcggcttccggttcaccttcaacaactactacatggactgggtccgacaggcccctggacaaggacttgaatgggtgtccagaatcagcagcagcggcgaccctacttggtacgccgattctgtgaagggcagattcaccatcagcagagagaacgccaagaacaccctgttcctccagatgaactccctgagagccgaggacaccgccgtgtactattgtgcctctctgaccaccggcagcgattcttggggacagggcgtgctggttaccgtgtcatctacgcgtggaggcggatctaaagttgctgctcttaaagaaaaggtcgcggctctgaaagaaaaagtggcggcgctcaaggagaaagttgcagctctcaaagaa

SEQ ID NO: 1678 - DNA, 888 bp, Artificial Sequence
  Synthetic Polynucloetide
atggccttaccagtgaccgccttgctcctgccgctggccttgctgctccacgccgccaggccggagatcgtgatgacacagagccccgccacactgagtgtgtctccaggcgaaagagccacactgtcctgtagagccagccagagcgtgtccagaaacctggcctggtatcagcagaagcctggacaggctccccggctgttgatctacggcgcttctacaagagccaccggcattcccgccagattttctggctctggcagcggcaccgagttcaccctgacaatcggaagcctccagagcgaggacttcgccgtgtactactgccagcagtacaagacctggcctcggacctttggacagggcaccaacgtggaaatcaaaggcggaggcggaagtggaggcggaggatctggcggcggaggctctcaagttcagctgcaacaatggggagccggcctgctgaagcctagcgaaacactgtctctgacctgcgccgtgttcggcggctctttcagcggctactactggtcctggatcagacagcctcctggcaaaggactggaatggatcggcgagatcaaccaccggggcaacaccaacgacaaccccagcctgaaaagcagagtgaccatcagcgtggacaccagcaagaaccagttcgccctgaagctgagcagcgtgacagccgctgataccgccgtgtattattgcgccagagagcggggctacacctacggcaatttcgatcactggggccagggcaccctggtcacagtttcttctacgcgtggaggcggatctaaagttgctgctcttaaagaaaaggtcgcggctctgaaagaaaaagtggcggcgctcaaggagaaagttgcagctctcaaagaa

SEQ ID NO: 1679 - DNA, 906 bp, Artificial Sequence
  Synthetic Polynucloetide
atggccttaccagtgaccgccttgctcctgccgctggccttgctgctccacgccgccaggccggacatccagatgacccagagccccagcagcctgtctgccagcgtgggcgacagagtgaccatcacatgcaaggccagcaagaacatcagaagctacctggcctggtatcagcagaagcccggcaaggcccccaagctgctgatctacagcggcagcacactgcacagcggcgtgcccagcagattttccggctctggcagcggcaccgacttcaccctgaccatctctagcctccagcccgaggacttcgccacctactactgccagcagcaccacgagtaccccctgacattcggccagggcaccaaggtggaaatcaagagaggcggaggcggaagtggaggcggaggatctggcggcggaggctctcaggtgcaactccaggaatctggccccggactcgtgaagcccagcgagacactgagcctgacctgtaccgtgtccggctacaccatcaccagcggctacgactggtcctggatcagacagcctcctggcaagggcctggaatggatcggctacatcaactacggcggctccaccaactacaagcccagcctgggaagccgcgtgacaatcagcgtggacacctccaagaaccagttcagcctgaagctgagcagcgtgacagccgccgataccgccgtgtactactgcgcccggtacaacgagtacaagagctacatctacgattggtacttcgacttctggggccagggaaccctcgtgaccgtgtctagtacgcgtggaggcggatctaaagttgctgctcttaaagaaaaggtcgcggctctgaaagaaaaagtggcggcgctcaaggagaaagttgcagctctcaaagaa

SEQ ID NO: 1680 - DNA, 912 bp, Artificial Sequence
  Synthetic Polynucloetide
atggccttaccagtgaccgccttgctcctgccgctggccttgctgctccacgccgccaggccgcagtctgtggtcacacagcctccatccgtgtctgctgcccctggacagaaagtgaccatctcctgtagcggcagcagcagcaacatcggcaacaactacgtgtcctggtatcagcagctccccggcacagctcccaaactgctgatctacgacaacaacaagcggcccagcggcatccccgatagattttctggcagcaagagcggcaccagcgccacactgggaattaccggacttcagacaggcgacgaggccgactactactgtggcacatgggatggcagcctgtacaccatgcttttcggcggaggcaccaagctgacagtgcttggcggaggcggaagtggaggcggaggatctggcggcggaggctctgaagtgcaactggtggaatctggcggcggactggttaagcctggcggatctctgagactgtcttgtgccgccagcggcttcaccttcagcaatgcctggatgagctgggttcgacaggcccctggaaaaggactggaatgggtcggattcatccggtccaaagcctacggcggcaccacagaatatgccgcctctgtgaagggcagattcaccatcagccgggacgacagcaagtctatcgcctacctccagatgaacaacctgaaaaccgaggacaccgccgtgtactactgcgccagagatggcctgtacagcagctcttggtacgacagcgattactggggccagggcacactggtcacagtgtcatctacgcgtggaggcggatctaaagttgctgctcttaaagaaaaggtcgcggctctgaaagaaaaagtggcggcgctcaaggagaaagttgcagctctcaaagaa

SEQ ID NO: 1681 - DNA, 927 bp, Artificial Sequence
  Synthetic Polynucloetide
atggccttaccagtgaccgccttgctcctgccgctggccttgctgctccacgccgccaggccgcagtctgtgctgacacagcctcctagtgtgtctggcgctcctggacagagagtgaccatctcttgtaccggcagcagcagcaatatcggagccggctatgacgtgcactggtatcagcagctccctggcacagcccctaaactgctgatcttcggcaacagcaacagacccagcggcgtgcccgatagattcagcggctttaagagcggcacaagcgccagcctggctatcactggactgcaagccgaggacgaggccgactacttctgccagagctacgatagcagcctgagcggcagcggagtgtttggcacaggcaccaaagtgacagtgcttggcggcggaggcggaagtggaggcggaggatctggcggcggaggctctcaaatgcaactggttcaaagcggcggtggcctggtgcaacctggaagaagtctgagactgagctgtgccgccagcggcttcaccttcgatgattacgccatgcactgggtccgacaggcccctggaaaaggactggaatgggtgtccggcatctcctggaatagcggctctatcggctacgccgacagcgtgaagggcagattcaccatcagccgggacaacgccaagaacagcctgtacctccagatgaactccctgagagccgaggatacagccctgtactactgcgccaaggacatccacagcggcagctactacggcctgctgtactacgctatggacgtgtggggccagggcacaaccgtgacagtttcttctacgcgtggaggcggatctaaagttgctgctcttaaagaaaaggtcgcggctctgaaagaaaaagtggcggcgctcaaggagaaagttgcagctctcaaagaa

SEQ ID NO: 1682 - DNA, 927 bp, Artificial Sequence
  Synthetic Polynucloetide
atggccttaccagtgaccgccttgctcctgccgctggccttgctgctccacgccgccaggccgctgcctgttctgacacagcctccatctgcctctggcacacctggacagagagtgaccatcagctgtagcggcagaagcagcaacatcggcagcaacagcgtgaactggtacagacagcttcctggcgctgcccctaagctgctgatctacagcaacaaccagcggcctcctggcgtgccagtcagattttctggcagcaagagcggcacaagcgccagcctggctatttctggactccagtctgaggacgaggccacctactactgtgccacctgggacgacaacctgaacgtgcactacgtgttcggcaccggcaccaaagtgacagtgcttggaagtagaggcggaggcggaagtggaggcggaggatctggcggcggaggctctcttgaaatggctcaggtgcagctggtgcagagcggagccgaagtgaagaaacctggcagcagcgtgaaggtgtcctgcaaagcttctggcggcaccttcagcagctacgccatctcttgggttcgacaggcccctggacaaggactggaatggatgggcagaatcatccccatcctgggaatcgccaactacgcccagaaattccagggcagagtgacaatcaccgccgacaagagcaccagcaccgcctacatggaactgagcagcctgagaagcgaggacaccgccgtgtactattgtgcaagaggcggctactacagccacgacatgtggagcgaagattggggccagggcacactggtcacagtgtcatctacgcgtggaggcggatctaaagttgctgctcttaaagaaaaggtcgcggctctgaaagaaaaagtggcggcgctcaaggagaaagttgcagctctcaaagaa

SEQ ID NO: 1683 - DNA, 894 bp, Artificial Sequence
  Synthetic Polynucloetide
atggccttaccagtgaccgccttgctcctgccgctggccttgctgctccacgccgccaggccggacatcgtgctgacacagagccctgcttctctggccgtgtctctgggagagagagccaccatcaactgtagagccagcgagagcgtgtccgtgattggagcccacctgatccactggtatcagcagaagcctggacagcctcctaagctgctgatctacctggcctccaacctggaaacaggcgtgccagccagattttctggcagcggctctggcaccgatttcaccctgacaatcagcagcctccaggccgaagatgccgccatctactactgcctccagagccggatcttccccagaacctttggacagggcaccaagctggaaatcaaaggcggaggcggaagtggaggcggaggatctggcggcggaggctctcaagttcagctggtgcagtctggctccgagctgaagaaacctggcgagtccgtgaagatcagctgcaaggccagcggctacaccttcaccgactacagcatcaactgggtcaagcaggcccctggacagggactgaaatggatgggctggatcaacaccgagacaagagagcccgcctacgcctacgacttcagaggcagattcgtgttctccctggacaccagcgccagcacagcctatctccagatcagctctctgaaggccgaggataccgccgtgtacttctgcgccctggactacagctacgctatggactattggggccagggcaccctggtcacagtctcttctacgcgtggaggcggatctaaagttgctgctcttaaagaaaaggtcgcggctctgaaagaaaaagtggcggcgctcaaggagaaagttgcagctctcaaagaa

SEQ ID NO: 1684 - DNA, 897 bp, Artificial Sequence
  Synthetic Polynucloetide
atggccttaccagtgaccgccttgctcctgccgctggccttgctgctccacgccgccaggccggacatcgtgctgacacagtctcccgccacactgtcactgagccctggcgatagagccacactgagctgtagagccagcgagagcgtgacaatcctgggcagccacctgatctactggtatcagcagaagcccggacaggcccctagactgctgattcagctcgccagcaatgtgcagacaggcatccctgccagattttccggcagcggcagcagaaccgatttcaccctgaccataagcagcctggaacctgaggacttcgccgtgtactactgcctccagagccggacaatccccagaacctttggacagggcaccaagctggaaatcaagagaggcggaggcggaagtggaggcggaggatctggcggcggaggctctcaagttcaactggtgcagagcggctccgagctgaagaaacctggcgagtccgtgaagattagctgcaaggccagcggctacaccttcacacactacagcatgaactgggtccgacaggctccaggccaaggactggaatggatgggcagaatcaacaccgagacaggcgagcccctgtacgccgacgatttcaagggcagattcgtgttcagcctggacaccagcgccagcacagcctatctccagatcagctctctgaaggccgaggacaccgccgtgtattattgcagcaacgactacctgtactccctggactattggggccagggcacactggtcacagtgtctagtacgcgtggaggcggatctaaagttgctgctcttaaagaaaaggtcgcggctctgaaagaaaaagtggcggcgctcaaggagaaagttgcagctctcaaagaa

SEQ ID NO: 1685 - DNA, 909 bp, Artificial Sequence
  Synthetic Polynucloetide
atggccttaccagtgaccgccttgctcctgccgctggccttgctgctccacgccgccaggccggacttcgtgatgacacagagccctgatagcctggccgtgtctctcggcgagcgagtgaccatgagctgcaagtctagccagagcctgctgaacagcggcaaccagaagaactacctgacctggtatcagcagaagcccggccagcctcctaagctgctgatctactgggccagcaccagagaaagcggcgtgcccgatagattttctggctctggcagcggcaccgacttcaccctgacaatttctagcctgcaagccgaggacgtggccgtgtactactgccagaacgactacagctacccctacaccttcggccagggcaccaagctggaaatcaaaggcggaggcggaagtggaggcggaggatctggcggcggaggctctgaagtgcaactggttcagagcggagccgagctgaagaaacctggggccagcgtgaaggtgtcctgtaaagccagcggctacacctttaccgactactacatgaaatgggtccgacaggccccaggccagggactcgaatggatcggcgatattatccccagcaacggggccaccttctacaaccagaaattcaagggccgcgtgaccatcaccgtggacaagagcacaagcaccgcctacatggaactgagcagcctgagaagcgaggacaccgccgtgtattattgcgccagaagccatctgctgcgggccagttggttcgcctattggggacagggaaccctggtcaccgttagctctacgcgtggaggcggatctaaagttgctgctcttaaagaaaaggtcgcggctctgaaagaaaaagtggcggcgctcaaggagaaagttgcagctctcaaagaa

SEQ ID NO: 1686 - DNA, 909 bp, Artificial Sequence
  Synthetic Polynucloetide
atggccttaccagtgaccgccttgctcctgccgctggccttgctgctccacgccgccaggccggacttcgtgatgacacagagccctgatagcctggccgtgtctctcggcgagcgagtgaccatgagctgcaagtctagccagagcctgctgaacagcggcaaccagaagaactacctgacctggtatcagcagaagcccggccagcctcctaagctgctgatctactgggccagcaccagagaaagcggcgtgcccgatagattttctggctctggcagcggcaccgacttcaccctgacaatttctagcctgcaagccgaggacgtggccgtgtactactgccagaacgactacagctacccctacaccttcggccagggcaccaagctggaaatcaaaggcggaggcggaagtggaggcggaggatctggcggcggaggctctcaagtgcaactggttcagagcggagccgagctgaagaaacctggggccagcgtgaaggtgtcctgtaaagccagcggctacacctttaccgactactacatgaaatgggtccgacaggccccaggccagggactcgaatggatcggcgatattatccccagcaacggggccaccttctacaaccagaaattcaagggccgcgtgaccatcaccgtggacaagagcacaagcaccgcctacatggaactgagcagcctgagaagcgaggacaccgccgtgtattattgcgccagaagccatctgctgcgggccagttggttcgcctattggggacagggaaccctggtcaccgttagctctacgcgtggaggcggatctaaagttgctgctcttaaagaaaaggtcgcggctctgaaagaaaaagtggcggcgctcaaggagaaagttgcagctctcaaagaa

SEQ ID NO: 1687 - DNA, 879 bp, Artificial Sequence
  Synthetic Polynucloetide
atggccttaccagtgaccgccttgctcctgccgctggccttgctgctccacgccgccaggccggacgtgcagatcacacagagccctagctacctggctgcctctcctggcgagacaatcaccatcaactgtcgggccagcaagagcatcagcaaggacctggcctggtatcaagagaagcccggcaagaccaacaagctgctgatctacagcggcagcacactccagtctggcatccccagcagattttccggctctggcagcggcaccgatttcaccctgaccataagcagcctggaacctgaggacttcgccatgtactactgccagcagcacaacaagtacccctacacctttggcggaggcaccaagctggaaatcaagagaggcggaggcggaagtggaggcggaggatctggcggcggaggctctcaagttcaactgcaacagcctggggccgagcttgttagacctggcgcttctgtgaagctgagctgcaaggccagcggctacaccttcaccagctactggatgaactgggtcaagcagcggcctgaccagggcctcgaatggatcggcagaatcgacccctacgacagcgagacacactacaaccagaagttcaaggacaaggccatcctgaccgtggacaagagcagctccaccgcctacatgcaactgagcagcctgacctctgaggatagcgccgtgtactattgcgccagaggcaactgggacgactattggggccagggcacaaccctgacagtgtctagtacgcgtggaggcggatctaaagttgctgctcttaaagaaaaggtcgcggctctgaaagaaaaagtggcggcgctcaaggagaaagttgcagctctcaaagaa

SEQ ID NO: 1688 - DNA, 885 bp, Artificial Sequence
  Synthetic Polynucloetide
atggccttaccagtgaccgccttgctcctgccgctggccttgctgctccacgccgccaggccggagatcgtgctgacacagagccctaccagcatgacagcctctccaggcgagcaagtgaccatcacctgtagagccagcagcagcatcaactacatgcactggtatcagcagaagcctggcgcaagccccagaccttggatctacgagacaagcaagctggcctccggcgtgcccgatagattttctggatctgccagcggcaccagctacagcctgaccatcaacaacatggaagccgaggacgccgccacctactactgccagcagtggaattacccctcctggacctttggcggaggcaccaagctggaacttaaaggcggaggcggaagtggaggcggaggatctggcggcggaggctctgaagtgcagctcgttgagtctggtggcggactggttcagcctggaagaagcctgaagctgagctgtgccgccagcggcttcaccttcagcgactacaatatggcctgggtccgacaggcccctaagaaaggactggaatgggtcgccaccatcctgtacgatggcggcagaacctactaccggggcagcgtgaagggcagattcaccatcagcagagacaacgccaagagcaccctgtacctgcggatggactctctgagaagcgaggataccgccacatattactgtgccacacacagccggggcaccgactactttgattattggggccagggcgtgatggttaccgtgtctagtacgcgtggaggcggatctaaagttgctgctcttaaagaaaaggtcgcggctctgaaagaaaaagtggcggcgctcaaggagaaagttgcagctctcaaagaa

SEQ ID NO: 1689 - DNA, 912 bp, Artificial Sequence
  Synthetic Polynucloetide
atggccttaccagtgaccgccttgctcctgccgctggccttgctgctccacgccgccaggccggacatcgtgatgacacagagcccttctagcctggccgtgtctgagggcgagacagtgaccatcaactgcaagagcagccagagcttcctgtctagcggcgacggcaagaattacgtggcctggtatcagtacaagcccggacagagccccaagctgctgatctactgggccagcacaagacagagcggcgtgcccgatagattcatcggctctggcagcggcaccgacttcaccctgacaatctctacagtgcaggccgaggacctggctatctactactgccagcagtattacgacacccctctgacctttggctccggcaccaagctggaaatcaaaggcggaggcggaagtggaggcggaggatctggcggcggaggctctgaagtgaagctgcaagagtctggccccagcctggtgcagagtagccaaacactgagcctgacctgtaccgtgtccggctttagcctgaccagctaccacatccactgggtccgacagacccctggcaaaggactggaatggatgggcgtgatgtggagcgacggcgacaccagctataacagcgccctgaagtcccggctgagcatcagcagagatacaagccagagccaggtgttcctgaagatgaacagcctccagaccgaggacaccgccacctactattgtgccagaggctactacagcagctacctgtacctttggttcgcctattggggccagggcaccctggttacagtcagctctacgcgtggaggcggatctaaagttgctgctcttaaagaaaaggtcgcggctctgaaagaaaaagtggcggcgctcaaggagaaagttgcagctctcaaagaa

SEQ ID NO: 1690 - DNA, 924 bp, Artificial Sequence
  Synthetic Polynucloetide
atggccttaccagtgaccgccttgctcctgccgctggccttgctgctccacgccgccaggccggacgtgctgatgacccagacacctgtgtctctgccagtgtctctcggaggccaggtgtccatctcctgtagaagcagccagagcctggtgcactccgacggcgatacctacctgcactggtatctccagaagcctggacagagccctcagctcctgatctaccgggtgtccaacagattcagcggcgtgcccgatagattttccggcagcggctctggcaccgacttcaccctgaagatcagcagagtggaacccgaggacctgggcctgtactactgtctccagaccacacacttcccaccttggacctttggcggaggcaccaagctggaaatgaaaggcggaggcggaagtggaggcggaggatctggcggcggaggctctcaggttcagctccagcagtctggacccgagcttagaaggccaggatctagcgtcagactgagctgcaaggccagcggctaccggatcaaggacttcctgatccactggattaagaacagacccgagcacggcctggaatggatcggatggattgaccctgaggacggcgagactaagtacgcccagaagttccagaccaaggccacactgaccgccgacacctctagcaacaccgcctacatgcaactgagcagcctgaccagcgaggacaccgccacctacttttgtgctagatggggcgacgtgtactacggcctgatgagaggccatgtgatggatgcctggggccagggaacaagcgtgacagtctcttctacgcgtggaggcggatctaaagttgctgctcttaaagaaaaggtcgcggctctgaaagaaaaagtggcggcgctcaaggagaaagttgcagctctcaaagaa

SEQ ID NO: 1691 - DNA, 912 bp, Artificial Sequence
  Synthetic Polynucloetide
atggccttaccagtgaccgccttgctcctgccgctggccttgctgctccacgccgccaggccggacatcgtgatgacccaggccgctcccagcatccctgtgacacctggcgagagcgtgtccatctcctgccggtctagcaagagcctgctgaacagcaacggcaatacctacctgtactggttcctccagcggccaggccagtctccccaactgctgatctaccggatgagcaacctggcctccggcgtgcccgatagattttctggcagcggctccggcaccgccttcaccctgagaatcagcagagtggaagccgaggacgtgggcgtgtactactgtatgcagcacctggaataccccttcaccttcggagccggcaccaagctggaactgaagagaggcggaggcggaagtggaggcggaggatctggcggcggaggctctgaagtgcaactccagcagagcggccctgagctgattaagcctggggccagcgtgaagatgagctgcaaggccagcggctacaccttcaccagctacgtgatgcactgggtcaagcagaagcccggccagggcctggaatggatcggctacatcaacccctacaacgatggcaccaagtacaacgagaagttcaagggcaaggccaccctgaccagcgacaagagcagcagcaccgcctacatggaactgagcagcctgacaagcgaggacagcgccgtgtactattgcgccagaggcacctactactacggcagccgggtgttcgactattggggccagggcaccacactgaccgtgtcctctacgcgtggaggcggatctaaagttgctgctcttaaagaaaaggtcgcggctctgaaagaaaaagtggcggcgctcaaggagaaagttgcagctctcaaagaa

SEQ ID NO: 1692 - DNA, 912 bp, Artificial Sequence; identical to SEQ ID NO: 1691
  Synthetic Polynucloetide

SEQ ID NO: 1693 - DNA, 966 bp, Artificial Sequence
  Synthetic Polynucloetide
atggccttaccagtgaccgccttgctcctgccgctggccttgctgctccacgccgccaggccgatcaacatctacaacgccgagcctgccaatcctagcgagaagaacagccccgaattcgacatcgtgatgacacagagccccgccacactgtcactgtctccaggcgaaagagccacactgagctgtcggagcagcaagagcctccagaacgtgaacggcaacacctacctgtactggttccagcagaagcccggccagtctcctcagctcctgatctacagaatgagcaacctgaacagcggcgtgcccgacagattttctggcagcggaagcggcaccgagttcaccctgaccataagcagcctggaacctgaggacttcgccgtgtactactgtatgcagcacctggaataccccatcaccttcggagccggcaccaagctggaaatcaaaggcggaggcggaagtggaggcggaggatctggcggcggaggctctgaagtgcaactggttgaatctggcggcggactggttaagcctggcggatctctgaagctgagctgtgccgccagcggctacacctttaccagctacgtgatgcactgggtccgacaggcccctggcaaaggacttgagtggatcggctacatcaacccctacaacgatggcaccaagtacaacgagaagttccagggcagagtgaccatcagctccgacaagagcatcagcaccgcctacatggaactgagcagcctgagaagcgaggataccgccatgtactattgcgccagaggcacctactactacggcaccagagtgttcgactactggggccagggaaccctggtcacagtctcttctacgcgtggaggcggatctaaagttgctgctcttaaagaaaaggtcgcggctctgaaagaaaaagtggcggcgctcaaggagaaagttgcagctctcaaagaa

SEQ ID NO: 1694 - DNA, 897 bp, Artificial Sequence
  Synthetic Polynucloetide
atggccttaccagtgaccgccttgctcctgccgctggccttgctgctccacgccgccaggccggacatccagatgacacagagccctagcagcctgtctgccagcgtgggagacagagtgaccatcacatgcaaggccagcgaccacatcaacaactggctggcctggtatcagcagaagcctggacaggcccctaagctgctgatctacggcgctaccacactggaaacaggcgtgcccagcagattttctggcagcggctctggcaccgactacaccctgacaatatccagcctccagcctgaggacttcgccacctactactgtcagcagagctggaacaccccttggacattcggccagggcaccaagctggaaatcaagagaggcggaggcggaagtggaggcggaggatctggcggcggaggctctcaagttcagcttcaacagcctggcgctgagctggtcaaacctggcgcttctgtgaagatgagctgcaaagccagcggctacgccttcagcagctactggatcaactggatgaagcagaaacccggccagggactcgaatggatcggccaaatctatcccggcgacggcgacaccaactacaacggcaagttcaagggcagagccacactgaccgccgatacctctagcagcacagcctacatgcagctgagcagcctgaccagcgaagatagcgccgtgtacttctgtgcccggtccatcacaacagtcgtgggctgcgctatggactattggggccagggaacaagcgtgaccgtgtctagtacgcgtggaggcggatctaaagttgctgctcttaaagaaaaggtcgcggctctgaaagaaaaagtggcggcgctcaaggagaaagttgcagctctcaaagaa

SEQ ID NO: 1695 - DNA, 903 bp, Artificial Sequence
  Synthetic Polynucloetide
atggccttaccagtgaccgccttgctcctgccgctggccttgctgctccacgccgccaggccgcagatcgtgctgtctcagtctcctgccatcctgagcgcttccccaggcgagaaagtgaccatgacctgtagagccagcagcagcgtgtcctacatgcactggtatcagcagaagcccggcagcagccctaagccttggatctacgccaccagcaatctggcctctggcgtgccagccagattttctggctctggcagcggcaccagctacagcttcacaatcagcagagtggaagccgaggacgccgccacctactattgtcagcagtggaccttcaatcctcctaccttcggcggaggcacccggctggaaatcaaaagaacagtggctgctggcggaggcggaagtggaggcggaggatctggcggcggaggctctcaggcttatctgcaacagagcggagccgaactcgtcagacctggcgcttctgtgaagatgagctgcaaggccagcggctacaccttcaccagctataatatgcactgggtcaagcagacccctcggcagggactcgaatggatcggcggaatctatcccggcaacggcgacacctcctacaaccagaagttcaagggcaaagccacactgaccgtgggcaagagcagcagcaccgcctatatgcagctcagcagcctgaccagcgaggacagcgccgtgtacttctgcgccagatacgactacaactacgctatggactactggggccagggcaccagcgtgacagttagctctgccagcacgcgtggaggcggatctaaagttgctgctcttaaagaaaaggtcgcggctctgaaagaaaaagtggcggcgctcaaggagaaagttgcagctctcaaagaa

SEQ ID NO: 1696 - DNA, 900 bp, Artificial Sequence
  Synthetic Polynucloetide
atggccttaccagtgaccgccttgctcctgccgctggccttgctgctccacgccgccaggccggacgagatcgtgctgacacagagccctgccaccctgtctctgagccctggcgaaagagccaccctgagctgtagagccagccagagcgtgtccagctacctggcctggtatcagcagaagcccggccaggctccccggctgctgatctacgatgccagcaatagagccaccggcatccccgccagattttccggctctggcagcggcaccgacttcaccctgaccatcagctccctggaacccgaggacttcgccgtgtactactgccagcagcggagcaactggcccatcacattcggccagggcacccggctggaaatcaaaggcggaggcggaagtggaggcggaggatctggcggcggaggctctgaggtgcagcttgttgagtctggcggaggactggtgcagcccgatagaagcctgagactgtcttgtgccgccagcggcttcaccttccacgattatgccatgcactgggtccgacaggcccctggcaaaggacttgaatgggtgtccaccatctcttggaacagcggcacaatcggctacgccgactctgtgaagggcagattcaccatcagccgggacaacgccaagaacagcctgtacctccagatgaactccctgagagccgaggacacagccctgtactactgcgccaaggacatccagtacggcaactactactacggcatggacgtgtggggccagggcacaacagtgacagtctcttctacgcgtggaggcggatctaaagttgctgctcttaaagaaaaggtcgcggctctgaaagaaaaagtggcggcgctcaaggagaaagttgcagctctcaaagaa

SEQ ID NO: 1697 - DNA, 882 bp, Artificial Sequence
  Synthetic Polynucloetide
atggccttaccagtgaccgccttgctcctgccgctggccttgctgctccacgccgccaggccggacatccagatgacacagagccctagcagcctgtctgccagcgtgggagatagagtgaccatcaactgcaaggccagccaggacatcaacagctacctgagctggttccagcagaagcctggcaaggcccctaagacactgatctaccgggccaacagactggtggatggcgtgccaagcagattttctggcagcggcagcggccaggattacaccctgacaatatccagcctccagcctgaggacttcgccacctactactgcctccagtacgacgagttccctctgacctttggcggaggcaccaaggtggaaatcaaaggcggaggcggaagtggaggcggaggatctggcggcggaggctctcaggtgcaactggtgcagtctggggccgaagtgaagaaacctggggcctctgtgaaggtgtcctgcaaagccagcggctacacctttaccaactacgacatcaactgggtccgacaggctccaggccaaggactggaatggatcggctggatctatcctggcgacggcagcaccaagtacaacgagaagttcaaggccaaggccacactgaccgccgataccagcacaagcaccgcctacatggaactgcggagcctgagaagcgacgacaccgccgtgtactattgtgcctccggctacgaggacgctatggactattggggccagggcaccaccgtgacagtgtctagtacgcgtggaggcggatctaaagttgctgctcttaaagaaaaggtcgcggctctgaaagaaaaagtggcggcgctcaaggagaaagttgcagctctcaaagaa

SEQ ID NO: 1698 - DNA, 888 bp, Artificial Sequence
  Synthetic Polynucloetide
atggccttaccagtgaccgccttgctcctgccgctggccttgctgctccacgccgccaggccggacatcgtgatgacccagacacctctgagcctgagcgtgacacctggacagcctgccagcattagctgcaagagcagccagtctctgctggacggcgacggcaagacctacctgaattggctgctccagaagcctggacagagccctcagcggctgatctacctggtgtccaagctggatagcggcgtgcccgatagattttctggcagcggctctggcaccgacttcaccctgaagatcagcagagtggaagccgaggacgtgggcgtgtactactgttggcagggcacacacttccccagaacattcggccagggcacaaagctggaaatcaaaggcggaggcggaagtggaggcggaggatctggcggcggaggctctcaagtgcaactggttcagagcggagccgaagtgaagaaacctggggcctctgtgaaggtgtcctgcaaggccagcggctacaccttcaaggacacctacatccactgggtccgacaggcccctggacaaggacttgagtggatgggcagaatcgaccccgccaacggcaacaccaaatacgaccccaagttccagggcagagtgaccatgaccagagacaccagcatcagcaccgcctacatggaactgagccggctgagatccgatgacaccgccgtgtactattgcgctagaagaggcggagtggattggggccagggaacactggttaccgtgtctagtacgcgtggaggcggatctaaagttgctgctcttaaagaaaaggtcgcggctctgaaagaaaaagtggcggcgctcaaggagaaagttgcagctctcaaagaa

SEQ ID NO: 1699 - DNA, 891 bp, Artificial Sequence
  Synthetic Polynucloetide
atggccttaccagtgaccgccttgctcctgccgctggccttgctgctccacgccgccaggccggacatccagatgacacagagccctagcagcctgtctgccagcgtgggagacagagtgaccatcacatgcaaggccagccaggatgtgtctacagccgtggcctggttccagcagaagcctggaaaagcccctaagctgctgatctacagccccagctacagatacaccggcgtgcccagcagattttctggcagcggctctggcaccgacttcaccctgacaatatccagcctccagcctgaggacttcacctactactgccagcagctctacagcaccccttacacattcggccagggcaccaaggtggaaatcaaaggcggaggcggaagtggaggcggaggatctggcggcggaggctctgaagtgcaactggttcagagcggagccgaagtgaagaaacctggggcctctgtgaaggtgtcctgcaaagccagcggctacacctttaccgactactacctggacgtggtcgtgcggcaagctcctggacaaggactggaatggatcggcagagtgaacccctacaacggcggcaccatctacaaccagaaattcaagggaagagtgaccctgaccagagacaccagcacctccacagcctacctggaactgagcagcctgagaagcgaagataccgccgtgtactactgcgccagggaccactacagatatgaccctctgctggactactggggccagggaaccctggttacagtgtctagtacgcgtggaggcggatctaaagttgctgctcttaaagaaaaggtcgcggctctgaaagaaaaagtggcggcgctcaaggagaaagttgcagctctcaaagaa

SEQ ID NO: 1700 - DNA, 909 bp, Artificial Sequence
  Synthetic Polynucloetide
atggccttaccagtgaccgccttgctcctgccgctggccttgctgctccacgccgccaggccggacatccagatgacacagagccctagcagcctgtctgccagcgtgggagacagagtgaccatcacctgtagagccagccagagcgtgtccaccagcagctacaactacatgcactggtatcagcagaagcccggcaagcctcctaagctgctgattaagtacgccagcaacctggaaagcggcgtgcccagcagattttctggcagcggctctggcaccgacttcaccctgacaatatccagcctccagcctgaggacttcgccacctactactgtcagcactcctgggagatccctctgacattcggccagggcaccaaggtggaaatcaaaggcggaggcggaagtggaggcggaggatctggcggcggaggctctgaagtgcaactggttcagagcggagccgaagtgaagaaacctggggcctctgtgaaggtgtcctgcaaggccagcggctacagcttcaccgactattatatgcactgggtccgacaggctccaggccagggacttgagtggatcggcagaatcaacccctacaacggcgctgccttctacagccagaacttcaaggatagagtgaccctgaccgtggacaccagcaccagcacagcctacctggaactgagcagcctgagaagcgaggacaccgccgtgtactactgcgccattgagagaggcgctgacctggaaggctacgctatggattattggggccagggaaccctggtcaccgtgtcatctacgcgtggaggcggatctaaagttgctgctcttaaagaaaaggtcgcggctctgaaagaaaaagtggcggcgctcaaggagaaagttgcagctctcaaagaa

SEQ ID NO: 1701 - DNA, 903 bp, Artificial Sequence
  Synthetic Polynucloetide
atggccttaccagtgaccgccttgctcctgccgctggccttgctgctccacgccgccaggccggagatcgtgctgacacagtctccagccacactgagcgcttctccaggcgagagagtgaccctgacctgtagagccagcagcaacgtgatctccagctacgtgcactggtatcagcagaagcctggcagcagccccagactgtttctgtacagcaccagcaatctggcctccggcgtgccaagcagattttctggctctggcagcggcaccgacttcacctttaccatctctagcctggaagccgaggacgccgccacctactactgtcagcagtacagcggctaccctctgaccttcggccagggcacaagactggaaatcaaaggcggaggcggaagtggaggcggaggatctggcggcggaggctctcaagttcagctgcaagagtctggccctggcctggtcaagcctagcgaaacactgagcctgacctgcgccgtgtctggctactctatcaccagcgcctactattggaactggatcagacagcctcctggcaaaggactggaatggatcggctacatcagctacgacggcagaaacaactacaaccccagcctgaagaaccggatcaccatcaatcccgacaccagcaagaaccagttcagcctccagctgaacagcgtgacccctgaggataccgccgtgtactactgtgccagagaaggcgactacgacgtgggcaactactacgctatggactactggggccagggaaccctggtcacagtctcttctacgcgtggaggcggatctaaagttgctgctcttaaagaaaaggtcgcggctctgaaagaaaaagtggcggcgctcaaggagaaagttgcagctctcaaagaa

SEQ ID NO: 1702 - DNA, 903 bp, Artificial Sequence
  Synthetic Polynucloetide
atggccttaccagtgaccgccttgctcctgccgctggccttgctgctccacgccgccaggccggagatcgtgctgacacagtctcccgccacactgtcactgtctccaggcgaaagagccacactgagctgtagagccagcagcaacgtgatctccagctacgtgcactggtatcagcagaagcctggacaggcccctcggctgctgatctacagcacaagcaatctggcctctggcatccccgccagattttctggctctggaagcggcaccgacttcaccctgaccataagcagcctggaacctgaggacttcgccgtgtactactgccagcagtatagcggctaccctctgaccttcggccagggcacaagactggaaatcaaaggcggaggcggaagtggaggcggaggatctggcggcggaggctctgaagtgcaactggtggaaagtggcggcggactggtgcaacctggaagaagcctgagactgtcctgtgccgccagcggctactctatcacaagcgcctactactggaactgggtccgacaggctcctggcaaaggactggaatgggtgtcctacatcagctacgacggcagaaacaactacaaccccagcctgaagaaccgcttcaccatcagccgggacaacgccaagaagtccctgtacctccagatgaacagcctgagagccgaggacacagccctgtactattgcgccaaagagggcgactacgacgtcggcaactactacgctatggactactggggccagggaaccaccgtgactgtctcttctacgcgtggaggcggatctaaagttgctgctcttaaagaaaaggtcgcggctctgaaagaaaaagtggcggcgctcaaggagaaagttgcagctctcaaagaa

SEQ ID NO: 1703 - DNA, 930 bp, Artificial Sequence
  Synthetic Polynucloetide
atggccttaccagtgaccgccttgctcctgccgctggccttgctgctccacgccgccaggccggacgtggtcatgacacagaccccactgagcctgcctgtgtctctgggagatcaggccagcatctcctgtagaagcagccagagcctggtgcacagcaacggcaacacctacctgcggtggtatctccagaagcctggacagagccccaaggtgctgatctacaaggtgtccaacagagtgtccggcgtgcccgatagattttctggcagcggctctggcaccgacttcaccctgaagatcaatagagtggaagccgaggacctgggcgtgtacttctgtagccagagcacccatgtgccttggacctttggcggaggcaccaagctggaaatcaagagcagcgccgacgacgccaagaaggacgccgccaaaaaggatgatgccaagaaagacgatgctaaaaaagacggcggcgtgaagctggacgagacaggcggaggacttgttcaacctggcggagccatgaagctgagctgtgtgaccagcggctttaccttcggccactactggatgaactgggtccgacagtcccctgagaaaggactggaatgggtcgcccagttcagaaacaagccctacaactacgaaacctactacagcgacagcgtgaagggcagattcaccatcagccgggacgacagcaagtccagcgtgtacctccagatgaacaacctgcgcgtggaagataccggcatctactactgtaccggggccagctacggcatggaatatctcggccagggcaccagcgtgaccgtgtctacaacgcgtggaggcggatctaaagttgctgctcttaaagaaaaggtcgcggctctgaaagaaaaagtggcggcgctcaaggagaaagttgcagctctcaaagaa

SEQ ID NO: 1704 - DNA, 918 bp, Artificial Sequence
  Synthetic Polynucloetide
atggccttaccagtgaccgccttgctcctgccgctggccttgctgctccacgccgccaggccgcaggtgcaactggtggaatctggcggcaatctggttcagcctggcggctctctgagactgtcttgtgccgccagcggcttcaccttcggcagcttttctatgagctgggtccgacaagctcctggcggaggacttgaatgggtggcaggactgtctgccagaagcagcctgacacactacgccgactctgtgaagggcagattcaccatcagccgggacaacgccaagaacagcgtgtacctccagatgaacagcctgagagtggaagataccgccgtgtactactgcgccagaagaagctacgacagcagcggctactggggccacttctacagctacatggatgtgtggggccagggcaccctggttacagtttctggcggaggcggaagtggaggcggaggatctggcggcggaggctcttctgtgctgacccagcctagctccgtgtctgctgctcctggacagaaagtgaccatctcctgtagcggcagcaccagcaacatcggcaacaactacgtgtcctggtatcagcagcaccccggcaaggcccctaagctgatgatctacgacgtgtccaagaggcccagcggcgtgccagatagattttccggcagcaagagcggcaacagcgccagcctggatattagcggactccagtctgaggacgaggccgactactattgcgccgcctgggatgatagcctgagcgagtttctgtttggcaccggcaccaagctgacagtgcttggaacgcgtggaggcggatctaaagttgctgctcttaaagaaaaggtcgcggctctgaaagaaaaagtggcggcgctcaaggagaaagttgcagctctcaaagaa

SEQ ID NO: 1705 - DNA, 891 bp, Artificial Sequence
  Synthetic Polynucloetide
atggccttaccagtgaccgccttgctcctgccgctggccttgctgctccacgccgccaggccgcagtctgtggtcacacagcctccatctgtgtctggcgctccaggccagagagtgaccatctcttgtaccggcagcagcagcaatatcggagccggctatgacgtgcactggtatcagcagctccctggcacagcccctaaactgctgatctacggcaacagcaacagacccagcggcgtgcccgatagattttccggctctaagagcggcacaagcgccagcctggctattactggactccaggccgaggacgaggccgactactactgtcagagctacgacagcagcctgagcggcagctatgtgtttggcaccggcaccaagctgacagtgcttggaggcggaggcggaagtggaggcggaggatctggcggcggaggctctgaagttcaactggtggaaaccggcggcaacctggttcaacctggcgcttctctgagactgagctgtgccgccagcggctttagctttagcggaacagccatgcactgggtccgacaggcacctggcaaaggactggaatgggtgtccaccatcagcagcacaggcagaagcacctactaccgggacagcgtgaagggcagattcaccatctccagagacaacagcaagaacaccctgtacctccagatgaacagcctgagaggcgaggacaccgccgtgtactattgtgccagagtgtccttcgactactggggccagggaaccctggtcacagtctcttctacgcgtggaggcggatctaaagttgctgctcttaaagaaaaggtcgcggctctgaaagaaaaagtggcggcgctcaaggagaaagttgcagctctcaaagaa

SEQ ID NO: 1706 - DNA, 897 bp, Artificial Sequence
  Synthetic Polynucloetide
atggccttaccagtgaccgccttgctcctgccgctggccttgctgctccacgccgccaggccgcagtctgtggttacacagcctgcctccgtgtctggctctcctggccagagcatcaccatcagctgtaccggcaccagctctgatgtcggcggctacaattacgtgtcctggtatcagcagcaccccggcaaggcccctaagctgatgatctacgacgtgtccaagaggcccagcggcgtgtccaatagattcagcggcagcaagagcggcaacaccgccagcctgacaatttctggactgcaagccgaggacgaggccgactactactgtagcagctacaccagcagcagcacactggtgtttggcggaggcaccaagctgacagttcttggaggcggaggcggaagtggaggcggaggatctggcggcggaggctctgaagttcagctggttgaaagcggcggagcctttgttcagcctggcggatctctgagactgagctgtgccgccagcggcttcacattttccagctacgccatgacctgggtccgacaggctcctggcaaaggactggaatgggtgtccaccatctccggcagaggcagaagcaccttctacgccgatagcgtgaagggcagattcacaatcagccgggacaacagcaagaacaccctgtacctccagatgaacagcctgagagccgaggataccgccgtgtactactgtgcccggtactatcacgctggcgcctttgatctttggggccagggaacactggtcaccgtgtcatctacgcgtggaggcggatctaaagttgctgctcttaaagaaaaggtcgcggctctgaaagaaaaagtggcggcgctcaaggagaaagttgcagctctcaaagaa

SEQ ID NO: 1707 - DNA, 903 bp, Artificial Sequence
  Synthetic Polynucloetide
atggccttaccagtgaccgccttgctcctgccgctggccttgctgctccacgccgccaggccggacgtggtcatgacacagagcccttctagcctgtctgccagcgtgggcgacagagtgacaatcacctgtcagagcagcctggacatcagccactacctgaactggtatcagcagaagcccggcaaggcccctaagctgctgatctacgacgccagcaatctggaaaccggcgtgcccagcagattttctggcagcggaagcggcacccacttcaccttcacaatatccagcctccagcctgaggacttcgccacctactactgccagcagtacgacaacctgcctctgacctttggcggaggcaccaagctggaaatcaagagaggcggaggcggaagtggaggcggaggatctggcggcggaggctctcaagttcaactggttcaatcaggcggaggcgtggtgcaacctggtggctctctgagagtgtcttgtgctgcctctggcgtgaccctgagcgactatggaatgcactgggtccgacaggcccctggcaaaggacttgagtgggtcgccttcatcagaaacgacggcagcgacaagtattacgccgacagcgtgaagggcagattcaccatcagccgggacaacagcgagaaaaccgtgtctctccagatgtctagcctgagagccgaggacaccgccgtgtactactgtgccaagaatggcgagagcggccctctggactactggtatctggatctgtggggcagaggcaccctggtcacagtctcttctacgcgtggaggcggatctaaagttgctgctcttaaagaaaaggtcgcggctctgaaagaaaaagtggcggcgctcaaggagaaagttgcagctctcaaagaa

SEQ ID NO: 1708 - DNA, 924 bp, Artificial Sequence
  Synthetic Polynucloetide
atggccttaccagtgaccgccttgctcctgccgctggccttgctgctccacgccgccaggccggacgtgatgctgacccagacaccactgagcctgcctgtgtctctgggcgatcaggccagcatctcctgtagaagcagccagagcatcctgcacagcaccggcgatacctacctggaatggtatctccagaagcctggacagagccccaagctgctgattaacaaggtgtccaaccggctgagcggcgtgcccgatagattttctggcagcggctctggcaccgacttcaccctgaagatcagcagagtggaagccgaggacctgggcgtgtactactgcttccaaggcagccatgttccttggacctttggcggaggcaccaagctggaaatcaagagagctgacgccgctcctaccgtgtccatctttcctggaggcggtggaagtggcggcggtggttcaggcggcggaggatctcaagtgaagctccagcagagcggccctagccttgtgaaacctggcgcttccgtgaagatgagctgcaaggccagcggctacaccttcaccgatttctacatgaaatgggtcaagcagagccacggcaagtctctggaatggatcggcgacatcaaccccaacatcggagacaccttctacaaccagaagttcaagggcaaagccacactgaccgtggacaagagcagcagcaccgcctacatgcagctcaacagcctgaccagcgaggacagcgccgtgtacttttgttccgtgggctacttcgacgtgtggggagccggaacaaccgtgacagtctcttctacgcgtggaggcggatctaaagttgctgctcttaaagaaaaggtcgcggctctgaaagaaaaagtggcggcgctcaaggagaaagttgcagctctcaaagaa

SEQ ID NO: 1709 - DNA, 924 bp, Artificial Sequence
  Synthetic Polynucloetide
atggccttaccagtgaccgccttgctcctgccgctggccttgctgctccacgccgccaggccgctgcctgttctgacacagcctccatccgtgtctgtggcccctggaaagaccgccagaatcacatgcggcggcaacaacatcggcagcaagagcgtgcactggtatcagcagaagcctggacaggctcctgtgctggtggtgtacgacgacagcgatagacctagcggcatccccgagagattcagcggcagcaattccggcaataccgccacactgaccatcagcagagtggaagctggcgacgaggccgactactactgccaagtgtgggacagcagcagcgactacgtggtgtttggcggcggaacaaagctgacagtgcttggcggaggcggaagtggaggcggaggatctggcggcggaggctctgaagttcaactggtgcagagcggagccgaagtgaagaagccaggcgagagcctgaagattagctgcaaaggcagcggctacagcttcaccagctactggatcggctgggtccgacagatgcctggcaaaggactggaatggatgggcatcatctaccccggcgacagcgacaccagatacagccctagctttcagggccaagtgaccatctccgccgacaagagcatcagcacagcctacctccagtggtcctctctgaaggccagcgataccgccatgtactactgcgccagacaagtctggggatggcaaggcggcatgtaccccaggtctaactggtggtacaacctggactcttggggccagggcacactggtcacagtctcttctacgcgtggaggcggatctaaagttgctgctcttaaagaaaaggtcgcggctctgaaagaaaaagtggcggcgctcaaggagaaagttgcagctctcaaagaa

SEQ ID NO: 1710 - DNA, 903 bp, Artificial Sequence
  Synthetic Polynucloetide
atggccttaccagtgaccgccttgctcctgccgctggccttgctgctccacgccgccaggccggagctggtcatgacacagagccctgcttctctggccgtgtcactgggacagagagccaccatctcttgcagagccagcgagagcgtggacagctacggcaagagcttcatgcactggtatcagctcaagcccggccagcctcctaagctgctgatctacagagcctccaacctggaaagcggcgtgccagccagattttctggcagcggcagcagaaccgacttcaccctgaccattgatcccgtggaagccgatgatgccgccacctactactgccagcagaacaacgaggacccctggacatttggcggaggcaccaagctggaaatcaaaggcggaggcggaagtggaggcggaggatctggcggcggaggctctgaagtgcagctcgaacagtctggccccgagcttgtgaaacctggcgcttccgtgaagatgagctgcaaggccagcggctacaccttcaccaactactacatgaaatgggtcaagcagagccacggcaagtccctggaatggatcggcgatctgaaccccaacaacggcgacaccttctacaaccagaagttcaagggcaaagccacactgaccgtggacaagagcagcaacaccgcctacatgcagctcaactccctgaccagcgaggacagcgccgtgtactactgtgccagaaccggcagatacgaagagaacgctatggactactggggccagggcacaagcgtgacagtctcttctacgcgtggaggcggatctaaagttgctgctcttaaagaaaaggtcgcggctctgaaagaaaaagtggcggcgctcaaggagaaagttgcagctctcaaagaa

SEQ ID NO: 1711 - DNA, 897 bp, Artificial Sequence; identical to SEQ ID NO: 1684
  Synthetic Polynucloetide

SEQ ID NO: 1712 - DNA, 897 bp, Artificial Sequence; identical to SEQ ID NO: 1593
  Synthetic Polynucloetide

SEQ ID NO: 1713 - DNA, 885 bp, Artificial Sequence
  Synthetic Polynucloetide
atggccttaccagtgaccgccttgctcctgccgctggccttgctgctccacgccgccaggccggacgtggtcatgacacagagcccttctagcctgtctgccagcgtgggcgacagagtgaccatcacctgtatggcctccgaggacatctacatccggctggcctggtatcagcagaagcctggaaacgcccctaagctgctgatctacgccgccacctctctggaaacaggcgtgccaagcagattttccggcagcggctctggcaccgatttcaccctgacaatatccagcctccagcctgaggacttcgccacctactactgccagcagtattggagcagcccctggacatttggcggaggcaccaaggtggaaatcaaaggcggaggcggaagtggaggcggaggatctggcggcggaggctctcaggttcagctgcaagagtctggccccggactggtcaagcctagccaaacactgagcctgacctgtaccgtgtccggctacagcatcaccagcgactacacctggaactggatcagacagcctcctggcaacggactggaatggatcggctacatcacctacagcggcagcaccagctacaaccccagcctgaaaagccgggtgctgatctccgtggacaccagcaagaatcaggtgtccctgaagctgagcagcgtgacagccgctgataccgccgtgtactactgtgccagactggggagaagatacacaatggactactggggccagggcaccaccgtgacagtttcttctacgcgtggaggcggatctaaagttgctgctcttaaagaaaaggtcgcggctctgaaagaaaaagtggcggcgctcaaggagaaagttgcagctctcaaagaa

SEQ ID NO: 1714 - DNA, 900 bp, Artificial Sequence
  Synthetic Polynucloetide
atggccttaccagtgaccgccttgctcctgccgctggccttgctgctccacgccgccaggccggaggtgcaactggttgagtctggcggaggactggtgcagcctggaagaagcctgagactgtcttgtgccgccagcggcttcaccttcgacgattatgccatgcactgggtccgacaggcccctggcaaaggacttgaatgggtgtccggcatctcctggaacagcggctctatcggctacgccgattccgtgaagggcagattcaccatcagccgggacaacgccaagaacagcctgtacctccagatgaactccctgagagccgaggacacagccctgtactactgcgccaaagacaaaggcggaggctactacgacttttggagcggcagcgattattggggccagggcacactggtcacagtgtctagcggcggaggcggaagtggaggcggaggatctggcggcggaggctcttcttctgagctgacacaggaccctgccgtgtctgttgctctgggccagacagtgcggattacctgtcagggcgatagcctgagaagctactacgcctcctggtatcagcagaagccaggccaggctcctgtgctggtcatctacggcaagaacaacagacccagcggcatccccgatagattcagcggaagcagctctggcaataccgccagcctgacaattactggcgctcaggccgaggacgaggccgactactactgcaacagcagagatagcagcggctgggttttcggcggaggcacaaaactgacagtgctgacgcgtggaggcggatctaaagttgctgctcttaaagaaaaggtcgcggctctgaaagaaaaagtggcggcgctcaaggagaaagttgcagctctcaaagaa

SEQ ID NO: 1715 - DNA, 927 bp, Artificial Sequence
  Synthetic Polynucloetide
atggccttaccagtgaccgccttgctcctgccgctggccttgctgctccacgccgccaggccggaagtgcagctccagcagtctggacctggcctggttaagcctagccagacactgagcctgacctgtgccatcagcggcgatagcgtgctgagcaacagcgacacctggaactggatcagacagagccctagcagaggactggaatggctgggcagaacctaccacagaagcacttggtacgacgactacgccagctctgtgcggggcagagtgtccatcaatgtggacaccagcaagaaccagtacagcctgcaactgaacgccgtgacacctgaggataccggcgtgtactactgcgccagagacagactccaggacggcaactcttggagcgacgcctttgatgtgtggggccagggcacaatggtcaccgtttctagcggcggaggcggaagtggaggcggaggatctggcggcggaggctctcaatctgctctgacacagcctgccagcgtgtcaggatctcctggacagagcatcaccatctcttgcaccggcaccagctctgatgtcggcggctacaattacgtgtcctggtatcagcagcaccccggcaaggcccctaagctgatgatctacgacgtgtccaacagacccagcggcgtgtccaatagattctccggcagcaagagcggcaacaccgccagcctgacaatttctggactgcaagccgaggacgaggccgactactactgtagcagctacaccagcagcagcacactggtgtacgtgttcggcacaggcaccaaagtgaccgtgcttacgcgtggaggcggatctaaagttgctgctcttaaagaaaaggtcgcggctctgaaagaaaaagtggcggcgctcaaggagaaagttgcagctctcaaagaa

SEQ ID NO: 1716 - DNA, 921 bp, Artificial Sequence
  Synthetic Polynucloetide
atggccttaccagtgaccgccttgctcctgccgctggccttgctgctccacgccgccaggccgcaggtgcaactggttcagtctggggccgaagtgaagaaacctggggcctctgtgaaggtgtcctgcaaggcttccggctacacctttaccagctacgacatcaactgggtccgacaggccacaggccaaggactggaatggatgggctggatgaaccccaacagcggcaataccggctacgcccagaaattccagggcagagtgaccatgaccagaaacaccagcatcagcaccgcctacatggaactgagcagcctgagaagcgaggacaccgccgtgtactattgcgccagaggcgacagcaactactggtcctactacggcatggacgtgtggggccagggaacactggttacagtttctagcggcggaggcggaagtggaggcggaggatctggcggcggaggctctggcggtggtggatctcaatctgtgctgacccagcctagatccgtgtctggctctcctggacagagcgtgaccatctcttgtaccggcaccagctctgatgtcggcggctacaattacgtgtcctggtatcagcagcaccccggcgaagcccctaagctgattatctacgacgccgacaagcggcccagcggcatcagcaatagattcagctctggcaagagcggcaacaccgccagcctgacaatcagcggactccaggtggaagatgaggccgactactactgctgctcctatgccggcggaagcacctgggttttcggaggcggtacaaaagtgaccgtgctgacgcgtggaggcggatctaaagttgctgctcttaaagaaaaggtcgcggctctgaaagaaaaagtggcggcgctcaaggagaaagttgcagctctcaaagaa

SEQ ID NO: 1717 - DNA, 927 bp, Artificial Sequence
  Synthetic Polynucloetide
atggccttaccagtgaccgccttgctcctgccgctggccttgctgctccacgccgccaggccggaagtgcagctccagcagtctggacctggcctggttaagcctagccagacactgagcctgacctgtgccatcagcggcgatagcgtgtcctctaatagcgccgcctggaactggatcagacagagccctagcagaggactggaatggctgggcagaacctactaccgcagcaagtggtacagcgactacgccgtgtccgtgaagtcccggatcaccatcaatcccgacaccagcaagaaccagttcagcctgcaactgaacagcgtgacccctgaggataccgccgtgtactactgcgccagagatccctacgacttttggagcggctaccccgacgcctttgacatctggggacagggcacaatggtcaccgtttctagcggcggaggcggaagtggaggcggaggatctggcggcggaggctctcaatctgctctgacacagcctgccagcgtgtcaggatctcctggacagagcatcaccatctcttgcaccggcaccagctctgatgtcggcggctacaattacgtgtcctggtatcagcagcaccccggcaaggcccctaaagtgattatcagcgaagtgaacaacagacccagcggcgtgtcccacagattcagcggctctaagtctggcaacaccgccagcctgacaatctctggactgcaagccgaggacgaggccgactacttctgtagcagctacaccagcggcagaaccctgtacgtgttcggcacaggcagcaaagtgacagtgctgggaacgcgtggaggcggatctaaagttgctgctcttaaagaaaaggtcgcggctctgaaagaaaaagtggcggcgctcaaggagaaagttgcagctctcaaagaa

SEQ ID NO: 1718 - DNA, 924 bp, Artificial Sequence
  Synthetic Polynucloetide
atggccttaccagtgaccgccttgctcctgccgctggccttgctgctccacgccgccaggccggaagtgcagctccagcagtctggacctggcctggttaagcctagccagacactgagcctgacctgtgccatcagcggcgattccatgctgagcaacagcgacacctggaactggatcagacagagccccagcagaggcctggaatggctgggcagaacataccacagaagcacttggtacgacgactacgccagctctgtgcggggcagagtgtccatcaatgtggacaccagcaagaaccagtacagcctgcaactgaacgccgtgacacctgaggataccggcgtgtactactgtgccagagtgcggctccaggacggcaattcttggagcgacgcctttgatgtgtggggccagggcacaatggtcaccgtttctagcggcggaggcggaagtggaggcggaggatctggcggcggaggctctcaatctgctctgacacagcctgccagcgcctctggatctcctggacagagcgtgaccatctcctgtaccggcacctcttctgatgtcggcggctacaactacgtgtcctggtatcagcagcaccccggcaaggcccctaagctgatgatctacgacgtgtccaacagacccagcggcgtgtccaatagattctccggcagcaagagcggcaacaccgccagcctgacaatttctggactgcaagccgaggacgaggccgactactactgtagcagctacaccagcagcagcacactgtacgtgttcggcacaggcacccagctcacagttcttacgcgtggaggcggatctaaagttgctgctcttaaagaaaaggtcgcggctctgaaagaaaaagtggcggcgctcaaggagaaagttgcagctctcaaagaa

SEQ ID NO: 1719 - DNA, 897 bp, Artificial Sequence
  Synthetic Polynucloetide
atggccttaccagtgaccgccttgctcctgccgctggccttgctgctccacgccgccaggccggagatcgtgctgacacagtctcccgccacactgtcactgtctccaggcgaaagagccacactgagctgtagcgccagcagcagcgtgtcctacatgtactggtatcagcagaagcccggacaggcccctagactgctgatctacagaaccagcaacctggcctctggcatccccgccagattttctggctctggcagcggcaccgatttcaccctgaccataagcagcctggaacctgaggacttcgccgtgtactactgccagcagtaccacagctaccccaccacctttggacagggcaccaaggtggaaatcaagcggacagttggcggaggcggaagtggaggcggaggatctggcggcggaggctctgaagtgcagctggttgaatcaggtggcggcctggttcaacctggcggatctctgagactgtcttgtgccgccagcggcttcagcttcaacacctacgccatgaactgggtccgacaggctcctggcaaaggactggaatgggtgtcccacatcagaagcaagagcaacaacttcgccacctactacgccgacagcgtgaaggacagattcaccatcagccgggacaacgccaagaacagcctgtacctccagatgaactccctgagagccgaggacaccgccgtgtattattgcgccagacaaggcggcgacttccctatggattattggggccagggcaccctggtcaccgtttcttctacgcgtggaggcggatctaaagttgctgctcttaaagaaaaggtcgcggctctgaaagaaaaagtggcggcgctcaaggagaaagttgcagctctcaaagaa

SEQ ID NO: 1720 - DNA, 885 bp, Artificial Sequence
  Synthetic Polynucloetide
atggccttaccagtgaccgccttgctcctgccgctggccttgctgctccacgccgccaggccggacgtggtcatgacacagagcccttctagcctgtctgccagcgtgggcgacagagtgaccatcacctgtaaagccagcgaggacatctacatccggctggcctggtatcagcagaagcctggaaaggcccctaagctgctgatctacgccgccacctctctggaaacaggcgtgccaagcagattttccggcagcggctctggcaccgatttcaccctgacaatatccagcctccagcctgaggacttcgccacctactactgccagcagtattggaccacaccttggacctttggcggaggcaccaaggtggaaatcaaaggcggaggcggaagtggaggcggaggatctggcggcggaggctctcaggtgcagctccaagagtctggccctggactggtcaagcctagccagacactgagcctgacctgtaccgtgtccggctacagcatcaccatcgactacacctggaactggatcagacagcctcctggcaaaggactggaatggatcggctacatcacctacagcggcagcaccgactacaaccccagcctgaaaagccgggtgctgatctccgtggacaccagcaagaatcaggtgtccctgaagctgagcagcgtgacagccgctgataccgccgtgtactactgtgccagactgggcagaagatacgccctggattattggggccagggcaccaccgtgacagtgtcatctacgcgtggaggcggatctaaagttgctgctcttaaagaaaaggtcgcggctctgaaagaaaaagtggcggcgctcaaggagaaagttgcagctctcaaagaa

SEQ ID NO: 1721 - DNA, 900 bp, Artificial Sequence
  Synthetic Polynucloetide
atggccttaccagtgaccgccttgctcctgccgctggccttgctgctccacgccgccaggccggacatccagctgactcagagccctagctttctgagcgccagcgtgggcgacagagtgaccattacatgtagagccagccagggcatcagcaccgacctgaactggtatcagcagaagcctggcaaggcccctaagctgctgatctacgccgccagcaatctggaaagcggcgtgccaagcagattttccggctctggcagcggcaccgagttcaccctgacaatatctagcctccagcctgaggacttcgccacctactactgccagcagagctacaactggccctacacctttggcggaggcaccaaggtggaaatcaagagaggcggaggcggaagtggaggcggaggatctggcggcggaggctctgaagttcagctggttgaatcaggcggaggactcgtgaaacctggcggctctctgagactgtcttgtgccgccagcggcttcaccttcagcaacttcgagatgaactgggtccgacaggccccaggcaaaggactggaatgggtgtccggcatcagctccaatggccggtacatcaactacgccgacagcgtgaagggcagattcaccatcagccgggacaacgccaagaacagcctgtacctccagatgaactccctgagagccgaggacaccgccgtgtactattgtgccagagtggtggacttcgaccaggactacaacggcttcgactattggggccagggcaccctggttaccgttagctctacgcgtggaggcggatctaaagttgctgctcttaaagaaaaggtcgcggctctgaaagaaaaagtggcggcgctcaaggagaaagttgcagctctcaaagaa

SEQ ID NO: 1722 - DNA, 894 bp, Artificial Sequence
  Synthetic Polynucloetide
atggccttaccagtgaccgccttgctcctgccgctggccttgctgctccacgccgccaggccggacatccaactgactcagagccccagctttctgagcgcctctgtgggcgacagagtgaccatcacatgtagtctcagcctgggcatcagcacatggcgggattggtttccgccgaggcttggcaggggccttgagccgctgacctacgccgccagcacactgcaaagcggagtgcctagcagattttccggcagcggctctggcaccgagttcaccctgacaatatccagcctccagcctgaggacttcgccacctactactgccagcagctcaacagctaccctctgacctttggcggaggcaccaaggtggaaatcaagagaggcggaggcggaagtggaggcggaggatctggcggcggaggctctgaagttcaactggttgagtctggtggcggcctggttaagcctggcggatctctgagactgagctgtgccgccagcggcttcacctttagcacatacggcatgagctgggtccgacaggcccctggaaaaggacttgagtgggtcgcctacatcaacaacggctccggctacatctactacgccgacagcgtgaagggcagattcaccatcagccgggacaacgccaagaacagcctgtacctccagatgaactccctgagagccgaggacaccgccgtgtactattgtgccagaggacagtggtggagcggcggagactttgattattggggccagggcaccctggtcaccgtttcttctacgcgtggaggcggatctaaagttgctgctcttaaagaaaaggtcgcggctctgaaagaaaaagtggcggcgctcaaggagaaagttgcagctctcaaagaa

SEQ ID NO: 1723 - DNA, 900 bp, Artificial Sequence
  Synthetic Polynucloetide
atggccttaccagtgaccgccttgctcctgccgctggccttgctgctccacgccgccaggccggacatccagatgacccagaccacaagcagcctgtctgccagcctgggcgacagagtgaccatctcttgtagagccagccaggacatcagcaactacctgaactggtatcagcagaaacccgacggcaccgtgaagctgctgatctactacaccagcatcctgcacagcggcgtgcccagcagattttctggctctggcagcggcaccgactacagcctgaccatcagcaatctggaacaagaggacttcgctacctacttctgccagcaaggcaacaccctgccttggacatttggcggaggcaccaagctggaaatcaaagctggcggaggcggaagtggaggcggaggatctggcggcggaggctctgaagtgcaactggttgaatctggcggcggactggttaagcctggcggatctctgaagctgagctgtgccgcctctggcttcgccttcagcatctacgatatgagctgggtccgacagacccctgagaagagactggaatgggtcgcctacatctctagcggcggagggacctactatcccgacacagtgaagggcagattcaccatctccagagacaacgccaagaacaccctgtacctccagatgagcagcctgaagtccgaggacaccgccatgtactactgcgccagacacagcggctatggcacacattggggagtgctgtttgcctactggggccagggaacactggtcacagtttctgctacgcgtggaggcggatctaaagttgctgctcttaaagaaaaggtcgcggctctgaaagaaaaagtggcggcgctcaaggagaaagttgcagctctcaaagaa

SEQ ID NO: 1724 - DNA, 930 bp, Artificial Sequence
  Synthetic Polynucloetide
atggccttaccagtgaccgccttgctcctgccgctggccttgctgctccacgccgccaggccggacatcgtgatgacacagagccctgatagcctggccgtgtctctgggagagagagccaccatcaactgcaagagcagccagagcctgctgtacagaagcaaccagaagaactacctggcctggtatcagcagaagcccggccagcctcctaagctgctgatctactgggccagcaccagagaaagcggcgtgcccgatagattttctggctctggcagcggcaccgacttcaccctgacaatttctagcctgcaagccgaggacgtggccgtgtactactgccagcagtattacaactaccccagaaccttcggccagggcaccaaggtggaaatcaagagaacagttggcggaggcggaagtggaggcggaggatctggcggcggaggctctgaagttcagctgcttgaatcaggcggcggactggttcaacctggcggatctctgagactgagctgtgccgccagcggctacagcatcacaagcgactatgcctggaactgggtccgacaggcccctggcaaaggactggaatgggtgtcctacatcagcaacagcggcagcaccagctacaaccccagcctgaagtcccggttcaccatcagcagagacaacagcaagaacaccctgtacctccagatgaacagcctgagagctgaggacaccgccgtgtattattgcgccaaagagcggaactacgactacgacgattactactacgctatggactactggggccagggaaccctggtcacagtctcttctacgcgtggaggcggatctaaagttgctgctcttaaagaaaaggtcgcggctctgaaagaaaaagtggcggcgctcaaggagaaagttgcagctctcaaagaa

SEQ ID NO: 1725 - DNA, 909 bp, Artificial Sequence
  Synthetic Polynucloetide
atggccttaccagtgaccgccttgctcctgccgctggccttgctgctccacgccgccaggccggacgtggtcatgacacagagccctctgagcctgcctgtgacacttggacagcctgccagcatcagctgtagaagcagccagagcctgctgcacagcagcggcaatacctacctggaatggtatcagcagaggcccggacagagccccagacctctgatctacaagatcagcacccggttcagcggcgtgcccgatagattttctggctctggcagcggcaccgacttcaccctgaagattagcagagtggaagccgaggacgtgggcgtgtactactgcttccaaggcagccacgtgccatacacctttggcggcggaacaaaggtggaaatcaagagaggcggaggcggaagtggaggcggaggatctggcggcggaggctctcaagttcagctggttcagagcggagccgaagtgaagaaacctggggcctctgtgaaggtgtcctgcaaagcctctggcctgaccatcgaggactactacatgcactgggtccgacaggcccctggacaaggacttgaatggatgggctggatcgaccccgagaacggcgatacagagtacggccctaagttccagggcagagtgaccatgaccagagacaccagcatcaacaccgcctacatggaactgagccggctgagatccgatgacaccgccgtgtactattgcgccgtgcacaatgcccactacggcacttggtttgcctattggggccagggcacactggtcaccgttagctctacgcgtggaggcggatctaaagttgctgctcttaaagaaaaggtcgcggctctgaaagaaaaagtggcggcgctcaaggagaaagttgcagctctcaaagaa

SEQ ID NO: 1726 - DNA, 885 bp, Artificial Sequence
  Synthetic Polynucloetide
atggccttaccagtgaccgccttgctcctgccgctggccttgctgctccacgccgccaggccggacatccagatgacacagagccctagcagcctgtctgccagcgtgggagacagagtgaccatcacctgtagagccagcgagaacatctacagcaacctggcctggtatcagcagaagcctggcaaggcccctaagctgctgatctacgccgccaccaatctggctgatggcgtgccaagcagattttccggctctggcagcggcaccgatttcaccctgacaatatccagcctccagcctgaggacttcgccacctactactgccagcacttttggggcacccctacattcggccagggcaccaaggtggaaatcaagagaacagttggcggaggcggaagtggaggcggaggatctggcggcggaggctctgaagtgcagctggttgaatcaggtggcggcctggttcaacctggcggatctctgagactgagctgtgccgcctctggcttcagcctgacaaattacggcgtgcactgggtccgacaggcccctggaaaaggactggaatgggtgtccgtgatttggagcggcggcagcaccgattacaacgccgccttcatcagccggttcaccatcagcgccgacaccagcaagaataccgcctacctccagatgaactccctgagagccgaggacaccgccgtgtactattgcgccagagaactgatccacgctatggacaactggggccagggaaccctggtcacagtctcttctacgcgtggaggcggatctaaagttgctgctcttaaagaaaaggtcgcggctctgaaagaaaaagtggcggcgctcaaggagaaagttgcagctctcaaagaa

SEQ ID NO: 1727 - DNA, 906 bp, Artificial Sequence
  Synthetic Polynucloetide
atggccttaccagtgaccgccttgctcctgccgctggccttgctgctccacgccgccaggccggacttcgtgatgacacagagccctctgagcctgcctgtgacacctggcgaacctgccagcatcagctgtagaagcagccagagcatcgtgcacagcaacggcaacacctacctggaatggtatctccagaagcctggacagagcccacagctgctgatctacaaggtgtccaacagattcagcggcgtgcccgacagattttctggcagcggctctggcaccgacttcaccctgaagattagcagagtggaagccgaggacgtgggcgtgtactactgcttccaaggctctcacgtgcccctgacctttggacagggcaccaagctggaaatcaagagaggcggaggcggaagtggaggcggaggatctggcggcggaggctctgaagtgcagctggttgaaagcggagccgaagtgaagaaacctggggcctctgtgaaggtgtcctgcaaggccagcggctacacctttaccagctactggattcactgggtccgacaggcccctggacaaggacttgagtggatgggcgagaacgacccctccaacggcaggaccaactacaacgagaagttcaagaaccgcgtgaccctgaccgtggacaccagcatctctaccgcctacatggaactgagccggctgagatccgatgacaccgccgtgtactattgcgccagaggacccaactacttttacagcatggactactggggccagggcacaatggtcaccgttagctctacgcgtggaggcggatctaaagttgctgctcttaaagaaaaggtcgcggctctgaaagaaaaagtggcggcgctcaaggagaaagttgcagctctcaaagaa

SEQ ID NO: 1728 - DNA, 885 bp, Artificial Sequence
  Synthetic Polynucloetide
atggccttaccagtgaccgccttgctcctgccgctggccttgctgctccacgccgccaggccggacatccagctgactcagagccctagctttctgagcgccagcgtgggcgacagagtgaccatcacatgtagcgccagatccagcatcagcttcatgtactggtatcagcagaagcccggcaaggcccctaagctgctgatctacgacaccagcaatctggcctctggcgtgcccagcagattttctggaagcggcagcggcaccgagttcaccctgacaatctctagcctggaagccgaggatgccgccacctactattgccagcagtggtccagctatcccctgacatttggacagggcaccaagctggaaatcaaaggcggaggcggaagtggaggcggaggatctggcggcggaggctctcaggttcagctggttcagtctggggccgaagtgaagaaacctggggcctctgtgaaggtgtcctgcaaggcttccggctacacctttaccggctcttggatgaactgggtccgacaggctcctggacagggactcgaatggatcggcagaatctatcctggcgacggcgagacaaactacaacggcaagttcaaggaccgcgtgacaatcaccgccgacaagagcacaagcaccgcctacatggaactgagcagcctgcggagcgaagataccgccgtgtactactgcgcccggatctacggcaacaacgtgtacttcgatgtgtggggccagggcacaaccgtgacagtctcttctacgcgtggaggcggatctaaagttgctgctcttaaagaaaaggtcgcggctctgaaagaaaaagtggcggcgctcaaggagaaagttgcagctctcaaagaa

SEQ ID NO: 1729 - DNA, 909 bp, Artificial Sequence
  Synthetic Polynucloetide
atggccttaccagtgaccgccttgctcctgccgctggccttgctgctccacgccgccaggccgcagctggtgctgacacagtctccaagcgcctctgccagcctgggatctagcgtgaagctgacctgtacactgagcagcggccacaagaccgacaccatcgactggtatcagcagcagcctggcaaggcccctagatacctgatgaagctggaaggcagcggcagctacaacaaaggctctggcgtgcccgatagattcagcggcagttcttctggcgctgattggtatctgaccatcagcagcctccagagcgaggacgaggccgattactactgcggcacagactaccccggcaactacctgtttggcggcggaacacagctgacagtgcttggcggcggaggcggaagtggaggcggaggatctggcggcggaggctctcaagaacagctggttgaaagcggcggaggactggttcaacctggcggttctctgagactgagctgtgccgccagcggcttcaccttcagcgactactacatgagctggatcagacaggccccaggcaaaggactggaatgggtcgccacaatctaccccagcagcggcaagacctactacgccgattctgccaagggcagactgaccatctccagcgacaacgccaaggacagcctgtacctccagatgaacagcctgagagccgaggacaccgccgtgtactactgcaccagagatagctacgccgacgacgccgctctgtttgacatttggggccagggcaccaccgtgaccgtttcttctacgcgtggaggcggatctaaagttgctgctcttaaagaaaaggtcgcggctctgaaagaaaaagtggcggcgctcaaggagaaagttgcagctctcaaagaa

SEQ ID NO: 1730 - DNA, 894 bp, Artificial Sequence
  Synthetic Polynucloetide
atggccttaccagtgaccgccttgctcctgccgctggccttgctgctccacgccgccaggccggacatcgtgctgacacagagccctccaagcctggctatgagcctgggaaagagagccaccatcagctgtagagccagcgagagcgtgacaatcctgggctctcacctgatccactggtatcagcagaagcccggccagcctcctacactgctgattcagctggcctccaatgtgcagacaggcgtgccagccagattttctggcagcggcagcagaaccgacttcaccctgaccattgatcccgtggaagaggacgacgtggccgtgtactactgcctccagagcagaacaatccccagaacctttggcggaggcaccaagctggaaatcaaaggcggcggaggaagcggaggcggaggatctggtggtggtggatctcaaatccagctggtgcagtctggccccgagctgaagaaacctggcgagacagtgaagatcagctgcaaggccagcggctacaccttcaccgactacagcatcaactgggtcaagagagcccctggcaagggcctgaaatggatgggctggatcaacaccgaaaccagagagcccgcctacgcctacgacttcagaggcagattcgccttcagcctggaaaccagcgccagcacagcctacctccagatcaacaacctgaagtacgaggacaccgccacctacttttgcgccctggactacagctacgctatggactattggggccagggcaccagcgtgacagtctcttctacgcgtggaggcggatctaaagttgctgctcttaaagaaaaggtcgcggctctgaaagaaaaagtggcggcgctcaaggagaaagttgcagctctcaaagaa

SEQ ID NO: 1731 - DNA, 906 bp, Artificial Sequence
  Synthetic Polynucloetide
atggccttaccagtgaccgccttgctcctgccgctggccttgctgctccacgccgccaggccgcaggtacagctgcaggaatctgggcccggacttgtcaagccaagtcagacactttctcttacatgtaccgtgagcggcggaagtataagcagtggaggcttttactggtcttggatacggcagcacccaggcaaaggcttggagtggattggatacattcatcattcaggatctacacactataatccatcccttaagtcccgggtcaccattagcattgatacgtctaagaatctgttcagtctcaggctgtcctccgtcactgctgccgacacagccgtgtactactgcgcctccttggtttactgcggaggcgactgttatagcggctttgattattgggggcaggggaccctcgtaaccgtgagctctggaggcggaggatcaggtggcggtggatctggcggtggcggatctgatatccagctcactcaaagcccctctagtctctctgcctcagtgggggatcgggtcagttttacttgtcaagcttcacaggatatcaacaacttccttaattggtatcagcagaagccaggaaaagcacccaagctgctcatctatgatgcctcaaatttggagacgggtgttcccagtcgattctctgggtcagggtccgggaccgactttacgtttacgatctcctctctgcagcccgaagacatcgccacatactattgtcaacagtacggcaacttgcctttcacatttgggggcgggactaaggttgaaatcaagaggacgcgtggaggcggatctaaagttgctgctcttaaagaaaaggtcgcggctctgaaagaaaaagtggcggcgctcaaggagaaagttgcagctctcaaagaa

SEQ ID NO: 1732 - DNA, 900 bp, Artificial Sequence
  Synthetic Polynucloetide
atggccttaccagtgaccgccttgctcctgccgctggccttgctgctccacgccgccaggccgcaggtccaactgcaagaaagcggacccggactggtgaagccttctgagacacttagtctgacgtgcacggtcagtggcggctccatctcctcctattattggtcatggatacgacaacccccaggtaagggcctggaatggattggctatatctactattcaggaagcacgaactacaatcccagcctgaagtcccgagtgacaatttcagtagataccagtaaaaaccagttcagtcttaaactgtcaagcgtgacagctgccgacaccgctgtgtattactgcgtctcactggtgtattgtggaggggattgttatagcgggttcgattattggggacagggaaccctggtgactgtatcttccggaggcggaggatcaggtggcggtggatctggcggtggcggatctgatattcaactgacacaatcccccagctcactcagcgccagcgtgggggacagggttagctttacctgtcaagcctctcaggatataaataactttctgaactggtatcaacagaagcctgggaaggcgcccaaactcctgatctatgatgcgtccaacctggaaactggcgtgccttcacgctttagcggctctggcagtggtacagacttcacttttaccatctcttcacttcagccggaggacatcgccacatattactgtcaacagtacggaaacttgccctttacttttggaggcggcaccaaagttgaaatcaaaagaacgcgtggaggcggatctaaagttgctgctcttaaagaaaaggtcgcggctctgaaagaaaaagtggcggcgctcaaggagaaagttgcagctctcaaagaa

SEQ ID NO: 1733 - DNA, 915 bp, Artificial Sequence
  Synthetic Polynucloetide
atggccttaccagtgaccgccttgctcctgccgctggccttgctgctccacgccgccaggccgcaagttactttgaaggagtctggacctgtactggtgaagccaaccgagacactgacactcacgtgtacagtgagtggtttttccttgatcaacgcaaggatgggcgtcagctggatcaggcaaccccctggcaaggctctggaatggctcgctcacatattcagcaatgccgaaaaaagctaccggacaagcctgaaatcccgcctgactatttccaaggacacttctaagtctcaggtggtgctgaccatgaccaacatggacccggtggacaccgccacctattactgcgcaagaatccctgggtatggtgggaatggtgactaccattattatgggatggatgtgtgggggcaaggcacaaccgtaacggtctcaagcggaggcggaggatcaggtggcggtggatctggcggtggcggatctgacattcagatgacccaaagcccgtccagcctgtccgccagcctgggagatagagtgacaatcacgtgtagagcttcccaagggataagaaatgatctcgggtggtatcagcagaagcccggcaaagcccccaaaaggcttatatatgctagtagtacactgcagtctggagttccttcccgattttcaggtagcggctccggtacagagttcaccctcacgataagctcactccagcctgaggatttcgcaacgtactactgcctccagcacaacaattttccctggactttcggccagggcaccaaggtggagatcaagaggacgcgtggaggcggatctaaagttgctgctcttaaagaaaaggtcgcggctctgaaagaaaaagtggcggcgctcaaggagaaagttgcagctctcaaagaa

SEQ ID NO: 1734 - DNA, 897 bp, Artificial Sequence
  Synthetic Polynucloetide
atggccttaccagtgaccgccttgctcctgccgctggccttgctgctccacgccgccaggccgcagatccagttggtggaatcagggggcggtgtggtgcagccgggtaggagcctgagactgtcatgcgtggcgtctggcttcacattcaagaactacggcatgcactgggtgcgacaggcccccggaaagggtttggagtgggtcgccgtgatctggtacgacggatctaatgagtattacggagatcctgtgaagggaaggttcaccatctcccgcgacaatagcaaaaatatgctctacctgcaaatgaactcactcagggcggatgatacggcggtctactattgcgctcgctcagggattgctgtggccggcgcattcgattactggggacagggtaccctggtgacagtatcaagcggaggcggaggatcaggtggcggtggatctggcggtggcggatctgagattgtgttgacacagtctcccgataccctgtcactgtcacccggcgagaaggcaacgctgagttgcagagcaagccagtcagtctcctcttcttttctggcctggtatcagcaaaaaccaggtcaggcaccatctctcctgatttacgttgccagcagacgggcggctggcattcccgacaggttctctggaagcggatctgggaccgattttaccctgacaattagccgcttggagcccgaagactttggtatgttttactgccagcactacggaaggacacctttcacatttggcccgggcacgaaagtcgatataaaacgcacgcgtggaggcggatctaaagttgctgctcttaaagaaaaggtcgcggctctgaaagaaaaagtggcggcgctcaaggagaaagttgcagctctcaaagaa

SEQ ID NO: 1735 - DNA, 900 bp, Artificial Sequence
  Synthetic Polynucloetide
atggccttaccagtgaccgccttgctcctgccgctggccttgctgctccacgccgccaggccggacatccaactgactcagagccccagctttctgagcgcctctgtgggcgacagagtgaccatcacatgtagagccagccagggcatcagcagctacctggcttggtatcagcagaagcctggcaaggcccctaaactgctgatctacgccgccagcacactccagtctggcgtgccaagcagattttctggcagcggctctggcaccgagttcaccctgacaatatccagcctccagcctgaggacttcgccacctactactgccagcaagtgaacagctaccctctgacctttggcggaggcaccaaggtggaaatcaagagaggcggaggcggaagtggaggcggaggatctggcggcggaggctctcaactgcaactgcaagagtctggccctggcctggtcaagcctagcgaaacactgagcctgacctgtaccgtgtctggcggcagcatcagctccagcacatattactggggctggatcagacagcctcctggcaaaggactggaatggatcggctccatctacttcaccggcagcaccgactacaaccccagcctgaagtccagggtgtccatctccgtggacaccagcaagaaccagttctccctgaagctgagcagcgtgacagccgctgataccgccgtgtactactgcgccaaagaggacgatagcagcggctactacagcttcgactattggggccagggcaacctggtcaccgttagctctacgcgtggaggcggatctaaagttgctgctcttaaagaaaaggtcgcggctctgaaagaaaaagtggcggcgctcaaggagaaagttgcagctctcaaagaa

SEQ ID NO: 1736 - DNA, 909 bp, Artificial Sequence
  Synthetic Polynucloetide
atggccttaccagtgaccgccttgctcctgccgctggccttgctgctccacgccgccaggccgcagtctgctctgacccagcctagatccgtgtctggctctcctggacacagcgtgaccatcagctgtaccggcacctcttccgacgtgggcgactacaattacgtgtcctggtatcagcagaggcccggcaaggtgccaaagctgctgatctacgacgtgtccaagaggccaagcggcgtgcccgatagattttccggcagcaagtctggcaacaccgccagcctgacaatctctggactgcaagccgaggacgaggccatctacttttgtgccagctacgccggcaactacaacgtggtgtttggcggaggcaccaagctgacagtgcttggacaaggcggaggcggaagtggaggcggaggatctggcggcggaggctctcaagttcagctggtgcagtctggcagcgagctgaagaaacctggggcctctgtgaaggtgtcctgcaaggcttccggctacaccttcaacacctacgccatgaattgggtccgacaggctccaggccaaggactggaatggatgggctggatcaacaccaacaccggcaatcccacatacgcccagggcttcaccggcagattcgtgttctctctggacacctccgtgtccaccgcctacctccagatcagctctctgaaggccgaggataccgccgtgtactactgcgccagacggtacttcgattggctgctgggagccttcgacatctggggccagggaacaatggtcaccgtgtctagtacgcgtggaggcggatctaaagttgctgctcttaaagaaaaggtcgcggctctgaaagaaaaagtggcggcgctcaaggagaaagttgcagctctcaaagaa

SEQ ID NO: 1737 - DNA, 885 bp, Artificial Sequence
  Synthetic Polynucloetide
atggccttaccagtgaccgccttgctcctgccgctggccttgctgctccacgccgccaggccggacatccagatgacacagagccctagcagcctgtctgccagcgtgggagacagagtgaccatcacatgtagcgccagccagggcatcaacaactacctgaactggtatcagcagaagcccggcaaggcccctaagctgctgatccactacacatctggactgcacgctggcgtgcccagcagattttctggctctggcagcggcaccgactacaccctgacaatatctagcctccagcctgaggacgtggcaacctactactgccagcagtacagcatcctgccttggacctttggcggaggcaccaaggtggaaatcaagagaggcggaggcggaagtggaggcggaggatctggcggcggaggctctcaagttcagcttgttcagagcggagccgaagtgaagaaacccggcagctctgtgaaggtgtcctgcaaggcttccggctacgcctttagcagcagctggatgaactgggtccgacaggctcctggacagggccttgaatggatgggcagaatctatcccggcgacggcaatacccactacgcccagaaattccagggccgcgtgacactgacagccgacaagtctacaagcaccgcctacatggaactgagcagcctgagaagcgaggacaccgccgtgtactattgcggcgaaggctatctggaccctatggactattggggccagggcacactggtcaccgttagctctacgcgtggaggcggatctaaagttgctgctcttaaagaaaaggtcgcggctctgaaagaaaaagtggcggcgctcaaggagaaagttgcagctctcaaagaa

SEQ ID NO: 1738 - DNA, 894 bp, Artificial Sequence
  Synthetic Polynucloetide
atggccttaccagtgaccgccttgctcctgccgctggccttgctgctccacgccgccaggccggaggtgcagctggttgaatctggcggaggactggttcagcctggcggatctctgagactgtcttgtgccgccagcggctacaccttcaccacctattggatgcactgggtccgacaggcccctggcaaaggacttgagtgggtcggatatatcaggcccagcaccggctacacagagtacaaccagaagttcaaggaccgcttcaccatcagcgccgacaccagcaagaataccgcctacctccagatgaacagcctgagagccgaggacaccgccgtgtactactgtgccagatccagatggctgctggactattggggccagggcacactggttacagtttctggcggaggcggaagtggaggcggaggatctggcggcggaggctctgacattcagatgacacagagccctagcagcctgagcgcctctgtgggagacagagtgaccatcacatgcaagagcagccagagcgtgctgtactccagcaatcagaagaactacctggcctggttccagcagaagcctggcaaggctcctaagctgctgatctactgggccagcaccagagaaagcggcgtgccaagcagattttctggcagcggctctggcaccgacttcaccctgacaatatccagcctccagcctgaggacttcgccacctacttttgccaccagtacctgagcagctacacattcggacagggcaccaaggtggaaatcaagcggacgcgtggaggcggatctaaagttgctgctcttaaagaaaaggtcgcggctctgaaagaaaaagtggcggcgctcaaggagaaagttgcagctctcaaagaa

SEQ ID NO: 1739 - DNA, 885 bp, Artificial Sequence
  Synthetic Polynucloetide
atggccttaccagtgaccgccttgctcctgccgctggccttgctgctccacgccgccaggccggacatccagatgacacagagccctagcagcctgtctgccagcgtgggagacagagtgaccatcacctgtagagccagccaggacatcagcaactacctgaactggtatcagcagaagcccggcaaggcccctaagctgctgatctactacaccagcagactgcacagcggcgtgcccagcagattttctggctctggcagcggcaccgacttcaccctgacaatatctagcctccagcctgaggacttcgccacctactattgccagcagggcaacaccctgccttacacatttggacagggcaccaaggtggaaatcaagagaggcggaggcggaagtggaggcggaggatctggcggcggaggctctgaagtgcagctggttgaatcaggtggcggcctggttcaacctggcggatctctgagactgagctgtgccgccagcggcttcaccttcagcgactactttatgagctgggtccgacaggcccctggcaaaggacttgaatgggtcgccaccatcagcaatggcggcacctacacttactaccccgacagcgtgaagggcagattcaccatctccagagacaacagcaagaacaccctgtacctccagatgaactccctgagagccgaggacaccgccgtgtactactgcgccagattcgacggctacatcttcgactattggggccagggcaccctggtcacagtctcttctacgcgtggaggcggatctaaagttgctgctcttaaagaaaaggtcgcggctctgaaagaaaaagtggcggcgctcaaggagaaagttgcagctctcaaagaa

SEQ ID NO: 1740 - DNA, 906 bp, Artificial Sequence
  Synthetic Polynucloetide
atggccttaccagtgaccgccttgctcctgccgctggccttgctgctccacgccgccaggccggacatccagatgacacagagccctagcagcctgtctgccagcgtgggagacagagtgaccatcacctgtaccgccagcagcagagtgtccagcagctacctgcactggttccagcagaagcctggcaaggcccctaagctgctgatctacagcaccagcaatctggcctctggcgtgcccagcagattttctggctctggcagcggcaccgacttcaccctgacaatatctagcctccagcctgaggacttcgccacctactactgccaccagtaccacagaagcccctacacattcggccagggcaccaaggtggaaatcaagagaggcggaggcggaagtggaggcggaggatctggcggcggaggctctgaagttcagctggttgaatctggcggcggactggttcaacctggcggatctctgagactgagctgtgccgcctctggctacgccttcagcaacagctggatcaactgggtccgacaggcccctggcaaaggactggaatgggtcggacaaatctaccccggcgactacgacaccaactacaacggcaagttcaagggcagattcaccatcagccgggacaagagcaagaacaccgcctacctccagatgaactccctgagagccgaggacaccgccgtgtactattgtgctagaggcggctccatctactacggcaacctgggcttcttcgacgtgtggggacagggcacactggtcacagtctcttctacgcgtggaggcggatctaaagttgctgctcttaaagaaaaggtcgcggctctgaaagaaaaagtggcggcgctcaaggagaaagttgcagctctcaaagaa

SEQ ID NO: 1741 - DNA, 876 bp, Artificial Sequence
  Synthetic Polynucloetide
atggccttaccagtgaccgccttgctcctgccgctggccttgctgctccacgccgccaggccggacatccagatgacacagagccctagcagcctgtctgccagcgtgggagacagagtgaccatcacatgtagcgccagcagcagcgtgacctacatgtactggtatcagcagaagcccggcaaggcccctaagctgctgatctacgacaccagcaatctggcctctggcgtgcccagcagattttctggctctggcagcggcaccgactacaccctgacaatatctagcctccagcctgaggacttcgccacctactactgccagcagtggtccaactatcccctgacattcggccagggcaccaaggtggaaatcaaaggcggaggcggaagtggaggcggaggatctggcggcggaggctctcaagttcagctggttcagagcggagccgaagtgaagaaacctggggcctctgtgaaggtgtcctgcaaggccagcggctacagcttcatcgagtacaccatcaactgggtccgacaggcccctggacaaggcctggaatggatcggcaacatcgacccctactacggcacaacctactacaaccagatgttcaccggcagagccacactgaccgtggacacctctatcagcaccgcctacatggaactgagccggctgagatccgatgacaccgccgtgtactattgtgccagaggcagcgcctggtttccctattggggacagggaaccctggtcaccgttagctctacgcgtggaggcggatctaaagttgctgctcttaaagaaaaggtcgcggctctgaaagaaaaagtggcggcgctcaaggagaaagttgcagctctcaaagaa

SEQ ID NO: 1742 - DNA, 876 bp, Artificial Sequence
  Synthetic Polynucloetide
atggccttaccagtgaccgccttgctcctgccgctggccttgctgctccacgccgccaggccggagatcgtgctgacacagagcccttctagcctgtctgccagcgtgggcgacagagtgaccatcacatgtagagccagcgagaacatctacagctacctggcctggtatcagcagaagcctggcaaggcccctaagctgctgatctacaacaccaagacactcggcgagggcgtgcccagcagattttctggttctggcagcggcaccgacttcaccctgaccatatctagcctgcagcctgaggacttcgccacctactactgccagcaccactacggcacccctttcacatttggccctggcaccaaggtggacatcaaaggcggaggcggaagtggaggcggaggatctggcggcggaggctctcaagttcagctggttcagagcggagccgaagtgaagaaacctggggcctctgtgaaggtgtcctgcaaggccagcggctacaccttcagcgactattgggtgcactgggtccgacaggctccaggacaaggactggaatggatgggagccatcgacggcagcgataccttcaacgattacagccagaaattcaaaggccgcgtgaccatgaccagagacaccagcatcagcaccgcctacatggaactgagccggctgagatccgatgacaccgccgtgtactattgtgccagaggcggcctgctgcagtattggggacagggaacactggtcaccgtgtcctctacgcgtggaggcggatctaaagttgctgctcttaaagaaaaggtcgcggctctgaaagaaaaagtggcggcgctcaaggagaaagttgcagctctcaaagaa

SEQ ID NO: 1743 - DNA, 888 bp, Artificial Sequence
  Synthetic Polynucloetide
atggccttaccagtgaccgccttgctcctgccgctggccttgctgctccacgccgccaggccgcaggttcagctccagcagtctggacctgagctggttaagcctggcgcttccgtgaagatcagctgcaaggcttccggctacgccttcagcagcagctggatgaactgggtcaaacagaggcccggcaaaggactggaatggatcggcagaatctaccccggcgacgaggacaccaattacagcggcaagttcaaggacaaggccacactgaccgccgacaagagcagcaccacagcctacatgcagctgagcagcctgaccagcgaggatagcgccgtgtacttctgtgccagaagcctgctgtacggcgactacctggattattggggccagggcacaaccctgacagtgtctagcggcggaggcggaagtggaggcggaggatctggcggcggaggctctcaaattgtgctgacacagagccccgccatcatgagcgcttctccaggcgagaaagtgaccatgacctgtagcgccagcagctccgtgtcttacatgcactggtatcagcagaagtccggcacaagccccaagcggtggatctacgataccagcaaactggcctccggcgtgcccgatagattttctggcagcggcagcggaaccagctacttcctgaccatcaacaacatggaagccgaggacgccgccacctactactgccagcagtggaacatcaaccctctgacctttggagccggcaccaagctggaactgaagagaacgcgtggaggcggatctaaagttgctgctcttaaagaaaaggtcgcggctctgaaagaaaaagtggcggcgctcaaggagaaagttgcagctctcaaagaa

SEQ ID NO: 1744 - DNA, 897 bp, Artificial Sequence
  Synthetic Polynucloetide
atggccttaccagtgaccgccttgctcctgccgctggccttgctgctccacgccgccaggccggacatccagatgacacagagcagcgcctacctgagcgtgtcccttggaggcagagtgaccatcacatgcaaggccagcgaccacatcaacaactggctggcctggtatcagcacaagcccggcaatgcccctagactgctgatctctggcgctaccacactggaaacaggcgtgcccagcagattttctggcagcggctctggcaaggactacaccctgagcatcaccagcctccagaccgaggatgtggctacctactactgccagcagagctggaacaccccttggacatttggcggaggcaccaagctggaaatcaagagaggcggaggcggaagtggaggcggaggatctggcggcggaggctctcaagttcagctgcaacagagcggagccgagcttgtcagacctggcagctctgtgaagattagctgcaaagccagcggctacgccttcagcagctactgggtcaactggatgaagcagcggcctggacagggcctcgaatggatcggccaaatctatcctggcgacggcgacaccaactacaacggcaagtttaagggcagagccaccgtgaccgccgacaagagcagcagcacatcctacatgcagttcagcagcctgaccagcgaggacagcgccgtgtatttctgtgccagatccatcaccaccgtcgtgggctgcgctatggattattggggccagggcacaagcgtgaccgtgtcatctacgcgtggaggcggatctaaagttgctgctcttaaagaaaaggtcgcggctctgaaagaaaaagtggcggcgctcaaggagaaagttgcagctctcaaagaa

SEQ ID NO: 1745 - DNA, 894 bp, Artificial Sequence
  Synthetic Polynucloetide
atggccttaccagtgaccgccttgctcctgccgctggccttgctgctccacgccgccaggccggaggttcagctgcttgagtctggcggaggactggttcaacctggcggaagcctgagactgtcttgtgccgccagcggcttcacctttagcagctacgccatgagctgggtccgacaggctcctggcaaaggactggaatgggtgtccgtgatctctggctctggcggcagacccaattacgccgattctgtgaagggcagattcaccatcagccgggacaacagcaagaacaccctgtacctccagatgaacagcctgcgcgacgaggataccgccgtgtactattgtgccaaggtggactacagcaactacctgttcttcgactactggggccagggcaccctggtcacagtttctagcggcggaggcggaagtggaggcggaggatctggcggcggaggctctgaaatcgtgctgacacagagccccggcacactgtcactttctccaggcgaaggcgctaccctgtcttgtagagctggacagtctgtgcggagcagctacctcggatggtatcagcagaagcctggacaggcccctcggctgttgatctacggtgcttctagcagagccacaggcatccccgatagattttctggcagcggctccggcaccgacttcaccctgacaatcagcagactggaacccgaggacttcgccgtgtattactgccagcagtacggctacagccctcctacatttggcggaggcaccaagctggaaatcaagacgcgtggaggcggatctaaagttgctgctcttaaagaaaaggtcgcggctctgaaagaaaaagtggcggcgctcaaggagaaagttgcagctctcaaagaa

SEQ ID NO: 1746 - DNA, 903 bp, Artificial Sequence
  Synthetic Polynucloetide
atggccttaccagtgaccgccttgctcctgccgctggccttgctgctccacgccgccaggccggacatcgtgctgacacagagccctccaagcctggctatgagcctgggaaagagagccaccatcagctgtagagccagcgagagcgtgacaatcctgggctctcacctgatccactggtatcagcagaagcccggccagcctcctacactgctgattcagctggcctccaatgtgcagacaggcgtgccagccagattttctggcagcggcagcagaaccgacttcaccctgaccattgatcccgtggaagaggacgacgtggccgtgtactactgcctccagagcagaacaatccccagaacctttggcggaggcaccaagctggaaatcaagggcagcacaagcggcagcggaaagcctggatctggcgagggatctaccaagggacagatccagctggtgcagtctggccccgagctgaagaaacctggcgagacagtgaagatcagctgcaaggccagcggctacaccttcaccgactacagcatcaactgggtcaagagagcccctggcaagggcctgaaatggatgggctggatcaacaccgaaaccagagagcccgcctacgcctacgacttcagaggcagattcgccttcagcctggaaaccagcgccagcacagcctacctccagatcaacaacctgaagtacgaggacaccgccacctacttttgcgccctggactacagctacgctatggactattggggccagggcaccagcgtgacagtctcttctacgcgtggaggcggatctaaagttgctgctcttaaagaaaaggtcgcggctctgaaagaaaaagtggcggcgctcaaggagaaagttgcagctctcaaagaa

SEQ ID NO: 1747 - DNA, 903 bp, Artificial Sequence
  Synthetic Polynucloetide
atggccttaccagtgaccgccttgctcctgccgctggccttgctgctccacgccgccaggccggacatccagatgacacagagccctagcagcctgtctgccagcgtgggagacagagtgaccatcacctgtagagccagcagcagcgtgtcctacatgcactggtatcagcagaagcccggcaaggcccctaagctgctgatctacgccaccagcaatctggcctctggcgtgccaagcagattttctggcagcggctctggcaccgacttcaccctgacaatatccagcctccagcctgaggacttcgccacctactactgccagcagtggaccttcaatcctcctaccttcggccagggcaccaagctggaaatcaagagaacagtggctgccggcggaggcggaagtggaggcggaggatctggcggcggaggctctcaagttcagctggttcagtctggggccgaagtgaagaaacctggggcctctgtgaaggtgtcctgcaaggcttccggctacacctttaccagctacaatatgcactgggtccgacaggctcccggccagagacttgaatggatgggcggcatctaccccggcaatggcgacacctcctacaaccagaaattcaagggccgcgtgacaatcaccagagacacctctgccagcaccgcctacatggaactgagcagcctgagaagcgaggacaccgccgtgtactactgcgccagatacgactacaactacgctatggactactggggccagggaaccctggtcacagtgtctagtgcttccacgcgtggaggcggatctaaagttgctgctcttaaagaaaaggtcgcggctctgaaagaaaaagtggcggcgctcaaggagaaagttgcagctctcaaagaa

SEQ ID NO: 1748 - DNA, 888 bp, Artificial Sequence
  Synthetic Polynucloetide
atggccttaccagtgaccgccttgctcctgccgctggccttgctgctccacgccgccaggccggagatcgtgctgacacagagccctggcacactgtcactgtctccaggcgaaagagccacactgagctgtagagccagccagagcgtgtccagctcttacctggcttggtatcagcagaagcccggacaggctcccagactgctgatctacggtgcctctagcagagccacaggcatccccgatagattttctggcagcggctccggcaccgacttcaccctgacaatcagcagactggaacccgaggacttcgccgtgtactactgccagcagtaccaccactctccactgacctttggcggaggcaccaaggtggaaatcaagagaggcggaggcggaagtggaggcggaggatctggcggcggaggctctgaagttcagctggttgaatcaggtggcggcctggttcaacctggcggatctctgagactgtcttgtgccgccagcggcttcactttcagcggcagatccatgaactgggtccgacaggcccctggcaaaggactggaatgggtgtcctacatcagcagcgacagccggaccatctactacgccgatagcgtgaagggcagattcaccatctccagagacaacgccaagaacagcctgtacctccagatgaactccctgagagccgaggacacagccgtgtattattgtgccagaggcggccacggctacttcgatctttggggcagaggcaccctggtcaccgtttcttctacgcgtggaggcggatctaaagttgctgctcttaaagaaaaggtcgcggctctgaaagaaaaagtggcggcgctcaaggagaaagttgcagctctcaaagaa

SEQ ID NO: 1749 - DNA, 897 bp, Artificial Sequence
  Synthetic Polynucloetide
atggccttaccagtgaccgccttgctcctgccgctggccttgctgctccacgccgccaggccggagatcgtgctgacacagagccctggcacactgtcactgtctccaggcgaaagagccacactgagctgtagagccagccagagcgtgtccagcgattacctggcttggtatcagcagaagcccggacaggctcccagactgctgatctatggtgcctctcggagagccacaggcatccccgatagattttctggcagcggctccggcaccgacttcaccctgacaatcagcagactggaacccgaggacttcgccgtgtactactgccagcagtacgtgtcctactggacctttggcggaggcaccaaggtggaaatcaagagaggcggaggcggaagtggaggcggaggatctggcggcggaggctctcaagttcagctggttgaatcaggcggaggcgttgtgcagcctggcagaagtctgagactgtcttgtgccgccagcggcttcaccttcagcagctatggaatgcactgggtccgacaggcccctggcaaaggacttgaatgggtggccggcatttggtgggacggcagcaatgagaagtacgccgacagcgtgaagggcagattcaccatctccagagacaacagcaagaacaccctgtacctccagatgaacagcctgagagccgaggacacagccgtgtattattgcgccaaagaggccccttactacgccaaggactacatggacgtgtggggcaagggcaccacagtgactgtctcttctacgcgtggaggcggatctaaagttgctgctcttaaagaaaaggtcgcggctctgaaagaaaaagtggcggcgctcaaggagaaagttgcagctctcaaagaa

SEQ ID NO: 1750 - DNA, 897 bp, Artificial Sequence
  Synthetic Polynucloetide
atggccttaccagtgaccgccttgctcctgccgctggccttgctgctccacgccgccaggccggacatccagatgacacagagccctagcagcctgtctgccagcgtgggagacagagtgaccatcacctgtagagccagccaggacgtgaacacagccgtggcttggtatcagcagaagcctggcaaggcccctaagctgctgatctacagcgccagctttctgtacagcggcgtgcccagcagattcagcggaagcagaagcggcaccgacttcaccctgacaatatccagcctccagcctgaggacttcgccacctactactgccagcagcactacaccacacctccaacattcggccagggcaccaaggtggaaatcaagagaacaggcggaggcggaagtggaggcggaggatctggcggcggaggctctgaagtgcagctggttgaatcaggtggcggcctggttcaacctggcggatctctgagactgagctgtgccgccagcggcttcaacatcaaggacacctacatccactgggtccgacaggcccctggcaaaggacttgaatgggtcgccagaatctaccccaccaacggctacaccagatacgccgactctgtgaagggcagattcaccatcagcgccgacaccagcaagaacaccgcctacctccagatgaactccctgagagccgaggacaccgccgtgtactactgtagcagatggggcggctggggcttctacgctatggattattggggccagggaaccctggtcaccgtgtcatctacgcgtggaggcggatctaaagttgctgctcttaaagaaaaggtcgcggctctgaaagaaaaagtggcggcgctcaaggagaaagttgcagctctcaaagaa

SEQ ID NO: 1751 - DNA, 882 bp, Artificial Sequence
  Synthetic Polynucloetide
atggccttaccagtgaccgccttgctcctgccgctggccttgctgctccacgccgccaggccgcaggtgcagctggttgaatctggcggcggacttgtgaagcctggcggatctctgagactgagctgtgccgccagcggcttcaccttcagcgactactacatgacctggatcagacaggcccctggcaaaggactggaatggatcagctacatcagcagcagcggcagcaccatctactacgccgatagcgtgaagggcagattcaccatcagccgggacaacgccaagaacagcctgtacctccagatgaactccctgagagccgaggacaccgccgtgtactactgcgccagagacagaaacagccacttcgactattggggccagggcaccctggtcacagtttctagcggcggaggcggaagtggaggcggaggatctggcggcggaggctctgatattcagatgacacagagccccagcagcgtgtccgcctctgtgggagatagagtgaccatcacctgtagagccagccagggcatcacaagatggctggcctggtatcagcagaagccaggcaaggcccctaagctgctgatctacgccgcttctgtgctccagagcggagtgcctagcagattttctggcagcggctccggcaccgatttcaccctgacaatatccagcctccagcctgaggacttcgccacctactactgccagcagagcaacagcttccccagaacattcggacagggcaccaaggtggaaatcaagacgcgtggaggcggatctaaagttgctgctcttaaagaaaaggtcgcggctctgaaagaaaaagtggcggcgctcaaggagaaagttgcagctctcaaagaa

SEQ ID NO: 1752 - DNA, 882 bp, Artificial Sequence
  Synthetic Polynucloetide
atggccttaccagtgaccgccttgctcctgccgctggccttgctgctccacgccgccaggccgcaggtgcagctggttgaatctggcggcggacttgtgaagcctggcggatctctgagactgagctgtgccgccagcggcttcaccttcagcgatcactacatgagctggatcagacaggcccctggcaaaggactggaatggttcagctacatcagcagcagcggcggcatcatctactacgccgatagcgtgaagggcagattcaccatcagccgggacaacgccaagaacagcctgtacctccagatgaactccctgagagccgaggacaccgccgtgtactactgtgccagagatgtgggcagccacttcgactattggggccagggaacactggtcaccgtttctagcggcggaggcggaagtggaggcggaggatctggcggcggaggctctgatattcagatgacacagagccccagcagcgtgtccgcctctgtgggagatagagtgaccatcacctgtcgggccagccaggacattagcagatggctggcttggtatcagcagaagccaggcaaggcccctaagctgctgatttcagccgccagcagactccagagcggagtgcctagcagattttctggctctggcagcggcaccgacttcaccctgacaatatctagcctccagcctgaggacttcgccatctactattgccagcaggccaagagcttccccagaacatttggacagggcaccaaggtggaaatcaagacgcgtggaggcggatctaaagttgctgctcttaaagaaaaggtcgcggctctgaaagaaaaagtggcggcgctcaaggagaaagttgcagctctcaaagaa

SEQ ID NO: 1753 - DNA, 918 bp, Artificial Sequence
  Synthetic Polynucloetide
atggccttaccagtgaccgccttgctcctgccgctggccttgctgctccacgccgccaggccgcaggtgcagctggttgaatctggtggcggagtggtgcagtctggcagaagcctgagactgtcttgtgccgccagcggcttcaccttcagaaactacggaatgcactgggtccgacaggcccctggcaaaggacttgaatgggtcgccgtgatttggtacgacggcagcgacaagtactacgccgattctgtgcggggcagattcaccatcagccgggacaacagcaagaacaccctgtacctccagatgaacagcctgagagccgaggacaccgccgtgtactactgtgccagagatggctacgacatcctgaccggcaatcccagagacttcgactattggggccagggcacactggtcacagtttctagcggcggaggcggaagtggaggcggaggatctggcggcggaggctctgataccgtgatgacccagacacctctgagcagccacgtgacacttggacagcctgccagcatcagctgtagaagcagccagagcctggtgcacagcgacggcaatacctacctgtcttggctccagcagaggccaggacagcctcctagactgctgatctaccggatcagcagacggttcagcggcgtgcccgatagattttctggaagcggagccggcaccgacttcaccctggaaatcagcagagtggaagccgaggatgtgggcgtctactactgtatgcagagcacccacgtgccacggacctttggacagggcaccaaggtggaaatcaagacgcgtggaggcggatctaaagttgctgctcttaaagaaaaggtcgcggctctgaaagaaaaagtggcggcgctcaaggagaaagttgcagctctcaaagaa

SEQ ID NO: 1754 - DNA, 897 bp, Artificial Sequence
  Synthetic Polynucloetide
atggccttaccagtgaccgccttgctcctgccgctggccttgctgctccacgccgccaggccggaggtgcagctggttgaatctggcggaggactggttcagcctggcggatctctgagactgtcttgtgccgccagcggcttcccattcagcagctacgatatgcactgggtccgacaggccacaggcaaaggactggaatgggtgtccgccatcggaacagccggcgctacctattatcccggctctgtgaagggcagattcaccatcagcagagagaacgccaagaacagcctgtacctccagatgaactccctgagagccggcgataccgccgtgtactattgtgccagaggcgactacgtgtggggcacctacagacccctgttcgattattggggccagggcaccctggtcacagtttctagtggcggaggcggaagtggaggcggaggatctggcggcggaggctctgatattcagctgactcagagccccagcttcctgtctgcctctgtgggcgacagagtgaccatcacatgttgggccagccagggcatcaacaactacctggcctggtatcagcagaagcccggcaaggctcctaagctgctgatctacgccgccagcacactgcaaacaggcgtgccaagcagattttccggctctggcagcggcaccgagttcaccctgacaatatctagcctccagcctgaggacttcgccacctactactgccagcagctgaacagctaccctctgacctttggaggcggcaccaaggtggaaatcaagacgcgtggaggcggatctaaagttgctgctcttaaagaaaaggtcgcggctctgaaagaaaaagtggcggcgctcaaggagaaagttgcagctctcaaagaa

SEQ ID NO: 1755 - DNA, 888 bp, Artificial Sequence
  Synthetic Polynucloetide
atggccttaccagtgaccgccttgctcctgccgctggccttgctgctccacgccgccaggccgcaggttcagctgcaagagtctggccctggcctggtcaagcctagcgaaacactgagcctgacctgtaccgtgtctggggccagcatcagcagcttctactggtcctggatcagacagcctcctggcaaaggactggaatggatcggctacatctactacagcggcaccaccaactacaaccccagcctgaagtccagagtgaccatcagcgtggacaccagcaagaaccagttctccctgaagctgagcagcgtgacagccgccgatacagccgtgtactactgtgccagaattgccgtggccggcttcttcttcgactattggggccagggcaccctggtcacagtttctagcggcggaggcggaagtggaggcggaggatctggcggcggaggctctgaaattgtgctgacacagagccccggcacactgtcactttctccaggcgaaagagccacactgagctgtagagccagccagagcgtgaacaagaactacctggcttggtatcagcagaagcccggacaggctcccagactgctgatctacggtgcctctagcagagccacaggcatccccgatagattttctggcagcggctccggcaccgacttcaccctgacaatcagcagactggaacccgaggacttcgccgtgtattattgccagcagtacgacagaagccctctgacctttggaggcggcaccaaggtggaaatcaagacgcgtggaggcggatctaaagttgctgctcttaaagaaaaggtcgcggctctgaaagaaaaagtggcggcgctcaaggagaaagttgcagctctcaaagaa

SEQ ID NO: 1756 - DNA, 915 bp, Artificial Sequence
  Synthetic Polynucloetide
atggccttaccagtgaccgccttgctcctgccgctggccttgctgctccacgccgccaggccgcaggttcagctggttcagtctggggccgaagtgaagaaacctggggcctctgtgaaggtgtcctgcaaggccagcggctacacctttaccaactactacatgcactgggtccgacaggcccctggactgggacttgagtggatgggcatcatcaaccctagcgacggcagcacaagctacgcccagaaattccagggcagagtgaccatgaccagagacaccagcaccaacaccgtgtacatggacctgagcagcctgagaagcgaggacaccgccgtgtactattgtgccagaggcggcaacagcgccttctacagctactacgacatggacgtgtggggccagggcaccacagtgacagtttctagcggcggaggcggaagtggaggcggaggatctggcggcggaggctctgatgtggtcatgacacagacccctctgagcctgcctgtgacacttggacagcctgccagcatcagctgtagatccagccagagcctggtgtacagagatggcaacacctacctgagctggttccagcagaggcctggacagtctcctcggcggctgatctacaaggtgtccaactggcagagcggcgtgcccgatagattttctggcggtggcagcggcaccgacttcaccctgaagatcagcagagtggaagccgaggacgtgggcgtgtactactgtatgcagggcacacactggcctccaacattcggccagggaacaaaggtggaaatcaagacgcgtggaggcggatctaaagttgctgctcttaaagaaaaggtcgcggctctgaaagaaaaagtggcggcgctcaaggagaaagttgcagctctcaaagaa

SEQ ID NO: 1757 - DNA, 876 bp, Artificial Sequence
  Synthetic Polynucloetide
atggccttaccagtgaccgccttgctcctgccgctggccttgctgctccacgccgccaggccgcaggttcagctccagcagtctggacctgagctggttaagcctggcgcttctgtgcggatctcttgcaaggccagcggctacaccttcaccacctactacatccactgggtcaagcagcggcctggacagggactcgaatggatcggctggatctaccccggcaacgtgaacaccaactacaacgagaagttcaagggcaaagccacactgaccgccgacaagagcagcagcacagcctacatgcagctgaccagcctgacctctgaggacagcgccgtgtacttttgtgccagaggcgtgtactacttcgactactggggccagggcaccatcctgacagtttctagcggcggaggcggaagtggaggcggaggatctggcggcggaggctctatcgtgatgacccagactcctaagttcctgctggtgtctgccggcgacagagtgaccatcacctgtaaagccagccagagcgtgaacaacgacgtgtcctggttccagcagaagcccggccaatctcctacactgctgatctactacgccagcaacagatacaccggcgtgcccgatagattcaccggctctggctacggcaccgacttcacctttaccatcagcaccgtgcaggccgaggacctggctgtgtacttctgccagcaagactacagcagcccttacacctttggaggcggcaccaagctggaaatcaagacgcgtggaggcggatctaaagttgctgctcttaaagaaaaggtcgcggctctgaaagaaaaagtggcggcgctcaaggagaaagttgcagctctcaaagaa

SEQ ID NO: 1758 - DNA, 885 bp, Artificial Sequence
  Synthetic Polynucloetide
atggccttaccagtgaccgccttgctcctgccgctggccttgctgctccacgccgccaggccgcaggttcagctgcaagagtctggccctggcctggtcaagcctagccaaacactgagcctgacctgtaccgtgtctggcggcagcatcaacaacaacaattactactggacctggatcagacagcaccccggcaaaggactggaatggatcggctacatctactacagcggcagcaccttctacaaccccagcctgaagtccagagtgaccatcagcgtggacaccagcaagacccagttctccctgaagctgagcagcgtgacagccgccgatacagccgtgtactactgcgccagagaagataccatgaccggcctggatgtgtggggccagggaacaacagtgacagtgtctagcggcggaggcggaagtggaggcggaggatctggcggcggaggctctgacattcagatgacacagagccctagcagcctgagcgcctctgtgggagacagagtgacaattacctgtcgggccagccagtctatcaacaactacctgaactggtatcagcagaagcccggcaaggcccctacactgctgatctatgccgccagctctctccagagcggagtgcctagcagattcagcggaagcagaagcggcaccgacttcaccctgacaatatccagcctccagcctgaggacttcgccgcctacttttgccagcagacctacagcaaccccacctttggccagggcaccaaggtggaagtgaagacgcgtggaggcggatctaaagttgctgctcttaaagaaaaggtcgcggctctgaaagaaaaagtggcggcgctcaaggagaaagttgcagctctcaaagaa

SEQ ID NO: 1759 - DNA, 900 bp, Artificial Sequence
  Synthetic Polynucloetide
atggccttaccagtgaccgccttgctcctgccgctggccttgctgctccacgccgccaggccgagctacgagctgacacagcctccaagcgtgtccgtgtctcctggacagacagccagcatcacctgtagcggcgataagctgggcgataagtacgccagctggtatcagcagaagcccggccagtctcctgtgctggtcatctaccaggacaacagaaggcccagcggcatccccgagagattcagcggcagcaatagcggcaataccgccacactgaccatcagcggcacccaggctatggacgaggccgactactattgccaggcttgggacagcgacacctacgtgttcggcaccggcaccaaagtgacagtgcttggacaaggcggaggcggaagtggaggcggaggatctggcggcggaggctctgaagttcagctggttcagagcggagccgaagtgaagaaacctggggcctctgtgaaggtgtcctgcaaggcttccggcgataccttcaagcggtactacgtgcactgggtccgacaggctccaggacaaggactggaatggatgggcatcatcaaccccagcggcgtgtccacaacatacgcccagaaattccagggcagagtgaccatgaccagagacaccagcacctccaccgtgtacatggaactgagcagcctgagaagcgaggacaccgccgtgtactactgtgctgaagtgcgcggcagcggcttcaactacttcggcatggatgtgtggggccagggcacactggttaccgtttcttctacgcgtggaggcggatctaaagttgctgctcttaaagaaaaggtcgcggctctgaaagaaaaagtggcggcgctcaaggagaaagttgcagctctcaaagaa

SEQ ID NO: 1760 - DNA, 897 bp, Artificial Sequence
  Synthetic Polynucloetide
atggccttaccagtgaccgccttgctcctgccgctggccttgctgctccacgccgccaggccggaggttcagctgcttgagtctggcggaggactggttcaacctggcggaagcctgagactgtcttgtgccgccagcggcttcacctttagcagctacgccatgagctgggtccgacaggctcctggcaaaggactggaagtggtggtgtctgccatttctggcggcggaggcagaacctactacgccgattctgtgaagggcagattcaccatcagccgggacaacagcaagaacaccctgtacctgcagatgaacagcctgagagccgaggacaccgccgtgtactactgtgccagagaagagatggccttccgggcctacagattcgacatctggggccagggaaccctggtcacagtttctagcggcggaggcggaagtggaggcggaggatctggcggcggaggctctgatattcagatgacacagagccccagcagcctgtctgcctctgtgggagacagagtgaccatcacctgtagagccagccagagcatcagcagctacctgaactggtatcagcagaagcccggcaaggcccctaaactgctgatctatgccgcctccagtctgcagagcggagtgcctagcagattttctggctctggcagcggcaccgacttcaccctgacaatatctagcctgcagcctgaggacttcgccacctactactgccagcagagctacatcacccctctgacattcggtggcggcaccaaggtggaaatcaagacgcgtggaggcggatctaaagttgctgctcttaaagaaaaggtcgcggctctgaaagaaaaagtggcggcgctcaaggagaaagttgcagctctcaaagaa

SEQ ID NO: 1761 - DNA, 921 bp, Artificial Sequence
  Synthetic Polynucloetide
atggccttaccagtgaccgccttgctcctgccgctggccttgctgctccacgccgccaggccggacatcgtgctgacacagagccctgcttctctggccgtgtctcttggacagggcgctaccatcagctgtagagccagcaagagcgtgtccaccagcggctacacctacatgcactggtatcagcagaagcccggccagcctcctaagctgctgatctacctggcctccaacctggaaagcggagtgcctgccagattttctggcagcggctctggcaccgacttcaccctgaatatccatcctgtggaagaagaggacgccgccacctactactgtcagcactctggcgaactgccacctagctttggcggaggcaccaagctggaaatcaagagagctggcggaggcggaagtggaggcggaggatctggcggcggaggctctgaagtgcagctggtggaatctggcggcgaccttgtgaaacctggcggctctctgaagctgagctgtgccgtgtccggcttcacctttagcagctacggcatgagctgggtccgacagacccctgacaagagactggaatgggtcgccacagtgtctagcggcggcacctacacatattaccccgacagcgtgaagggcagattcaccatcagccgggacaacgccaagaacaccctgtacctccagatgagcagcctgaagtccgaggacagcgccatgtactactgcgccagacaccggggcaattactacgccacctattattacgctatggactactggggccagggcaccagcgtgacagtttcttctacgcgtggaggcggatctaaagttgctgctcttaaagaaaaggtcgcggctctgaaagaaaaagtggcggcgctcaaggagaaagttgcagctctcaaagaa

SEQ ID NO: 1762 - DNA, 903 bp, Artificial Sequence
  Synthetic Polynucloetide
atggccttaccagtgaccgccttgctcctgccgctggccttgctgctccacgccgccaggccggacatccagatgacacagagccctagcagcctgtctgccagcgtgggagacagagtgaccatcacatgtagcgccagccagggcatcagaaactacctgaactggtatcagcagaaacccggcaaggtgcccaagctgctgatctactacaccagcagactgcacagcggcgtgcccagcagattttctggctctggcagcggcaccgacttcaccctgacaatatctagcctccagcctgaggacgtggcaacctactactgtcagcagtacggcaagctgccctacacattcggccagggcaccaagctggaaatcaagagaacagtggctgccggcggaggcggaagtggaggcggaggatctggcggcggaggctctgaagttcagctggttgaatcaggcggcggactggttcaacctggcggatctctgagactgagctgtgccgccagcggcttcacattttccgacgcctggatggactgggtccgacaggctcctggaaaaggactggaatgggtcggagagatccggtccaaagtgaacaaccacgaaacctactatgccgagagcgtgaagggcagattcaccatcagccgggacgacagcaagaacagcctgtacctccagatgaactccctgaaaaccgaggacaccgccgtgtactactgcgccagaaacgactacttcgactactggggccagggaaccaccgtgacagtgtctagtgcttccacgcgtggaggcggatctaaagttgctgctcttaaagaaaaggtcgcggctctgaaagaaaaagtggcggcgctcaaggagaaagttgcagctctcaaagaa

SEQ ID NO: 1763 - DNA, 927 bp, Artificial Sequence
  Synthetic Polynucloetide
atggccttaccagtgaccgccttgctcctgccgctggccttgctgctccacgccgccaggccggaggttcagctgcaagagtctggggccgaagtgaagaaacctggcagcagcgtgaaggtgtcctgcaaggccagcggcttcaacatcaaggacacctacatgcactgggtccgacaggcccctggacaaggacttgagtggatgggcagaatcgaccccgccaacggcaacagcaaatacgtgcccaagttccagggcagagtgaccatcacagccgacgagagcacaagcaccgcctacatggaactgagcagcctgagaagcgaggacaccgccgtgtactactgtgcccctttcggctactacgtgtccgactacgccatggcctattggggccagggaaccaccgtgacagtgtctagtgcatctggcggaggcggaagtggaggcggaggatctggcggcggaggctctgacatcgtgatgacacagagccccgatagcctggccgtgtctctgggagaaagagccaccatcaactgtagagccggcgagagcgtggacatcttcggcgtgggatttctgcactggtatcagcagaagcccggccagcctcctaagctgctgatctacagagccagcaacctggaaagcggcgtgcccgatagattttctggcagcggctctggcaccgacttcaccctgacaatcagacctctccaggccgaggatgtggccgtgtattattgccagcagaccaacgaggacccctacacatttggacagggcaccaagctggaaatcaagagaacagtggccgccacgcgtggaggcggatctaaagttgctgctcttaaagaaaaggtcgcggctctgaaagaaaaagtggcggcgctcaaggagaaagttgcagctctcaaagaa

SEQ ID NO: 1764 - DNA, 906 bp, Artificial Sequence
  Synthetic Polynucloetide
atggccttaccagtgaccgccttgctcctgccgctggccttgctgctccacgccgccaggccgcaagttcagctggttcagtctggggccgaagtgaagaaacctggcagcagcgtgaaggtgtcctgcaaagcaagcggcggcacctttagcagctacgccatctcttgggtccgacaggcaccaggacaaggactggaatggatgggcctgattatccccagatacggcaaggccagatacgcccagaaattccagggcagagtgaccatcaccgccgacgagtctacaagcaccgcctacatggaactgagcagcctgagaagcgaggacacagccgtgtattattgcgcccggaactggccctactactacatggatttttggggccagggaaccctggtcaccgtgtctagtgcatctggcggaggcggaagtggaggcggaggatctggcggcggaggctctgacatcgtgctgacacagtctcccgccacactgtcactgtctccaggcgaaagagccacactgagctgtagagccagccagaacatcgtgttcaacctggcctggtatcagcagaagcctggacaggctccccggctgctgatctacgatgccagcaatagagccaccggcgtgcccgccagattttctggttctggcagcggcaccgacttcaccctgaccatatctagcctggaacctgaggacttcgccgtgtactactgccagcagaaaaagtccatgcctctgaccttcggccagggcaccaaggtggaaatcaagagaacagtggctgccacgcgtggaggcggatctaaagttgctgctcttaaagaaaaggtcgcggctctgaaagaaaaagtggcggcgctcaaggagaaagttgcagctctcaaagaa

SEQ ID NO: 1765 - DNA, 915 bp, Artificial Sequence
  Synthetic Polynucloetide
atggccttaccagtgaccgccttgctcctgccgctggccttgctgctccacgccgccaggccggaggtgcagctggttgaatctggcggcggacttgtgaagcctggcggatctctgagactgagctgtgccgccagcggcttcacctttagcaatgcctggatgagctgggtccgacaggcccctggaaaaggactggaatgggtcggacggatcaagagcaagaccgaaggcggcaccaccgattatgctgcccctgtgaagggcagattcaccatcagcagggacgacagcaagaacaccctgtacctccagatgaacagcctgaaaaccgaggacaccgccgtgtactactgcaccacaccttacgagtggtcttggtacgactactggggccagggcacactggtcacagtgtcatctgcatctggcggaggcggaagtggaggcggaggatctggcggcggaggctctcagacagtggtcacccaagagcctagcctgacagtgtctcctggcggaaccgtgacactgacatgtggcagttctaccggcgctgtgaccaccagcaattacgccaactgggtgcagcagaagccaggccaagctcctagaggactgatcggcggcacaaacaagagagcccctggcacaccagccagattttctggctctctgctcggcggaaaggccgctcttacactgtctggtgtccagcctgaggacgaggccgagtattattgcgccctgtggtacagcaacctgtgggttttcggcggaggcaccaagctgacagtgctgactgttgctgctacgcgtggaggcggatctaaagttgctgctcttaaagaaaaggtcgcggctctgaaagaaaaagtggcggcgctcaaggagaaagttgcagctctcaaagaa

SEQ ID NO: 1766 - DNA, 915 bp, Artificial Sequence
  Synthetic Polynucloetide
atggccttaccagtgaccgccttgctcctgccgctggccttgctgctccacgccgccaggccgcaggttcagctggttcagtctggggccgaagtgaagaaacctggggcctctgtgaaggtgtcctgcaaggcttccggctacacctttaccagctactacatgcactgggtccgacaggcccctggacaaggacttgagtggatgggcatcatcaaccctagcggcggcagcacaagctacgcccagaaattccagggcagagtgaccatgacacacgacaccagcacctccaccgtgtacatggaactgagcagcctgagaagcgaggacaccgccgtgtactactgcgccagatccttcttcaccggcttccacctggattactggggccagggaacactggtcacagtgtcatctgcatctggcggaggcggaagtggaggcggaggatctggcggcggaggctctgaaattgtgctgacacagagccccggcacactgtcactttctccaggcgaaagagccacactgagctgtagagccagccagagcgtgtccagctcttacctggcttggtatcagcagaagcccggccaggctcctagactgctgatctacggtgccagcagcagagccacaggcatccccgatagattttctggcagcggctccggcaccgacttcaccctgacaatcagcagactggaacccgaggactttgccgtgtattattgccagcagtacaccaacgagcactactacaccttcggccagggcaccaaggtggaaatcaagagaacagtggccgccacgcgtggaggcggatctaaagttgctgctcttaaagaaaaggtcgcggctctgaaagaaaaagtggcggcgctcaaggagaaagttgcagctctcaaagaa

SEQ ID NO: 1767 - DNA, 933 bp, Artificial Sequence
  Synthetic Polynucloetide
atggccttaccagtgaccgccttgctcctgccgctggccttgctgctccacgccgccaggccggagatcgtgctgacacagtctcccgccacactgtcactgtctccaggcgaaagagccacactgagctgtagcgtgtccagcagcatcagcagcagcaacctgcactggtatcagcagaagcctggacaggcccctcggctgctgatctacggcacatctaatctggcctctggcatccccgccagattttctggctctggaagcggcaccgacttcaccctgaccataagcagcctggaacctgaggacttcgccgtgtactactgccagcagtggtccagctatccccacacatttggcggaggcaccaaggtggaaatcaagagaacagtggctgccggcggaggcggaagtggaggcggaggatctggcggcggaggctctcaggttcagctggttcagagcggagccgaagtgaagaaacctggggcctctgtgaaggtgtcctgcaaggcttccggctacacctttaccaactacctgatcgagtgggtccgacaggctccaggacaaggactggaatggatgggcctgattaaccctggcagcggcggcaccaactacaacgagaagttcaagggcagagtgaccatgaccaccgacaccagcacaagcaccgcctacatggaactgcggagcctgagaagcgacgacaccgccgtgtattattgcgccagaagaagccctctcggctcttggatctactacgcctatgacggcgtggcctattggggccagggaacactggttacagtgtcctctgccagcacgcgtggaggcggatctaaagttgctgctcttaaagaaaaggtcgcggctctgaaagaaaaagtggcggcgctcaaggagaaagttgcagctctcaaagaa

SEQ ID NO: 1768 - DNA, 888 bp, Artificial Sequence
  Synthetic Polynucloetide
atggccttaccagtgaccgccttgctcctgccgctggccttgctgctccacgccgccaggccggacatccagatgacacagagccctagcagcctgtctgccagcgtgggagacagagtgaccatcacctgtaaagccggccagaacgtgggcacaagcgtggcatggtatcagcagaagcctggcaaggcccctaagctgctgatctacagcgccagctacagatacagcggcgtgcccagcagattttctggcagcggctctggcaccgacttcaccctgacaatatccagcctccagcctgaggacttcgccacctactactgccagcagtacatcacatacccctacaccttcggccagggcaccaaggtggaaatcaagagaacagtggctgccggcggaggcggaagtggaggcggaggatctggcggcggaggctctgaagttcagctggttgaatcaggcggcggactggttcaacctggcggatctctgagactgagctgtgccgccagcggcttcaccttcagcagatactggatgagctgggtccgacaggcccctggcaaaggacttgaatgggtcgccgagatcaaccccgacagcagcaccatccagtacaccccatctctgaaggcccggttcaccctgtccgtggacagaagcaagaacaccctgtacctccagatgaactccctgagagccgaggacaccgccgtgtactattgtgccagacctgcctattggggccagggaacactggtcacagtgtctagcgcttccacgcgtggaggcggatctaaagttgctgctcttaaagaaaaggtcgcggctctgaaagaaaaagtggcggcgctcaaggagaaagttgcagctctcaaagaa

SEQ ID NO: 1769 - DNA, 909 bp, Artificial Sequence
  Synthetic Polynucloetide
atggccttaccagtgaccgccttgctcctgccgctggccttgctgctccacgccgccaggccggacatccagatgacacagagccctagcagcctgtctgccagcgtgggagacagagtgaccatcacatgtagcgccagccaggacatcggcaactttctgaactggtatcagcagaagcccggcaaggcccctaagctgctgatctactacacctccagcctgtacagcggcgtgcccagcagattttctggcagcggctctggcaccgacttcaccctgacaatatccagcctccagccagaggacttcgccacctactactgccagcagtacagcaagctgcccctgacctttggacagggcaccaagctggaaatcaagagaacagtggctgccggcggaggcggaagtggaggcggaggatctggcggcggaggctctcaagttcagctggttcagtctggggccgaagtgaagaaacctggggcctctgtgaaggtgtcctgcaaggcttccggctacacctttaccggctacaacatccactgggtccgacaggctcccggccaaagacttgaatggatgggcgctatctaccccggcaacggcgataccagctacaagcagaaattccggggcagagtgacaattaccagagacaccagcgccagcaccgcctacatggaactgtctagcctgagaagcgaggacaccgccgtgtactattgcgccagaggcgaaacagccagagccacctttgcctattggggccagggaaccctggtcacagtgtctagtgcttccacgcgtggaggcggatctaaagttgctgctcttaaagaaaaggtcgcggctctgaaagaaaaagtggcggcgctcaaggagaaagttgcagctctcaaagaa

SEQ ID NO: 1770 - DNA, 501 bp, Artificial Sequence
  Synthetic Polynucloetide
atggccttaccagtgaccgccttgctcctgccgctggccttgctgctccacgccgccaggccggatgtgcaagtgacacagagccctagcagcctgtctgcctctgtgggcgacagagtgacaatcacctgtcggagcagccagagcctggctaactcctacggcaataccttcctgagctggtatctgcacaagcccggaaaggctccccagctgctgatctacggcatcagcaacagattcagcggcgtgcccgataggtttagcggctctggaagcggcaccgacttcaccctgacaatatccagcctccagcctgaggactttgccacctactactgtctgcaaggcacccaccagccttacacattcggacagggcaccaaggtggaaatcaagacgcgtggaggcggatctaaagttgctgctcttaaagaaaaggtcgcggctctgaaagaaaaagtggcggcgctcaaggagaaagttgcagctctcaaagaa

SEQ ID NO: 1771 - DNA, 486 bp, Artificial Sequence
  Synthetic Polynucloetide
atggccttaccagtgaccgccttgctcctgccgctggccttgctgctccacgccgccaggccggacatccagatgacacagagccctagcagcctgtctgccagcgtgggagacagagtgaccatcacctgtagagccagccaggacatcagcaactacctgaactggtatcagcagaaacccggcaaggccgtgaagctgctgatctactacaccagcatcctgcacagcggcgtgcccagcagattttctggctctggcagcggcaccgactacaccctgacaatatctagcctccagcctgaggacttcgctacctacttctgccagcaaggcaacaccctgccttggacatttggcggaggcaccaaggtggaaatcaaaacgcgtggaggcggatctaaagttgctgctcttaaagaaaaggtcgcggctctgaaagaaaaagtggcggcgctcaaggagaaagttgcagctctcaaagaa

SEQ ID NO: 1772 - DNA, 489 bp, Artificial Sequence
  Synthetic Polynucloetide
atggccttaccagtgaccgccttgctcctgccgctggccttgctgctccacgccgccaggccggacatcgtgatgacccagagccagcggttcatgaccacaagcgtgggcgatagagtgtccgtgacatgcaaggccagccagagcgtggactctaacgtggcctggtatcagcagaagcccagacagagccccaaggctctgatctttagcgccagcctgagattcagcggagtgcccgctagattcacaggcagcggctctggcaccgatttcaccctgaccatcagcaacctccagagcgaggacctggccgagtatttctgccagcagtacaacaactaccctctgaccttcggagccggcaccaagctggaactgaagagaacgcgtggaggcggatctaaagttgctgctcttaaagaaaaggtcgcggctctgaaagaaaaagtggcggcgctcaaggagaaagttgcagctctcaaagaa

SEQ ID NO: 1773 - DNA, 489 bp, Artificial Sequence
  Synthetic Polynucloetide
atggccttaccagtgaccgccttgctcctgccgctggccttgctgctccacgccgccaggccggacatccagatgacacagagccctagcagcctgtctgccagcgtgggagacagagtgaccatcacctgtagagccagccaggacatcagcaactacctgaactggtatcagcagaagcccggcaaggcccctaagctgctgatctactacaccagcatcctgcacagcggcgtgcccagcagattttctggctctggcagcggcaccgacttcaccctgacaatatctagcctccagcctgaggacttcgccacctactattgccagcagggcaacaccctgccttggacctttggacagggcaccaaggtggaaatcaagagaacgcgtggaggcggatctaaagttgctgctcttaaagaaaaggtcgcggctctgaaagaaaaagtggcggcgctcaaggagaaagttgcagctctcaaagaa

SEQ ID NO: 1774 - DNA, 489 bp, Artificial Sequence
  Synthetic Polynucloetide
atggccttaccagtgaccgccttgctcctgccgctggccttgctgctccacgccgccaggccggacatccagatgacacagagccctagcagcctgtctgccagcgtgggagacagagtgaccatcacatgcaaggccagcgaccacatcaacaactggctggcctggtatcagcagaagcctggcaaggcccctaagctgctgatctacggcgctaccacactggaaacaggcgtgcccagcagattttctggcagcggctctggcaccgacttcaccctgacaatatccagcctccagcctgaggacttcgccacctactactgtcagcagagctggaacaccccttggacattcggccagggcaccaaggtggaaatcaagagaacgcgtggaggcggatctaaagttgctgctcttaaagaaaaggtcgcggctctgaaagaaaaagtggcggcgctcaaggagaaagttgcagctctcaaagaa

SEQ ID NO: 1775 - DNA, 489 bp, Artificial Sequence
  Synthetic Polynucloetide
atggccttaccagtgaccgccttgctcctgccgctggccttgctgctccacgccgccaggccgagctacgtgctgacacagcctccatccgtgtctgtggctccaggacagaccgccagaatcacatgcggcggcaacaacatcggcagcaagagcgtgcactggtatcagcagccacctggacaggctccagtggtggtggtgtacgacgacagcgatagacctagcggcatccccgagagattcagcggcagcaattccggcaataccgccacactgaccatcagcagagtggaagctggcgacgaggccgtgtactactgccaagtgtgggacagcagcagcgatcacgtggtgtttggcggcggaacaaagctgacagtgcttacgcgtggaggcggatctaaagttgctgctcttaaagaaaaggtcgcggctctgaaagaaaaagtggcggcgctcaaggagaaagttgcagctctcaaagaa

SEQ ID NO: 1776 - DNA, 489 bp, Artificial Sequence
  Synthetic Polynucloetide
atggccttaccagtgaccgccttgctcctgccgctggccttgctgctccacgccgccaggccggacatccagatgacacagagccctagcagcctgtctgccagcgtgggagacagagtgaccatcacctgtatggcctccgaggacatctacatccggctggcctggtatcagcagaagcctggaaaggcccctaagctgctgatctacgccgccacctctctggaaacaggcgtgccaagcagattttccggcagcggctctggcaccgatttcaccctgaccataagcagcctgcagcctgaggacttcgccacctactactgccagcagtattggagcagcccctggacctttggacagggcaccaaggtggaaatcaagagaacgcgtggaggcggatctaaagttgctgctcttaaagaaaaggtcgcggctctgaaagaaaaagtggcggcgctcaaggagaaagttgcagctctcaaagaa

SEQ ID NO: 1777 - DNA, 501 bp, Artificial Sequence
  Synthetic Polynucloetide
atggccttaccagtgaccgccttgctcctgccgctggccttgctgctccacgccgccaggccggacatccagatgacacagagccctagcagcgtgtccgcctctgtgggagacagagtgaccatcacctgtagagccagcgagagcgtggacaactacggcatcagcttcatgaactggtatcagcagaagcccggcaaggcccctaagctgctgattagcgccgccagcaatagagccacaggcgtgccaagcagattttccggctctggcagcggcaccgatttcaccctgacaatatccagcctccagcctgaggacttcgccatctactactgccagcagagcaaagaggtgccctggacctttggacagggcaccaaggtggaaatcaagagaacgcgtggaggcggatctaaagttgctgctcttaaagaaaaggtcgcggctctgaaagaaaaagtggcggcgctcaaggagaaagttgcagctctcaaagaa

SEQ ID NO: 1778 - DNA, 501 bp, Artificial Sequence
  Synthetic Polynucloetide
atggccttaccagtgaccgccttgctcctgccgctggccttgctgctccacgccgccaggccggacatccagctgacacagagcccttctagcctgtctgccagcgtgggcgacagagtgaccatcacatgtagagccagcaagagcgtgtccaccagcggctacagctacatgcactggtatcagcagaagcccggcaaggcccctaagctgctgatctacctggtgtccaacctggaaagcggcgtgcccagcagattttctggcagcggctctggcaccgacttcaccctgacaatatccagcctccagcctgaggacttcgccacctactactgccagcagttcagcgagctgccttggacctttggacagggcaccaaggtggaaatcaagagaacgcgtggaggcggatctaaagttgctgctcttaaagaaaaggtcgcggctctgaaagaaaaagtggcggcgctcaaggagaaagttgcagctctcaaagaa

SEQ ID NO: 1779 - DNA, 492 bp, Artificial Sequence
  Synthetic Polynucloetide
atggccttaccagtgaccgccttgctcctgccgctggccttgctgctccacgccgccaggccggacatccagatgacacagagccctagcagcgtgtccgcctctgtgggagacagagtgaccatcacctgtcgggccagccagttcatcagcagcagctacctgagctggtatcagcagaagcctggcaaggcccctaagctgctgatctctggcagctctagcagagccacaggcgtgccaagcagattttctggcagcggctctggcaccgacttcaccctgacaatatccagcctccagcctgaggacttcgccatctactactgccagcagctgtactctagccccatgacattcggccagggcaccaaggtggaaatcaagagaacgcgtggaggcggatctaaagttgctgctcttaaagaaaaggtcgcggctctgaaagaaaaagtggcggcgctcaaggagaaagttgcagctctcaaagaa

SEQ ID NO: 1780 - DNA, 534 bp, Artificial Sequence
  Synthetic Polynucloetide
atggccttaccagtgaccgccttgctcctgccgctggccttgctgctccacgccgccaggccgcaggtccagctcgtcgagtccggcggcggcctcgtccaggccggcgactccgtcaccctctcctgcaccgcctccggccgcaccttctcctcctacgccctcgcctggttccgccagcgccccggcaaggagcgcgagttcgtcgccggcctccgctggggcggccccaccaactacgccgactccgtcaaggaccgcttcaccatctccggcgactccgccaagcacaccatgtacctccagatgaactccctcaagcccgaggacaccgccgtctactactgcggctacaaccccggcggctgggccgtcccctcccagtacgagtacgactcctggggccagggcacccaggtcaccgtctcctccacgcgtggaggcggatctaaagttgctgctcttaaagaaaaggtcgcggctctgaaagaaaaagtggcggcgctcaaggagaaagttgcagctctcaaagaa

SEQ ID NO: 1781 - DNA, 519 bp, Artificial Sequence
  Synthetic Polynucloetide
atggccttaccagtgaccgccttgctcctgccgctggccttgctgctccacgccgccaggccgcaggttcagctgcaagagtctggcggaggacttgctcaagctggcggaagcctgagactgtcttgtgccgcctctggcagaaccttcagcatgggctggtttagacaggcccctggcaaagagagagagttcgtcgccgccatcacatacagcggcggcagcccttactacgcctcttctgtcagaggccggttcaccatcagccgggacaacgccaagaacaccgtgtacctccagatgaacagcctgaagccagaggacaccgccgtgtactactgtgccgccaatccaacctacggcagcgactggaatgccgagaattggggccagggcacccaagtgacagtgtctagtacgcgtggaggcggatctaaagttgctgctcttaaagaaaaggtcgcggctctgaaagaaaaagtggcggcgctcaaggagaaagttgcagctctcaaagaa

SEQ ID NO: 1782 - DNA, 513 bp, Artificial Sequence
  Synthetic Polynucloetide
atggccttaccagtgaccgccttgctcctgccgctggccttgctgctccacgccgccaggccggaagtgcagctggttgaatctggcggaggactggttcagcctggcggatctctgagactgtcttgtgccgccagcggcttcagcttcagcgacttttggatgagctgggtccgacaggcccctggcaaaggacttgaatgggtcgccacaatcagccaggccggcagcgagaaggactacgtggactctgtgaagggcagattcaccatcagccgggacaacgccaagaagtccctgtacctccagatgaacagcctgagagccgaggacaccgccgtgtactattgtgcctctggcgtgtacagcttcgactacagaggccagggcaccctggtcacagtctcttctacgcgtggaggcggatctaaagttgctgctcttaaagaaaaggtcgcggctctgaaagaaaaagtggcggcgctcaaggagaaagttgcagctctcaaagaa

SEQ ID NO: 1783 - DNA, 513 bp, Artificial Sequence
  Synthetic Polynucloetide
atggccttaccagtgaccgccttgctcctgccgctggccttgctgctccacgccgccaggccggaagtgcagctggttgaatctggcggaggactggttcagcctggcggatctctgagactgtcttgtgccgccagcggcttcaccttcagcaactactggatgagctgggtccgacaggcccctggaaagggacaagaatgggtcgccaccatcaaccaggacggcagcgacaaggattacgtggacagcgtgaagggcagattcaccatcagccgggacaacgccaagaagtccctgtacctccagatgaacagcctgagagccgaggacaccgccgtgtactattgtgcctctggcgtgtacagcttcgactacagaggccagggcaccctggtcacagtctcttctacgcgtggaggcggatctaaagttgctgctcttaaagaaaaggtcgcggctctgaaagaaaaagtggcggcgctcaaggagaaagttgcagctctcaaagaa

SEQ ID NO: 1784 - DNA, 513 bp, Artificial Sequence
  Synthetic Polynucloetide
atggccttaccagtgaccgccttgctcctgccgctggccttgctgctccacgccgccaggccggaagtgcagctggttgaatctggcggaggactggttcagcctggcggatctctgagactgtcttgtgccgccagcggcatcgacttcagcagatactggatgagctgggtccgacaggcccctggcaaaggacttgaatgggtcgccacaatcagccaggccggcagcgagaaggactacgtggactctgtgaagggcagattcaccatcagccgggacaacgccaagaagtccctgtacctccagatgaacagcctgagagccgaggacaccgccgtgtactattgtgcctctggcgtgtacagcttcgactacagaggccagggcaccctggtcacagtctcttctacgcgtggaggcggatctaaagttgctgctcttaaagaaaaggtcgcggctctgaaagaaaaagtggcggcgctcaaggagaaagttgcagctctcaaagaa

SEQ ID NO: 1785 - DNA, 513 bp, Artificial Sequence
  Synthetic Polynucloetide
atggccttaccagtgaccgccttgctcctgccgctggccttgctgctccacgccgccaggccggaagtgcagctggttgaatctggcggaggactggttcagcctggcggatctctgagactgtcttgtgccgccagcggcatcgacttcagcagatactggatgagctgggtccgacaggcccctggaaagggacaagaatgggtcgccaccatcaaccaggacggcagcgacaaggattacgtggacagcgtgaagggcagattcaccatcagccgggacaacgccaagaagtccctgtacctccagatgaacagcctgagagccgaggacaccgccgtgtactattgtgcctctggcgtgtacagcttcgactacagaggccagggcaccctggtcacagtctcttctacgcgtggaggcggatctaaagttgctgctcttaaagaaaaggtcgcggctctgaaagaaaaagtggcggcgctcaaggagaaagttgcagctctcaaagaa

SEQ ID NO: 1786 - DNA, 525 bp, Artificial Sequence
  Synthetic Polynucloetide
atggccttaccagtgaccgccttgctcctgccgctggccttgctgctccacgccgccaggccggaggtgcagctggttgaatctggcggaggactggttcagcctggcggatctctgagactgtcctgcacattttccggcggcaccttcagcagctacacaatgggctggttcagacaggcccctggcaaagaacgggaatttgtggccgaagtccgatggggcggagtgaccacatacagcaacagcctgaaggacagattcagcatcagcgaggacagcgtgaagaacgccgtgtacctccagatgaactccctgaagcctgaggacacagccgtgtactattgtgccgctgtgcggcagatgtacatgaccgtggtgcctgattattggggccagggcacactggtcacagtgtctagcacgcgtggaggcggatctaaagttgctgctcttaaagaaaaggtcgcggctctgaaagaaaaagtggcggcgctcaaggagaaagttgcagctctcaaagaa

SEQ ID NO: 1787 - DNA, 519 bp, Artificial Sequence
  Synthetic Polynucloetide
atggccttaccagtgaccgccttgctcctgccgctggccttgctgctccacgccgccaggccggaagtgcagctggttgaatctggcggaggactggttcaggctggcggatctctgagactgtcttgtgccgccagcggcagaacctttagcatgggctggtttagacaggcccctggcaaagagagagagttcgtcgccgccatcacatactctggcggcagcccttactacgccgactctgtgaagggcagattcaccatcagccgggacaacgccaagaacaccgtgtacctccagatgaacagcctgaagcctgaggacaccgccgtgtactactgcgccgccaatccaacatacggcagcgactggaacgccgagaattggggccagggaacccaagtgacagtgtctagcacgcgtggaggcggatctaaagttgctgctcttaaagaaaaggtcgcggctctgaaagaaaaagtggcggcgctcaaggagaaagttgcagctctcaaagaa

SEQ ID NO: 1788 - DNA, 519 bp, Artificial Sequence
  Synthetic Polynucloetide
atggccttaccagtgaccgccttgctcctgccgctggccttgctgctccacgccgccaggccgcagctccagttgcaagagagcggccctggcttggtaaaaccttccgagacccttagcctcacatgcacggttagtgggggcagcatttcctcaggtgattactattggggatggattcggcaacccccgggtaaaggattggagtggattggtcatatttattatagtggagcgacgtactacaacccaagtctcaaatccagggttacaatatccgtcgatacgagcaggaaccaattcagcttgaaactttctagtgtcaccgcagcagacacagccgtctattactgtacgcgggatgactccagtaattggcggtcccgagggcaagggacactggtcacggtctcctcaacgcgtggaggcggatctaaagttgctgctcttaaagaaaaggtcgcggctctgaaagaaaaagtggcggcgctcaaggagaaagttgcagctctcaaagaa

SEQ ID NO: 1789 - DNA, 519 bp, Artificial Sequence
  Synthetic Polynucloetide
atggccttaccagtgaccgccttgctcctgccgctggccttgctgctccacgccgccaggccgcagctccagctgcaagagtctggacctggcctggtcaagcctagcgagacactgagcctgacctgtaccgtgtccggcgatagcatcagcagcggcgattactactggggctggatcagacagcctcctggcaaaggactggaatggatcggccacatctactacagcggcgtgacctactacaaccccagcctgaagtccagagtgaccatcagcgtggacaccagccggaaccagttctccctgaagctgtctagcgtgacagccgccgataccgccgtgtactactgcaccagagaggacagcagcaactggcggagtagaggccagggaacactggtcacagttagctctacgcgtggaggcggatctaaagttgctgctcttaaagaaaaggtcgcggctctgaaagaaaaagtggcggcgctcaaggagaaagttgcagctctcaaagaa

SEQ ID NO: 1790 - DNA, 519 bp, Artificial Sequence
  Synthetic Polynucloetide
atggccttaccagtgaccgccttgctcctgccgctggccttgctgctccacgccgccaggccgcaactgcaactgcaagagtctggccctggcctggtcaagccttctgaaaccctgagcctgacctgtaccgtgtccggcggctctatcagcagcggcgattactactggggctggatcagacagcctccaggcaagggactcgaatggatcggcagcatcagctacagcggctccacctactacaacccaagcctgaagtccagagtgaccatcagcgtggacaccagcagaaaccagttctccctgaagctgagcagcgtgacagccgccgatacagccgtgtattattgcaccagagaggacagcagcaactggcggagtagaggacagggcacactggtcacagtgtcctctacgcgtggaggcggatctaaagttgctgctcttaaagaaaaggtcgcggctctgaaagaaaaagtggcggcgctcaaggagaaagttgcagctctcaaagaa

SEQ ID NO: 1791 - DNA, 537 bp, Artificial Sequence
  Synthetic Polynucloetide
atggccttaccagtgaccgccttgctcctgccgctggccttgctgctccacgccgccaggccgcagctgcaactgcaagagtctggccccggactggtcaagccttctgaaacactggccctgacctgcaatgtgtccggcggctctatcagcagcagctcctattactggggctggatcagacagcctccaggcaagagactggaatggatcggcagcatctactacagcggcagcacatacttcaaccccagcctgaagtccagagtgaccatcagcgtggacacctccaagaaccagttctccctgaagctgagcagcgtgacagccgccgatacagccgtgtattactgtgctggcggcgactactatggccccgttggacaatggcccagcgattacagaggacagggaacccttgtgaccgtgtcctctacgcgtggaggcggatctaaagttgctgctcttaaagaaaaggtcgcggctctgaaagaaaaagtggcggcgctcaaggagaaagttgcagctctcaaagaa

SEQ ID NO: 1792 - DNA, 555 bp, Artificial Sequence
  Synthetic Polynucloetide
atggccttaccagtgaccgccttgctcctgccgctggccttgctgctccacgccgccaggccggaagttcagctgcttgagtctggcggaggactggttcaacctggcggaagcctgagactgtcttgtgccgccagcggcttcatcttcagcagctacgccatgagctgggtccgacaggctcctggaaagggccaagaatgggtttccggcgttagcggcacaggcgtgaacacctactacgccgatagcgtgaagggcagattcaccatcagccgggacaacagcaagaacaccctgtacctccagatgaacagcctgagagccgaggacaccgccgtgtactattgtgcctctggcaaaggctgggacagcggctcttggtacgaggactatagaggccagggcaccctggtcacagtttcttcaacgcgtcctcgactgtgccttctaacgcgtggaggcggatctaaagttgctgctcttaaagaaaaggtcgcggctctgaaagaaaaagtggcggcgctcaaggagaaagttgcagctctcaaagaa

SEQ ID NO: 1793 - DNA, 537 bp, Artificial Sequence
  Synthetic Polynucloetide
atggccttaccagtgaccgccttgctcctgccgctggccttgctgctccacgccgccaggccgcagctccagctgcaagagtctggacctggcctggtcaagcctagcgagacactgagcctgacctgtacagttagcggcggctctgtgtccagcagcagctattactggggctggatcagacagcctcctggcaagagactggaactgatcggcagcatctactacggcggctccacctacttcaaccccagcctgaaaagcagagtgaccatcagcgtggacaccagcaagaaccagttcagcctgaagctgagcagcgtgacagccgccgatacagccgtgtactattgtgccggcggagacacatacggccctgttggacaatggcccagcgactatagaggccagggcacactggtcacagtgtctagcacgcgtggaggcggatctaaagttgctgctcttaaagaaaaggtcgcggctctgaaagaaaaagtggcggcgctcaaggagaaagttgcagctctcaaagaa

SEQ ID NO: 1794 - DNA, 531 bp, Artificial Sequence
  Synthetic Polynucloetide
atggccttaccagtgaccgccttgctcctgccgctggccttgctgctccacgccgccaggccggaagttcagctgcttgaaagcggtggcggcctggttcaacctggcggatctctgagactgagctgtgccgccagcggcttcatcttctccatctacgccatgtcctgggtccgacaggcccctggaaaaggactggaatgggtgtccggcatctctggcagcggcgtgaacacctactacgccgattctgtgaagggccgcttcatcatcagccgggacaacagcagaaacaccgtgtacctccagatgaacagcctgagagccgatgacaccgccgtgtaccactgcgccaatggcaaaggctgggacggcaacacttggtacgaggattacagaggacagggaaccctcgtgaccgtgtctagtacgcgtggaggcggatctaaagttgctgctcttaaagaaaaggtcgcggctctgaaagaaaaagtggcggcgctcaaggagaaagttgcagctctcaaagaa

SEQ ID NO: 1795 - DNA, 516 bp, Artificial Sequence
  Synthetic Polynucloetide
atggccttaccagtgaccgccttgctcctgccgctggccttgctgctccacgccgccaggccggaagtgcaggttttggagtctggcggaggactggttcagcctggcggatctctgagactgtcttgtgccgccagcggcttcaccttcagcaactttgccatgagctgggtccgacaggcccctggcaaaggacttgaatgggtgtccacaatcagcggcagcgccggcacaacagattacgccgattctgtgaagggcagattcaccatcagccgggacaacagcaagaaaaccctgtacctccagatgaacagcctgcgcgtggaagataccgccgtgtactactgtgccgatggcagaggccccttcttcgattatcgcggccagggcacactggtcaccgtttcttctacgcgtggaggcggatctaaagttgctgctcttaaagaaaaggtcgcggctctgaaagaaaaagtggcggcgctcaaggagaaagttgcagctctcaaagaa

SEQ ID NO: 1796 - DNA, 522 bp, Artificial Sequence
  Synthetic Polynucloetide
atggccttaccagtgaccgccttgctcctgccgctggccttgctgctccacgccgccaggccggaggtgcagctggttgaatctggcggaggactggttcagcctggcggatctctgagactgtcttgtgccgccagcggcttcaacatcaaggatacctgtatcggctgggttcgcagagcccctggcaaagaggaagaactggtcgccaaaatctgcaagtacagcggccacaccagatacgccgacagcgtgaagggcagattcaccatcagcgccgacaccagcaagaacaccgcctacctccagatgaacagcctgagagccgaggacaccgccgtgtactattgtgccgctgtgtccgtcagagatgggcactacaattactggggccagggcaccaccgtgaccgtttcttcaacgcgtggaggcggatctaaagttgctgctcttaaagaaaaggtcgcggctctgaaagaaaaagtggcggcgctcaaggagaaagttgcagctctcaaagaa

SEQ ID NO: 1797 - DNA, 522 bp, Artificial Sequence
  Synthetic Polynucloetide
atggccttaccagtgaccgccttgctcctgccgctggccttgctgctccacgccgccaggccggaagtgcaactggtggaaagcggaggcggacttgttcaaccaggcggaagcctgagactgagctgtgccgcttccggctttaatatcaaagacacatgcatcggatgggttcgccgcgctccagggaaagaagaggaactggttgccgacatctgtccctacaagggcagcacaagatatgccgactccgtgaaaggccggtttaccatctctgccgacacctctaagaatacggcctatctgcaaatgaactctctgcgggccgaagatacagccgtgtattactgcgccatcgtgtctgccagagatggctactataactattggggacagggaaccacagtcacagtgtcctctacgcgtggaggcggatctaaagttgctgctcttaaagaaaaggtcgcggctctgaaagaaaaagtggcggcgctcaaggagaaagttgcagctctcaaagaa

SEQ ID NO: 1798 - DNA, 522 bp, Artificial Sequence
  Synthetic Polynucloetide
atggccttaccagtgaccgccttgctcctgccgctggccttgctgctccacgccgccaggccggaagtgcagctgcttgagtctggcggaggactggttcaacctggcggaagcctgagactgtcttgtgccgccagcggcttcacctttagcagctacgccatgagctgggtccgacaggctcctggcaaaggactggaatgggtgtccgccatcacaggctctggcggcagcacatattacgccgactctgtgaagggcagattcaccatcagccgggacaacagcaagaacaccctgtacctccagatgaacagcctgagagccgaggacaccgccgtgtactactgtgccaaggatgaggatggcggctctctgctgggacacagaggacagggaacactggtcaccgtgtctagcacgcgtggaggcggatctaaagttgctgctcttaaagaaaaggtcgcggctctgaaagaaaaagtggcggcgctcaaggagaaagttgcagctctcaaagaa

SEQ ID NO: 1799 - DNA, 522 bp, Artificial Sequence
  Synthetic Polynucloetide
atggccttaccagtgaccgccttgctcctgccgctggccttgctgctccacgccgccaggccggaagtgcagctgcttgagtctggcggcggactgattcaacctggcggaagcctgagactgagctgtgccgcttccggcttcacctttagcagccacgccatgacctgggtccgacaggctcctggaaaaggactggaatgggtgtccgccatcagcagcggcggcagctacacatattacgccgacagcgtgaagggcagattcaccatctccagagacaacagcaagaacaccctgtacctccagatgaacagcctgagagccgaggacaccgccgtgtactactgtgccaaggatgaggatggcggctctctgctgggacacagaggacagggaacactggtcaccgtgtctagcacgcgtggaggcggatctaaagttgctgctcttaaagaaaaggtcgcggctctgaaagaaaaagtggcggcgctcaaggagaaagttgcagctctcaaagaa

SEQ ID NO: 1800 - DNA, 522 bp, Artificial Sequence
  Synthetic Polynucloetide
atggccttaccagtgaccgccttgctcctgccgctggccttgctgctccacgccgccaggccggaagtgcagctggttgaatctggcggaggactggttcagcctggcggatctctgagactgtcttgtgccgccagcggcttcagcttcagcgacttttggatgagctgggtccgacaggcccctggcaaaggacttgaatgggtgtccgccatcagcggcagcggcgattatacacactacgccgacagcgtgaagggcagattcaccatcagccgggacaacagcaagaacaccgtgtacctccagatgaacagcctgagagccgaggacagcgccgtgtactactgtgccaaggatgaggatggcggctctctgctgggacacagaggacagggaacactggtcaccgtgtctagcacgcgtggaggcggatctaaagttgctgctcttaaagaaaaggtcgcggctctgaaagaaaaagtggcggcgctcaaggagaaagttgcagctctcaaagaa

SEQ ID NO: 1801 - DNA, 528 bp, Artificial Sequence
  Synthetic Polynucloetide
atggccttaccagtgaccgccttgctcctgccgctggccttgctgctccacgccgccaggccggaagtgcagctgcttgagtctggcggaggactggttcaacctggcggaagcctgagactgtcttgtgccgcctctggcttcgccttcagcatctacgatatgagctgggtccgacaggcccctggcaaaggacttgaatgggtgtccagcatcagcggcagcggcgactacatctactacgccgatagcgtgaagggcagattcaccatcagccgggacatcagcaagaacaccctgtacctccagatgaacagcctgagagccgaggacaccgccgtgtactactgtgccaaagaaggcaccggcgctaacagcagcctggccgattatagaggccagggcacactggtcaccgtgtctagtacgcgtggaggcggatctaaagttgctgctcttaaagaaaaggtcgcggctctgaaagaaaaagtggcggcgctcaaggagaaagttgcagctctcaaagaa

SEQ ID NO: 1802 - DNA, 528 bp, Artificial Sequence
  Synthetic Polynucloetide
atggccttaccagtgaccgccttgctcctgccgctggccttgctgctccacgccgccaggccggaggttcagctgcttgagtctggcggaggactggttcaacctggcggaagcctgagactgtcttgtgccgccagcggcttcacctttagcagctacgccatgagctgggtccgacaggctcctggcaaaggactggaatgggtgtccagcatcagcggcagcggcgactacatctactacgccgatagcgtgaagggcagattcaccatcagccgggacatcagcaagaacaccctgtacctccagatgaacagcctgagagccgaggacaccgccgtgtactactgtgccaaagaaggcaccggcgctaacagcagcctggccgattatagaggccagggcacactggtcaccgtgtctagtacgcgtggaggcggatctaaagttgctgctcttaaagaaaaggtcgcggctctgaaagaaaaagtggcggcgctcaaggagaaagttgcagctctcaaagaa

SEQ ID NO: 1803 - DNA, 519 bp, Artificial Sequence
  Synthetic Polynucloetide
atggccttaccagtgaccgccttgctcctgccgctggccttgctgctccacgccgccaggccgcaggtgcagctggttgaatctggcggaggactggttcagcctggcggatctctgagactgtcttgtgccgccagcggcttcaccttcaccaatcacgccatgagctgggtccgacaggcccctggaaaaggactggaactggtgtctagcatcagcggcaacggcagaaccacctactacgccgatagcgtgaagggcagattcaccatcagccgggacatcagcaagaacaccctggacctccagatgaacagcctgagagccgaggataccgccgtgtactactgtgccaaggatggcggagagacactggtggatagcagaggccagggcacactggtcacagtgtcatctacgcgtggaggcggatctaaagttgctgctcttaaagaaaaggtcgcggctctgaaagaaaaagtggcggcgctcaaggagaaagttgcagctctcaaagaa

SEQ ID NO: 1804 - DNA, 522 bp, Artificial Sequence
  Synthetic Polynucloetide
atggccttaccagtgaccgccttgctcctgccgctggccttgctgctccacgccgccaggccggaagtgcagctgcttgaaagtggcggcggactgattcagcctggcggatctctgagactgagctgtgccgccagcggcttcaccttttctagccacgccatgacctgggtccgacaggcacctggaaaagggcttgaatgggtgtccgccatcagcggctctggcgattacacacactacgccgacagcgtgaagggcagattcaccatcagcagagacaacagcaagaacaccgtgtacctccagatgaacagcctgagagccgaggacagcgccgtgtattattgcgccaaggatgaggatggcggcagcctgcttggacacagaggacaaggcaccctggtcaccgtttcttccacgcgtggaggcggatctaaagttgctgctcttaaagaaaaggtcgcggctctgaaagaaaaagtggcggcgctcaaggagaaagttgcagctctcaaagaa

SEQ ID NO: 1805 - DNA, 525 bp, Artificial Sequence
  Synthetic Polynucloetide
atggccttaccagtgaccgccttgctcctgccgctggccttgctgctccacgccgccaggccgcaggttcagctgcaagagtctggcggaggactggttcaggctggcgatagcctgagactgtcttgtgccgcttctggcagagccgtgtccagcctgtttatgggctggtttcggagagcccctggcaaagagagagaactggttgccgccatcagccggtacagcctgtacacctactacgccgacagcgtgaagggcagattcaccatcagcgccgacaacgccaagaacgccgtgtacctccagatgaacagcctgaagcctgaggacacagccgtgtactactgcgccagcaaacttgagtacaccagcaacgactacgacagctggggccagggaacccaagtgacagtctcttctacgcgtggaggcggatctaaagttgctgctcttaaagaaaaggtcgcggctctgaaagaaaaagtggcggcgctcaaggagaaagttgcagctctcaaagaa

SEQ ID NO: 1806 - DNA, 525 bp, Artificial Sequence
  Synthetic Polynucloetide
atggccttaccagtgaccgccttgctcctgccgctggccttgctgctccacgccgccaggccggaagttcagctgcaagagtctggcggaggactggttcaacctggcggaagcctgagactgtcttgtgccgcctctggcagaaccttcagcagcctgttcatgggctggttcagacaggcccctggcaaagagagagaactggtcgccgccatcagccggtacagcctgtacacctactacgccgacagcgtgaagggcagattcaccatcagcgccgacaacgccaagaacgccgtgtacctccagatgaacagcctgaagccagaggacacagccgtgtactactgcgccagcaaacttgagtacaccagcaacgactacgacagctggggccagggaacccaagtgacagtctcttctacgcgtggaggcggatctaaagttgctgctcttaaagaaaaggtcgcggctctgaaagaaaaagtggcggcgctcaaggagaaagttgcagctctcaaagaa

SEQ ID NO: 1807 - DNA, 525 bp, Artificial Sequence
  Synthetic Polynucloetide
atggccttaccagtgaccgccttgctcctgccgctggccttgctgctccacgccgccaggccggaagttcagctgcaagagtctggcggaggactggttcaacctggcggaagcctgagactgtcttgtgccgcctctggcagaaccttcagcagcctgtttatgggctgggtccgacaggcccctggcaaaggactggaactggtgtctgccatcagccggtacagcctgtacacctactacgccgacagcgtgaagggcagattcaccatcagcagagacaacgccaagaacaccctgtacctccagatgaacagcctgcggcctgaggataccgccgtgtactactgcgccagcaaacttgagtacaccagcaacgactacgacagctggggccagggaacactggtcacagtctcttctacgcgtggaggcggatctaaagttgctgctcttaaagaaaaggtcgcggctctgaaagaaaaagtggcggcgctcaaggagaaagttgcagctctcaaagaa

SEQ ID NO: 1808 - DNA, 549 bp, Artificial Sequence
  Synthetic Polynucloetide
atggccttaccagtgaccgccttgctcctgccgctggccttgctgctccacgccgccaggccggaagtgcagctggttgaatctggcggaggactggttcagcctggcggatctctgagactgagctgtgaagccagcggcttcgccagcgacgattacatcatcggctggttcagacaggcccctggcaaagagagagagggcgtcagctgcatcagctctaagtacgccaacaccgtgtacaccgacagcgtgaagggcagattcagactgagcagaggcaccgccaagaataccgtgtacctccagatgagcgccctgaagcctgaggataccgccgtgtactactgcgctatggacagccgcagagtgacatgccctgagatcagcaccatgcaccggaacttcgattcttggggccagggcacactggtcacagtgtcatctacgcgtggaggcggatctaaagttgctgctcttaaagaaaaggtcgcggctctgaaagaaaaagtggcggcgctcaaggagaaagttgcagctctcaaagaa

SEQ ID NO: 1809 - DNA, 549 bp, Artificial Sequence
  Synthetic Polynucloetide
atggccttaccagtgaccgccttgctcctgccgctggccttgctgctccacgccgccaggccggaagtgcagctggttgaatctggcggaggactggttcagcctggcggatctctgagactgtcttgtgccgcctctggcttcgccagcgactactatatcatcggctggttcagacaggcccctggcaaagagagagagggcgtcagctgtatcagcagcagatacgccaacaccaactacgccgacagcgtgaagggcagattcaccatcagccgggacaacgccaagaacaccgtgtacctccagatgaacagcctgaagcctgaggacaccgccgtgtactactgtgccgccgacaccagaagatacacctgtcctgacattgccaccatgcaccggaacttcgattcttggggccagggcacactggtcaccgtttcttctacgcgtggaggcggatctaaagttgctgctcttaaagaaaaggtcgcggctctgaaagaaaaagtggcggcgctcaaggagaaagttgcagctctcaaagaa

SEQ ID NO: 1810 - DNA, 537 bp, Artificial Sequence
  Synthetic Polynucloetide
atggccttaccagtgaccgccttgctcctgccgctggccttgctgctccacgccgccaggccggaagtgcaactggtggaatctggaggctctctggtgcagccagggggaagcctgagactgtcttgtgccgcttccggcttcaccttcgacgactacgccatgagctgggtgcgccaggtgccaggcaaaggcctggaatgggtgtccagcatcaactggagcggcacccacaccgattacgccgactccgtgaaaggcagattcacaatcagcagaaacaacgccaacaataccctgtacctgcagatgaactccctgaagtctgaggatacagcagtgtattattgcgccaagaactggcgggacgccggcaccacttggtttgagaaaagcggctctgccggacagggaacccaagtgacagtgtcctccacgcgtggaggcggatctaaagttgctgctcttaaagaaaaggtcgcggctctgaaagaaaaagtggcggcgctcaaggagaaagttgcagctctcaaagaa

SEQ ID NO: 1811 - DNA, 519 bp, Artificial Sequence
  Synthetic Polynucloetide
atggccttaccagtgaccgccttgctcctgccgctggccttgctgctccacgccgccaggccggaggtgcaactggtggaaagcggcggaggcctggtgcaggctggcggatctctgagactgagctgtgccgccagcggcatcaccttcagcatcaacacaatgggctggtacagacaggcccctggcaagcagagggaactggtggccctgatctccagcatcggcgacacctactacgccgacagcgtgaagggccggttcaccatcagccgggacaacgccaagaacaccgtgtacctccagatgaacagcctgaagcccgaggacaccgccgtgtactactgcaagcggttcagaacagccgcccagggcaccgattattggggccagggaacacaagtgaccgtgtcctctacgcgtggaggcggatctaaagttgctgctcttaaagaaaaggtcgcggctctgaaagaaaaagtggcggcgctcaaggagaaagttgcagctctcaaagaa

SEQ ID NO: 1812 - DNA, 522 bp, Artificial Sequence
  Synthetic Polynucloetide
atggccttaccagtgaccgccttgctcctgccgctggccttgctgctccacgccgccaggccggaagtgcaactggtggaatctgggggcggactggtgcagccaggcggaagtctgaggctgtcttgtgccgcctccggcagcatcttcggcttcaacgacatggcctggtatcggcaggctcccggaaaacagcgcgagctggtggctctgattagcagagtgggcgtgaccagcagcgccgactctgtgaagggcagattcacaatctccagagtgaacgccaaggatacagtgtacctccagatgaactctctgaaacctgaggatacagcagtgtactattgctacatggaccagcggctggacggcagcacactggcctactggggacagggaactcaagtgacagtgtctagcacgcgtggaggcggatctaaagttgctgctcttaaagaaaaggtcgcggctctgaaagaaaaagtggcggcgctcaaggagaaagttgcagctctcaaagaa

SEQ ID NO: 1813 - DNA, 525 bp, Artificial Sequence
  Synthetic Polynucloetide
atggccttaccagtgaccgccttgctcctgccgctggccttgctgctccacgccgccaggccggacgtgcaactcgtggaatccggcggaggcctggtgcagcctggcggatctctgagactgagctgtgccgccagcggctctatcggcggactgaatgccatggcctggtacagacaggcccctggcaaagaacgggaactggtggccggcatctttggcgtgggcagcaccagatacgccgacagcgtgaagggccggttcaccatcagccgggacaacagcaagaacaccgtgtacctgcagatgaacagcctgcggcccgaggataccgccgtgtactactgcagaatgtccagcgtgaccagaggctccagcgactactggggccagggaacacttgtgaccgtgtccagtctcgagacgcgtggaggcggatctaaagttgctgctcttaaagaaaaggtcgcggctctgaaagaaaaagtggcggcgctcaaggagaaagttgcagctctcaaagaa

SEQ ID NO: 1814 - DNA, 540 bp, Artificial Sequence
  Synthetic Polynucloetide
atggccttaccagtgaccgccttgctcctgccgctggccttgctgctccacgccgccaggccggaagtgcaactggtggagtccggcggtggactggtacagcctgggggttcactgcgcctgtcctgcgccgccagcggaagaacctattacctcaatgctatgggttggttccgccaggccccaggaaaggagcgcgagttcgtggcggctattgactggtccgaggggaacaaggactatgctgattccgtgaagggcaggtttaccatcagccgggataattcaaaaaatactgtttatttgcagatgaactctcttagaccagaagacactgctgtctattactgcgccgctgacacccctccttggggaccactgatttatatcgaaagctatgattcctgggggcagggcacactcgtcaccgtgagtagcacgcgtggaggcggatctaaagttgctgctcttaaagaaaaggtcgcggctctgaaagaaaaagtggcggcgctcaaggagaaagttgcagctctcaaagaa

SEQ ID NO: 1815 - DNA, 534 bp, Artificial Sequence
  Synthetic Polynucloetide
atggccttaccagtgaccgccttgctcctgccgctggccttgctgctccacgccgccaggccggaggtgcaactggtggaatccgggggaggcagcgtgcaggctgggggatcactgagactgtcttgtgctgcctccggcgacacctacggcagctattggatgggatggtttcggcaggctcccggaaaagaacgggaaggcgtggccgccatcaacagaggcggcggatacaccgtgtacgccgactctgtgaagggcagattcacaatctccagagacacagccaagaatactgtgtacctgcagatgaactccctgcgccccgacgataccgccgactattattgcgccgcttccggcgtgctgggcggcctgcatgaggactggttcaattattggggacagggaacacttgtgacagtgtccagcacgcgtggaggcggatctaaagttgctgctcttaaagaaaaggtcgcggctctgaaagaaaaagtggcggcgctcaaggagaaagttgcagctctcaaagaa

SEQ ID NO: 1816 - DNA, 531 bp, Artificial Sequence
  Synthetic Polynucloetide
atggccttaccagtgaccgccttgctcctgccgctggccttgctgctccacgccgccaggccggttcagctcgtggaaagcggtggcggaagtgtgcaggccggaggcagtttgcgcctgagctgcgctgcttccggcgatacatacgggtcttactggatgggctggtttaggcaggcacctggacaagaaagagaagctgtggccgctattaacaggggaggtggctataccgtttatgctgattccgtgaagggccgattcacaatctcccgggataacgccaaaaacactctgtacctgcagatgaactcccttaggcccgatgacacagccgattactattgtgcggcctccggcgtgctgggtggtctgcatgaggattggttcaactactgggggcaaggcaccctcgtaaccgtgagtagcacgcgtggaggcggatctaaagttgctgctcttaaagaaaaggtcgcggctctgaaagaaaaagtggcggcgctcaaggagaaagttgcagctctcaaagaa

SEQ ID NO: 1817 - DNA, 537 bp, Artificial Sequence
  Synthetic Polynucloetide
atggccttaccagtgaccgccttgctcctgccgctggccttgctgctccacgccgccaggccggaggtgcaactggtggaaagcggcggaggctctgtgcagacaggcggctctctgagactgacctgtgccgccagcggcagaaccagcagatcctatggcatgggctggttcagacaggcccctggcaaagaacgcgagttcgtgtccggcatctcttggagaggcgacagcaccggctacgccgatagcgtgaagggccggttcaccatcagccgggacaacgccaagaacaccgtggacctgcagatgaacagcctgaagcccgaggacaccgccatctactactgtgccgctgccgccggatctgcttggtacggcacactgtacgagtacgactactggggccagggcacccttgtgaccgtgtcatctacgcgtggaggcggatctaaagttgctgctcttaaagaaaaggtcgcggctctgaaagaaaaagtggcggcgctcaaggagaaagttgcagctctcaaagaa

SEQ ID NO: 1818 - DNA, 537 bp, Artificial Sequence
  Synthetic Polynucloetide
atggccttaccagtgaccgccttgctcctgccgctggccttgctgctccacgccgccaggccggaggtgcagctcgtagaatctggaggtggttccgtgcaagccggaggatcattgcgactgacctgcgcagcgagcggatctacttctcgctcttacggtatgggatggttcagacaggctcctgggaaagagcgcgagttcgtttcaggcatctcctggaggggggacagcaccggctacgcagatagcgtgaagggcaggttcacgatcagccgagacaacgccaaaaacaccgtcgatctgcaaatgaatagtctgaagcccgaagatactgcgatctactactgtgccgccgcagcagggtccacctggtacggcacactctacgagtacgactactgggggcagggaaccctggtaaccgtgtcctctacgcgtggaggcggatctaaagttgctgctcttaaagaaaaggtcgcggctctgaaagaaaaagtggcggcgctcaaggagaaagttgcagctctcaaagaa

SEQ ID NO: 1819 - DNA, 540 bp, Artificial Sequence
  Synthetic Polynucloetide
atggccttaccagtgaccgccttgctcctgccgctggccttgctgctccacgccgccaggccggatgttcagttggtggagtctggtggcggtttggtgcagccaggtggctccctgcgactcagttgtgcagcctccgggttcattctggattactacgctattggttggtttcgacaggcccccggaaaggagagagagggcgtgctctgcattgatgccagcgacgacattacctactacgccgattctgtgaagggccgcttcaccatcagtagagacaatagcaagaatacagtctacctgcagatgaactccctgcgcccagaagacactgccgtctactactgtgctacccctatcgggctttcttcctcttgccttctcgaatatgactacgattactgggggcaggggacgctggtcaccgtgtctagcacgcgtggaggcggatctaaagttgctgctcttaaagaaaaggtcgcggctctgaaagaaaaagtggcggcgctcaaggagaaagttgcagctctcaaagaa

SEQ ID NO: 1820 - DNA, 543 bp, Artificial Sequence
  Synthetic Polynucloetide
atggccttaccagtgaccgccttgctcctgccgctggccttgctgctccacgccgccaggccggaggtgcaactggtggaaagcggcggaggactggtgcaggctggcgatagcctgagactgagctgtgccgcctccggcagagccttcagcagatatgccatgggctggttcagacaggcccctggcaaagaacgcgagttcgtggccgccatcggctggggacctagcaagaccaactacgccgacagcgtgaagggccggttcaccatcagccgggacaacgccaagaacaccgtgtacctgcagatgaacaccctgaagcccgaggacaccgccgtgtactcttgcgccgccaagttcgtgaacaccgacagcacctggtcccgcagcgagatgtacacctattggggccagggcaccctcgtgaccgtgtctagtacgcgtggaggcggatctaaagttgctgctcttaaagaaaaggtcgcggctctgaaagaaaaagtggcggcgctcaaggagaaagttgcagctctcaaagaa

SEQ ID NO: 1821 - DNA, 531 bp, Artificial Sequence
  Synthetic Polynucloetide
atggccttaccagtgaccgccttgctcctgccgctggccttgctgctccacgccgccaggccggaggtgcagctggtagaatccggcgggggacttgtacaggctggtggtagtctgagactgagctgtgtggcctccggcatcagcagcagcaagcggaacatgggatggtataggcaagcccctggtaagcagagggaatccgtggctacaatcagcagcggcggcaacaaggactacaccgacgccgtgaaggacaggttcaccatctccagggacaccaccaagaacaccgtgtacctgcagatgaactccctcaagcccgaggacaccgccgtgtactactgcaagatcgaggccggcacaggctgggccaccagaagaggctacacatactgggggcagggaacactggtgaccgtgagctccacgcgtggaggcggatctaaagttgctgctcttaaagaaaaggtcgcggctctgaaagaaaaagtggcggcgctcaaggagaaagttgcagctctcaaagaa

SEQ ID NO: 1822 - DNA, 501 bp, Artificial Sequence
  Synthetic Polynucloetide
atggccttaccagtgaccgccttgctcctgccgctggccttgctgctccacgccgccaggccgcaggtgcaactggtgcagtctggcggagggctggtgcagccagggggatctctgagactgagctgtgccgccagcgacttcgacttcgccgcctacgagatgagctgggtgcgccaggctcctggacagggactggaatgggtggccatcatcagccacgacggcatcgacaagtattacaccgacagcgtgaagggccggttcaccatcagccgggacaacagcaagaacaccctgtacctgcagatgaataccctgcgggccgaggacaccgccacctactattgcctgagactgggagccgtgggccagggcacacttgtgacagtgtctagcacgcgtggaggcggatctaaagttgctgctcttaaagaaaaggtcgcggctctgaaagaaaaagtggcggcgctcaaggagaaagttgcagctctcaaagaa

SEQ ID NO: 1823 - DNA, 525 bp, Artificial Sequence
  Synthetic Polynucloetide
atggccttaccagtgaccgccttgctcctgccgctggccttgctgctccacgccgccaggccgcaggtgcaactggtgcagagcggaggcggactggtgcagcctgggggcagtctgaggctgtcttgtgccgcctccgatttcgccttcgatgattacgagatgtcttgggtgcggcaggccccaggcaaagccctggaatggatcggcgacatcaaccacagcggcaccaccatctacaaccccagcctgaagtccagagtgaccatctccagagacaactccaagaatactctgtacctgcagatgaacacactgagagccgaagatacagccatctactactgcgccagaccccactacggcgactacagcgacgccttcgacatctggggccagggaaccatggtcaccgtgtcctctacgcgtggaggcggatctaaagttgctgctcttaaagaaaaggtcgcggctctgaaagaaaaagtggcggcgctcaaggagaaagttgcagctctcaaagaa

SEQ ID NO: 1824 - DNA, 510 bp, Artificial Sequence
  Synthetic Polynucloetide
atggccttaccagtgaccgccttgctcctgccgctggccttgctgctccacgccgccaggccggaggtgcagctcgtggaatcaggcggaggtcttgtacagccaggaaattctcttcggctgtcttgcgccgcgagcgggttcaccttcagcagcttcggaatgagctgggtaagacaggcaccggggaaaggcctggagtgggtgagctcaatcagtgggagcgggtcagataccctgtacgcggattccgtgaagggcagattcacaatctctcgggacaatgctaagacaacactttaccttcagatgaactctctgcgacccgaggataccgctgtctactactgtacaataggaggttctctgtccagaagttctcaagggacactggtgaccgtctccagcacgcgtggaggcggatctaaagttgctgctcttaaagaaaaggtcgcggctctgaaagaaaaagtggcggcgctcaaggagaaagttgcagctctcaaagaa

SEQ ID NO: 1825 - DNA, 513 bp, Artificial Sequence
  Synthetic Polynucloetide
atggccttaccagtgaccgccttgctcctgccgctggccttgctgctccacgccgccaggccggaagttcaactggtggaatccggtggaggactggtgcaagcgggcggctcactgcgccttagctgtgctgccagcggcagtatcttcagcggcaatgtaatgggttggtacaggcgacaagccccaggcaaggagcgagagtgggtagccgcgattgcaagtgggggcagcatctactacagagattctgtgaaaggccgcttcactattagtcgggacaacgcaaaaaacacggtgtatctccaaatgaacagcttgaagccagaggacactgctgtctactattgtaacagtcatcccccaactctcccctattgggggctgggcactcaggtcaccgtgagttccacgcgtggaggcggatctaaagttgctgctcttaaagaaaaggtcgcggctctgaaagaaaaagtggcggcgctcaaggagaaagttgcagctctcaaagaa

SEQ ID NO: 1826 - DNA, 543 bp, Artificial Sequence
  Synthetic Polynucloetide
atggccttaccagtgaccgccttgctcctgccgctggccttgctgctccacgccgccaggccggaagtgcaactggtggaatctggagggggaagcgtgcaggcaggcggatctctgagactgtcctgcaccacatctggcagagccctgaatatgtacgtgatgggatggtttcggcaggctcccggcaacgagcgggaatttgtggccgctacaagcagcagcggcggcagcacaagctaccccgattctgtgaagggcagattcacaatctcccgcgataatgccaagaatactgtgtacctgcagatgaatagtctgaagcctgaagatacagccgcctacagatgtgccgccagcccctacgtgtccacccccaccatgaacatcctggaagagtacagatactggggcctgggaacacaagtgacagtgtccagcacgcgtggaggcggatctaaagttgctgctcttaaagaaaaggtcgcggctctgaaagaaaaagtggcggcgctcaaggagaaagttgcagctctcaaagaa

SEQ ID NO: 1827 - DNA, 528 bp, Artificial Sequence
  Synthetic Polynucloetide
atggccttaccagtgaccgccttgctcctgccgctggccttgctgctccacgccgccaggccggaggttcagttggtcgaatcaggcgggggcctcgtccaacccggcggaagcctgcggctgtcttgcgcagcaagtggtagtgtgttcaagatcaacgttatggcctggtatcgccaggctccgggaaaagggagagagctggttgcggggatcattagcggtggctccaccagctacgctgacagtgtgaagggaaggttcactatatcacgcgacaacgcaaagaatacattgtacctccagatgaatagcttgcggcccgaagacacggcagtctactattgtgcctttatcacaacagagagcgactatgacctgggccgccggtattgggggcagggaacccttgtgaccgtttcatccacgcgtggaggcggatctaaagttgctgctcttaaagaaaaggtcgcggctctgaaagaaaaagtggcggcgctcaaggagaaagttgcagctctcaaagaa

SEQ ID NO: 1828 - DNA, 963 bp, Artificial Sequence
  Synthetic Polynucloetide
atggccttaccagtgaccgccttgctcctgccgctggccttgctgctccacgccgccaggccggaggtgcaactggtggaaagcggcggaggctctgtgcagacaggcggctctctgagactgacctgtgccgccagcggcagaaccagcagatcctatggcatgggctggttcagacaggcccctggcaaagaacgcgagttcgtgtccggcatctcttggagaggcgacagcaccggctacgccgatagcgtgaagggccggttcaccatcagccgggacaacgccaagaacaccgtggacctgcagatgaacagcctgaagcccgaggacaccgccatctactactgtgccgctgccgccggatctgcttggtacggcacactgtacgagtacgactactggggccagggcacccttgtgaccgtgtcatctctcgagggcggaggcggaagtggaggcggaggatctggcggcggaggctctttcgaagaggtgcaactggtggaatccgggggaggcagcgtgcaggctgggggatcactgagactgtcttgtgctgcctccggcgacacctacggcagctattggatgggatggtttcggcaggctcccggaaaagaacgggaaggcgtggccgccatcaacagaggcggcggatacaccgtgtacgccgactctgtgaagggcagattcacaatctccagagacacagccaagaatactgtgtacctgcagatgaactccctgcgccccgacgataccgccgactattattgcgccgcttccggcgtgctgggcggcctgcatgaggactggttcaattattggggacagggaacacttgtgacagtgtccagcacgcgtggaggcggatctaaagttgctgctcttaaagaaaaggtcgcggctctgaaagaaaaagtggcggcgctcaaggagaaagttgcagctctcaaagaa

SEQ ID NO: 1829 - DNA, 1020 bp, Artificial Sequence
  Synthetic Polynucloetide
atggccttaccagtgaccgccttgctcctgccgctggccttgctgctccacgccgccaggccggaggtgcagctcgtagaatctggaggtggttccgtgcaagccggaggatcattgcgactgacctgcgcagcgagcggatctacttctcgctcttacggtatgggatggttcagacaggctcctgggaaagagcgcgagttcgtttcaggcatctcctggaggggggacagcaccggctacgcagatagcgtgaagggcaggttcacgatcagccgagacaacgccaaaaacaccgtcgatctgcaaatgaatagtctgaagcccgaagatactgcgatctactactgtgccgccgcagcagggtccacctggtacggcacactctacgagtacgactactgggggcagggaaccctggtaaccgtgtcctctctcgagggaggaggcggctccgggggaggcggaagtggaggcggaggatctgggtctggaggaagcggatctggaggctcagggtcagggggctcaggcagtggaggctctttcgaagttcagctcgtggaaagcggtggcggaagtgtgcaggccggaggcagtttgcgcctgagctgcgctgcttccggcgatacatacgggtcttactggatgggctggtttaggcaggcacctggacaagaaagagaagctgtggccgctattaacaggggaggtggctataccgtttatgctgattccgtgaagggccgattcacaatctcccgggataacgccaaaaacactctgtacctgcagatgaactcccttaggcccgatgacacagccgattactattgtgcggcctccggcgtgctgggtggtctgcatgaggattggttcaactactgggggcaaggcaccctcgtaaccgtgagtagcacgcgtggaggcggatctaaagttgctgctcttaaagaaaaggtcgcggctctgaaagaaaaagtggcggcgctcaaggagaaagttgcagctctcaaagaa

SEQ ID NO: 1830 - DNA, 990 bp, Artificial Sequence
  Synthetic Polynucloetide
atggccttaccagtgaccgccttgctcctgccgctggccttgctgctccacgccgccaggccggaggtgcaactggtggaaagcggcggaggcctggtgcaggctggcggatctctgagactgagctgtgccgccagcggcatcaccttcagcatcaacacaatgggctggtacagacaggcccctggcaagcagagggaactggtggccctgatctccagcatcggcgacacctactacgccgacagcgtgaagggccggttcaccatcagccgggacaacgccaagaacaccgtgtacctccagatgaacagcctgaagcccgaggacaccgccgtgtactactgcaagcggttcagaacagccgcccagggcaccgattattggggccagggaacacaagtgaccgtgtcctctctcgagggaggaggcggctccgggggaggcggaagtggaggcggaggatctgggtctggaggaagcggatctggaggctcagggtcagggggctcaggcagtggaggctctttcgaagtgcaactggtggaatctgggggcggactggtgcagccaggcggaagtctgaggctgtcttgtgccgcctccggcagcatcttcggcttcaacgacatggcctggtatcggcaggctcccggaaaacagcgcgagctggtggctctgattagcagagtgggcgtgaccagcagcgccgactctgtgaagggcagattcacaatctccagagtgaacgccaaggatacagtgtacctccagatgaactctctgaaacctgaggatacagcagtgtactattgctacatggaccagcggctggacggcagcacactggcctactggggacagggaactcaagtgacagtgtctagcacgcgtggaggcggatctaaagttgctgctcttaaagaaaaggtcgcggctctgaaagaaaaagtggcggcgctcaaggagaaagttgcagctctcaaagaa

SEQ ID NO: 1831 - DNA, 891 bp, Artificial Sequence; identical to SEQ ID NO: 1646
  Synthetic Polynucloetide

SEQ ID NO: 1832 - DNA, 1005 bp, Artificial Sequence
  Synthetic Polynucloetide
atggccttaccagtgaccgccttgctcctgccgctggccttgctgctccacgccgccaggccggacgtgcaactcgtggaatccggcggaggcctggtgcagcctggcggatctctgagactgagctgtgccgccagcggctctatcggcggactgaatgccatggcctggtacagacaggcccctggcaaagaacgggaactggtggccggcatctttggcgtgggcagcaccagatacgccgacagcgtgaagggccggttcaccatcagccgggacaacagcaagaacaccgtgtacctgcagatgaacagcctgcggcccgaggataccgccgtgtactactgcagaatgtccagcgtgaccagaggctccagcgactactggggccagggaacacttgtgaccgtgtccagtctcgagggaggaggcggctccgggggaggcggaagtggaggcggaggatctgggtctggaggaagcggatctggaggctcagggtcagggggctcaggcagtggaggctctttcgaagtgcaactggtggaatctggaggctctctggtgcagccagggggaagcctgagactgtcttgtgccgcttccggcttcaccttcgacgactacgccatgagctgggtgcgccaggtgccaggcaaaggcctggaatgggtgtccagcatcaactggagcggcacccacaccgattacgccgactccgtgaaaggcagattcacaatcagcagaaacaacgccaacaataccctgtacctgcagatgaactccctgaagtctgaggatacagcagtgtattattgcgccaagaactggcgggacgccggcaccacttggtttgagaaaagcggctctgccggacagggaacccaagtgacagtgtcctccacgcgtggaggcggatctaaagttgctgctcttaaagaaaaggtcgcggctctgaaagaaaaagtggcggcgctcaaggagaaagttgcagctctcaaagaa

SEQ ID NO: 1833 - DNA, 1029 bp, Artificial Sequence
  Synthetic Polynucloetide
atggccttaccagtgaccgccttgctcctgccgctggccttgctgctccacgccgccaggccggatgttcagttggtggagtctggtggcggtttggtgcagccaggtggctccctgcgactcagttgtgcagcctccgggttcattctggattactacgctattggttggtttcgacaggcccccggaaaggagagagagggcgtgctctgcattgatgccagcgacgacattacctactacgccgattctgtgaagggccgcttcaccatcagtagagacaatagcaagaatacagtctacctgcagatgaactccctgcgcccagaagacactgccgtctactactgtgctacccctatcgggctttcttcctcttgccttctcgaatatgactacgattactgggggcaggggacgctggtcaccgtgtctagcctcgagggaggtagcggctccgggggaggcggaagtggaggcggaggatctgggtctggaggaagcggatctggaggctcagggtcagggggctcaggcagtggaggctctttcgaagtgcaactggtggagtccggcggtggactggtacagcctgggggttcactgcgcctgtcctgcgccgccagcggaagaacctattacctcaatgctatgggttggttccgccaggccccaggaaaggagcgcgagttcgtggcggctattgactggtccgaggggaacaaggactatgctgattccgtgaagggcaggtttaccatcagccgggataattcaaaaaatactgtttatttgcagatgaactctcttagaccagaagacactgctgtctattactgcgccgctgacacccctccttggggaccactgatttatatcgaaagctatgattcctgggggcagggcacactcgtcaccgtgagtagcacgcgtggaggcggatctaaagttgctgctcttaaagaaaaggtcgcggctctgaaagaaaaagtggcggcgctcaaggagaaagttgcagctctcaaagaa

SEQ ID NO: 1834 - DNA, 978 bp, Artificial Sequence
  Synthetic Polynucloetide
atggccttaccagtgaccgccttgctcctgccgctggccttgctgctccacgccgccaggccgcaggtgcaactggtgcagtctggcggagggctggtgcagccagggggatctctgagactgagctgtgccgccagcgacttcgacttcgccgcctacgagatgagctgggtgcgccaggctcctggacagggactggaatgggtggccatcatcagccacgacggcatcgacaagtattacaccgacagcgtgaagggccggttcaccatcagccgggacaacagcaagaacaccctgtacctgcagatgaataccctgcgggccgaggacaccgccacctactattgcctgagactgggagccgtgggccagggcacacttgtgacagtgtctagcctcgagggaggaggcggctccgggggaggcggaagtggaggcggaggatctgggtctggaggaagcggatctggaggctcagggtcagggggctcaggcagtggaggcagcttcgaacaggtgcaactggtgcagagcggaggcggactggtgcagcctgggggcagtctgaggctgtcttgtgccgcctccgatttcgccttcgatgattacgagatgtcttgggtgcggcaggccccaggcaaagccctggaatggatcggcgacatcaaccacagcggcaccaccatctacaaccccagcctgaagtccagagtgaccatctccagagacaactccaagaatactctgtacctgcagatgaacacactgagagccgaagatacagccatctactactgcgccagaccccactacggcgactacagcgacgccttcgacatctggggccagggaaccatggtcaccgtgtcctctacgcgtggaggcggatctaaagttgctgctcttaaagaaaaggtcgcggctctgaaagaaaaagtggcggcgctcaaggagaaagttgcagctctcaaagaa

SEQ ID NO: 1835 - DNA, 522 bp, Artificial Sequence
  Synthetic Polynucloetide
atggccttaccagtgaccgccttgctcctgccgctggccttgctgctccacgccgccaggccgcaagtgaagctggaagagtctggcggaggactggtgcaggctggaagaagcctgagactgtcttgtgccgccagcgagcacacctttagctctcacgtgatgggctggttcagacaggcccctggcaaagaaagggaaagcgtggccgttatcggctggcgggatattagcaccagctacgccgatagcgtgaagggcagattcaccatcagccgggacaacgccaagaaaaccctgtacctccagatgaacagcctgaagccagaggacaccgccgtgtactactgcgccgccagaagaattgacgccgccgactttgattcttggggccagggaacccaagtgaccgtttctagcacgcgtggaggcggatctaaagttgctgctcttaaagaaaaggtcgcggctctgaaagaaaaagtggcggcgctcaaggagaaagttgcagctctcaaagaa

SEQ ID NO: 1836 - DNA, 519 bp, Artificial Sequence
  Synthetic Polynucloetide
atggccttaccagtgaccgccttgctcctgccgctggccttgctgctccacgccgccaggccggaagtgcaactggttgaatccggtggcggcctggtgcaagcaggcggatctctcagacttagctgtgccgcctccggcagaaccttcacaatgggatggtttaggcaggctccagggaaagagagagagttcgtcgccgccatctctctgtctcccacactggcctactacgccgagtctgtgaaaggccggttcaccatctccagagataatgccaagaacaccgtggtgctgcaaatgaactctctgaaacccgaggatacagccctgtactattgtgccgctgaccggaagtccgtgatgagcatcagacccgattactggggacagggcacacaagtcacagtgtcctctacgcgtggaggcggatctaaagttgctgctcttaaagaaaaggtcgcggctctgaaagaaaaagtggcggcgctcaaggagaaagttgcagctctcaaagaa

SEQ ID NO: 1837 - DNA, 921 bp, Artificial Sequence
  Synthetic Polynucloetide
atggccttaccagtgaccgccttgctcctgccgctggccttgctgctccacgccgccaggccgcaagtgaagctggaagagtctggcggaggactggtgcaggctggaagaagcctgagactgtcttgtgccgccagcgagcacacctttagctctcacgtgatgggctggttcagacaggcccctggcaaagaaagggaaagcgtggccgttatcggctggcgggatattagcaccagctacgccgatagcgtgaagggcagattcaccatcagccgggacaacgccaagaaaaccctgtacctccagatgaacagcctgaagccagaggacaccgccgtgtactactgcgccgccagaagaattgacgccgccgactttgattcttggggccagggaacccaagtgaccgtttctagcggaggcggtggaagtggcggcggtggttcaggcggcggaggatctgaagtgcaactggttgaatccggtggcggcctggtgcaagcaggcggatctctcagacttagctgtgccgcctccggcagaaccttcacaatgggatggtttaggcaggctccagggaaagagagagagttcgtcgccgccatctctctgtctcccacactggcctactacgccgagtctgtgaaaggccggttcaccatctccagagataatgccaagaacaccgtggtgctgcaaatgaactctctgaaacccgaggatacagccctgtactattgtgccgctgaccggaagtccgtgatgagcatcagacccgattactggggacagggcacacaagtcacagtgtcctctacgcgtggaggcggatctaaagttgctgctcttaaagaaaaggtcgcggctctgaaagaaaaagtggcggcgctcaaggagaaagttgcagctctcaaagaa

SEQ ID NO: 1838 - DNA, 513 bp, Artificial Sequence
  Synthetic Polynucloetide
atggccttaccagtgaccgccttgctcctgccgctggccttgctgctccacgccgccaggccggaggtgcaactggttgagtctggcggaggactggttcaggcaggcggatctctgagactgagctgtatcgccaccggcaaggtgttcagcatctacgacatgggctggtacagacaggcccctggcaagcagagagagctggttgccgagatcacaagcagcggcaccacacactacgacgacttcgtgtccggcagattcaccatcagccgggacaacgccaagaacaccgtgtacctccagatgaacaccctgaaggccgaggacaccgccgtgtactactgtagagccaaccacgtgttcggcggcagctattggggacagggaacccaagtgacagtgtctagtacgcgtggaggcggatctaaagttgctgctcttaaagaaaaggtcgcggctctgaaagaaaaagtggcggcgctcaaggagaaagttgcagctctcaaagaa

SEQ ID NO: 1839 - DNA, 531 bp, Artificial Sequence
  Synthetic Polynucloetide
atggccttaccagtgaccgccttgctcctgccgctggccttgctgctccacgccgccaggccgcaggtgcagcttgttgaaagcggaggtggcctggttcaacctggcggaagcctgagactgtcctgtgaagccagcggctttaccctggactactacgccatcggctggtttagacaagctcccggcaaagagagagagggcgtcatctgcatcagcagatccgacggcagcacctactatgccgacagcgtgaagggacgcttcaccatctccagagacaatgccaaaaagacggtctacctgcaaatgatctccctcaagcctgaggataccgccgcctactattgtgccgctggcgctgattgcagcggctacctgagagactacgagttcagaggccagggcacacaagtgaccgtcagctctacgcgtggaggcggatctaaagttgctgctcttaaagaaaaggtcgcggctctgaaagaaaaagtggcggcgctcaaggagaaagttgcagctctcaaagaa

SEQ ID NO: 1840 - DNA, 900 bp, Artificial Sequence
  Synthetic Polynucloetide
atggccttaccagtgaccgccttgctcctgccgctggccttgctgctccacgccgccaggccggaggtgcaactggttgagtctggcggaggactggttcaggcaggcggatctctgagactgagctgtatcgccaccggcaaggtgttcagcatctacgacatgggctggtacagacaggcccctggcaagcagagagagctggttgccgagatcacaagcagcggcaccacacactacgacgacttcgtgtccggcagattcaccatcagccgggacaacgccaagaacaccgtgtacctccagatgaacaccctgaaggccgaggacaccgccgtgtactactgtagagccaaccacgtgttcggcggcagctattggggacagggaacccaagtgacagtgtctagtgaggtggccgctttggagaaacaggtgcagcttgttgaaagcggaggtggcctggttcaacctggcggaagcctgagactgtcctgtgaagccagcggctttaccctggactactacgccatcggctggtttagacaagctcccggcaaagagagagagggcgtcatctgcatcagcagatccgacggcagcacctactatgccgacagcgtgaagggacgcttcaccatctccagagacaatgccaaaaagacggtctacctgcaaatgatctccctcaagcctgaggataccgccgcctactattgtgccgctggcgctgattgcagcggctacctgagagactacgagttcagaggccagggcacacaagtgaccgtcagctctacgcgtggaggcggatctaaagttgctgctcttaaagaaaaggtcgcggctctgaaagaaaaagtggcggcgctcaaggagaaagttgcagctctcaaagaa

SEQ ID NO: 1841 - DNA, 549 bp, Artificial Sequence
  Synthetic Polynucloetide
atggccttaccagtgaccgccttgctcctgccgctggccttgctgctccacgccgccaggccgcaagtgaagctggaagagtctggcggcagactggtgcagcctagaggaagcctgagactgtcttgtgccggcagcggcagaacctttagcacatacggcatggcctggttcagacaggcccctggaaaagagagagagttcgtcgccagcaaggccagcatgaactactccggcaggacctactacgccgacagcgtgaagggcagattcacaatcgccagagacaacgccaagaacatggtgttcctccagatgaacaatctgaagcccgaggacaccgccgtgtactattgtgccgctggcacaggctgtagcacctacggctgtttcgacgcccagatcatcgactactggggcaagggcacactggtcacagtttctagcacgcgtggaggcggatctaaagttgctgctcttaaagaaaaggtcgcggctctgaaagaaaaagtggcggcgctcaaggagaaagttgcagctctcaaagaa

SEQ ID NO: 1842 - DNA, 522 bp, Artificial Sequence
  Synthetic Polynucloetide
atggccttaccagtgaccgccttgctcctgccgctggccttgctgctccacgccgccaggccgcaagtcaaactggaagaaagcggtggcggcctggtgcaacctggcgaatctctgagactgagctgtagcgccagcggctccatcttcaaggtgttcagagtgttcgccatgagctggtacaggcaaggccctggcaagcagagagagctggtcgcctctatcagcagcggcgagacaaccacatacgccgactctgtgaaaggccggttcaccatcagccgggataatgccaagaataccgcctatctccagatggactccctgaagcctgaagatacagctgtgtactactgcaacgccgaccataccttcaccggcgatttttggggccagggaacccaagtgaccgtgtctagtacgcgtggaggcggatctaaagttgctgctcttaaagaaaaggtcgcggctctgaaagaaaaagtggcggcgctcaaggagaaagttgcagctctcaaagaa

SEQ ID NO: 1843 - DNA, 927 bp, Artificial Sequence
  Synthetic Polynucloetide
atggccttaccagtgaccgccttgctcctgccgctggccttgctgctccacgccgccaggccgcaagtgaagctggaagagtctggcggcagactggtgcagcctagaggaagcctgagactgtcttgtgccggcagcggcagaacctttagcacatacggcatggcctggttcagacaggcccctggaaaagagagagagttcgtcgccagcaaggccagcatgaactactccggcaggacctactacgccgacagcgtgaagggcagattcacaatcgccagagacaacgccaagaacatggtgttcctccagatgaacaatctgaagcccgaggacaccgccgtgtactattgtgccgctggcacaggctgtagcacctacggctgtttcgacgcccagatcatcgactactggggcaagggcacactggtcacagtttctagcgaggtggccgctttggagaaacaagtcaaactggaagaaagcggtggcggcctggtgcaacctggcgaatctctgagactgagctgtagcgccagcggctccatcttcaaggtgttcagagtgttcgccatgagctggtacaggcaaggccctggcaagcagagagagctggtcgcctctatcagcagcggcgagacaaccacatacgccgactctgtgaaaggccggttcaccatcagccgggataatgccaagaataccgcctatctccagatggactccctgaagcctgaagatacagctgtgtactactgcaacgccgaccataccttcaccggcgatttttggggccagggaacccaagtgaccgtgtctagtacgcgtggaggcggatctaaagttgctgctcttaaagaaaaggtcgcggctctgaaagaaaaagtggcggcgctcaaggagaaagttgcagctctcaaagaa

SEQ ID NO: 1844 - DNA, 516 bp, Artificial Sequence
  Synthetic Polynucloetide
atggccttaccagtgaccgccttgctcctgccgctggccttgctgctccacgccgccaggccgcaagtgaagctggaagagtctggcggagagctggttcaacctggcggacctctgagactgtcttgtgccgccagcggcaacatcttcagcatcaaccggatgggctggtacagacaggcccctggaaaacagagagccttcgtcgcctctatcaccgtgcggggcatcaccaattacgccgactctgtgaagggcagattcaccatcagcgtggacaagagcaagaacaccatctacctccagatgaacgccctgaagcctgaggacaccgccgtgtactactgcaatgccgtgtccagcaacagggaccccgattattggggccagggcacccaagtgacagtgtctagtacgcgtggaggcggatctaaagttgctgctcttaaagaaaaggtcgcggctctgaaagaaaaagtggcggcgctcaaggagaaagttgcagctctcaaagaa

SEQ ID NO: 1845 - DNA, 552 bp, Artificial Sequence
  Synthetic Polynucloetide
atggccttaccagtgaccgccttgctcctgccgctggccttgctgctccacgccgccaggccgcctgttcaactggttgaatctggcggcggactggtgcaggctggcgatagtctcagactgagctgtgccgcctccggcagaacatttggcatcggcacaatgggatggttccggcagcctcctggaaaagaacgcgaatttgtggccgccatcagatggtctacaggcggcaccagatacgccgacagcgtgaaaggccggtttaccatcagcagagacaacgccaagctgaccgtggatctccagatggatagcctgaaaccagaggatacagccgtctattactgcgccgctgacaggctgagcctggatctgtctggcagataccactacaaccctgccgtgtacgactactggggacagggaacacaagtcaccgtgtcctctacgcgtggaggcggatctaaagttgctgctcttaaagaaaaggtcgcggctctgaaagaaaaagtggcggcgctcaaggagaaagttgcagctctcaaagaa

SEQ ID NO: 1846 - DNA, 948 bp, Artificial Sequence
  Synthetic Polynucloetide
atggccttaccagtgaccgccttgctcctgccgctggccttgctgctccacgccgccaggccgcaagtgaagctggaagagtctggcggagagctggttcaacctggcggacctctgagactgtcttgtgccgccagcggcaacatcttcagcatcaaccggatgggctggtacagacaggcccctggaaaacagagagccttcgtcgcctctatcaccgtgcggggcatcaccaattacgccgactctgtgaagggcagattcaccatcagcgtggacaagagcaagaacaccatctacctccagatgaacgccctgaagcctgaggacaccgccgtgtactactgcaatgccgtgtccagcaacagggaccccgattattggggccagggcacccaagtgacagtgtctagtggaggcggtggaagtggcggcggtggttcaggcggcggaggatctcctgttcaactggttgaatctggcggcggactggtgcaggctggcgatagtctcagactgagctgtgccgcctccggcagaacatttggcatcggcacaatgggatggttccggcagcctcctggaaaagaacgcgaatttgtggccgccatcagatggtctacaggcggcaccagatacgccgacagcgtgaaaggccggtttaccatcagcagagacaacgccaagctgaccgtggatctccagatggatagcctgaaaccagaggatacagccgtctattactgcgccgctgacaggctgagcctggatctgtctggcagataccactacaaccctgccgtgtacgactactggggacagggaacacaagtcaccgtgtcctctacgcgtggaggcggatctaaagttgctgctcttaaagaaaaggtcgcggctctgaaagaaaaagtggcggcgctcaaggagaaagttgcagctctcaaagaa

SEQ ID NO: 1847 - DNA, 522 bp, Artificial Sequence
  Synthetic Polynucloetide
atggccttaccagtgaccgccttgctcctgccgctggccttgctgctccacgccgccaggccggccgtgcaactggttgaatctggcggaggactggtgcaggctggcgattctctgagactgacctgtacagccagcggcagagccttcagcacctacttcatggcctggttcagacaggcccctggcaaagagagagagttcgtcgccggaatcgcttggagcggaggctctacagcctacgccgattctgtgaagggcagattcaccatcagccgggacaacgccaagaacaccgtgtacctccagatgaacagcctgaagtccgaggacaccgccgtgtactactgtgccagcagaggcatcgaggtggaagagtttggagcctggggccagggaacccaagtgacagtttcttctacgcgtggaggcggatctaaagttgctgctcttaaagaaaaggtcgcggctctgaaagaaaaagtggcggcgctcaaggagaaagttgcagctctcaaagaa

SEQ ID NO: 1848 - DNA, 525 bp, Artificial Sequence
  Synthetic Polynucloetide
atggccttaccagtgaccgccttgctcctgccgctggccttgctgctccacgccgccaggccgcaggttcaactggtggaaagtggcggtggcttggtgcaagcaggcggctctcttagactgtcttgtgctgcctctggcggcaccctgagcaagaataccgtggcatggtttaggcaggctcccggaaaagagcggggctttgtcgccagcatcacctgggatggcagaaccacctactacgccgacagcgtgaaaggccggttcaccatctccagagataatgccaagaatacggtctacttgcaaatgaactccctgaagcctgaagatacagccgtgtacgtgtgcgccgatctcggcaaatggcctgctggacctgccgattattggggacagggcacacaagtcaccgtgtcctctacgcgtggaggcggatctaaagttgctgctcttaaagaaaaggtcgcggctctgaaagaaaaagtggcggcgctcaaggagaaagttgcagctctcaaagaa

SEQ ID NO: 1849 - DNA, 2262 bp, Artificial Sequence
  Synthetic Polynucloetide
atggccttaccagtgaccgccttgctcctgccgctggccttgctgctccacgccgccaggccggaagtgcagctggttgaatctggcggaggactggttcagcctggcggatctctgagactgtcttgtgccgccagcggcttcagcttcagcgacttttggatgagctgggtccgacaggcccctggcaaaggacttgaatgggtcgccacaatcagccaggccggcagcgagaaggactacgtggactctgtgaagggcagattcaccatcagccgggacaacgccaagaagtccctgtacctccagatgaacagcctgagagccgaggacaccgccgtgtactattgtgcctctggcgtgtacagcttcgactacagaggccagggcaccctggtcacagtctcttctggtaccggcggaggcggatctggcggcggaggtagcggtggcggaggatctgaattcgacatccagatgacacagactacatcctccctgtctgcctctctgggagacagagtcaccatcagttgcagggcaagtcaggacattagtaagtacctgaactggtatcagcagaaaccagatggaactgttaaactcctgatctaccatacatcaagattacactcaggagtcccatcaaggttcagtggcagtgggtctggaacagattattctctcaccattagcaacctggagcaagaagatattgccacttacttttgccaacagggtaatacgcttccgtacacgttcggaggggggaccaagctggagatcacactcgaggacctgaagaacgtgttcccacctgaggtggccgtgttcgagcctagcgaggccgagatcagccacacccagaaagccaccctcgtgtgcctggctaccggcttctaccccgaccatgtggaactgtcttggtgggtcaacggcaaagaggtgcacagcggcgtgtgtaccgacccccagccactgaaagaacagcccgccctgaacgacagccggtactgcctgagcagcagactgagagtgtccgccaccttctggcagaacccccggaaccacttcagatgccaggtgcagttctacggcctgagcgagaacgacgagtggacccaggacagagccaagcccgtgacccagatcgtgtctgccgaagcctggggcagagccgattgcggctttaccagcgagagctaccagcagggcgtgctgagcgccaccatcctgtacgagatcctgctgggcaaggccaccctgtacgccgtgctggtgtctgccctggtgctgatggctatggtcaagcggaaggacagccggggaagggccaagcgatctggatctggagcaacaaacttctcactactcaaacaagcaggtgacgtggaggagaatcccgggcctactagtatggactggatttggcgcatccttttccttgtcggcgctgctaccggcgcgcattccttcgaagtgaaactgcaggagtcaggacctggcctggtggcgccctcacagagcctgtccgtcacatgcactgtctcaggggtctcattacccgactatggtgtaagctggattcgccagcctccacgaaagggtctggagtggctgggagtaatatggggtagtgaaaccacatactataattcagctctcaaatccagactgaccatcatcaaggacaactccaagagccaagttttcttaaaaatgaacagtctgcaaactgatgacacagccatttactactgtgccaaacattattactacggtggtagctatgctatggactactggggccaaggaacctcagtcaccgtctcctcaacgcgtatccagaaccctgatcctgccgtgtaccagctgcgggatagcaagagcagcgacaagagcgtgtgtctgttcaccgacttcgacagccagaccaacgtgtcccagagcaaggactccgacgtgtacatcaccgataagtgcgtgctggacatgcggagcatggacttcaagagcaactccgccgtggcctggtccaacaagtccgatttcgcctgcgccaacgccttcaacaacagcattatccccgaggacacattcttcccaagccccgagagcagctgcgacgtgaagctggtggaaaagagcttcgagacagacaccaacctgaacttccagaacctgagcgtgatcggcttcagaatcctgctgctgaaagtggccggctttaacctgctgatgaccctgcggctgtggtccagc

SEQ ID NO: 1850 - DNA, 2265 bp, Artificial Sequence
  Synthetic Polynucloetide
atggccttaccagtgaccgccttgctcctgccgctggccttgctgctccacgccgccaggccggaagtgcagctggttgaatctggcggaggactggttcagcctggcggatctctgagactgtcttgtgccgccagcggcttcagcttcagcgacttttggatgagctgggtccgacaggcccctggcaaaggacttgaatgggtcgccacaatcagccaggccggcagcgagaaggactacgtggactctgtgaagggcagattcaccatcagccgggacaacgccaagaagtccctgtacctccagatgaacagcctgagagccgaggacaccgccgtgtactattgtgcctctggcgtgtacagcttcgactacagaggccagggcaccctggtcacagtctcttctggtaccggcggaggcggatctggcggcggaggtagcggtggcggaggatctgaattcgagatcgtgatgacccagagccctgccaccctgtctctgagccctggcgaaagagccaccctgagctgtagagccagccaggacatcagcaagtacctgaactggtatcagcagaagcccggccaggcccccagactgctgatctaccacaccagcagactgcacagcggcatccccgccagattttctggctctggcagcggcaccgactacaccctgacaatcagcagcctccagcccgaggacttcgccgtgtacttctgtcagcaaggcaacaccctgccctacaccttcggccagggcaccaagctggaaatcaagctcgaggacctgaagaacgtgttcccacctgaggtggccgtgttcgagcctagcgaggccgagatcagccacacccagaaagccaccctcgtgtgcctggctaccggcttctaccccgaccatgtggaactgtcttggtgggtcaacggcaaagaggtgcacagcggcgtgtgtaccgacccccagccactgaaagaacagcccgccctgaacgacagccggtactgcctgagcagcagactgagagtgtccgccaccttctggcagaacccccggaaccacttcagatgccaggtgcagttctacggcctgagcgagaacgacgagtggacccaggacagagccaagcccgtgacccagatcgtgtctgccgaagcctggggcagagccgattgcggctttaccagcgagagctaccagcagggcgtgctgagcgccaccatcctgtacgagatcctgctgggcaaggccaccctgtacgccgtgctggtgtctgccctggtgctgatggctatggtcaagcggaaggacagccggggaagggccaagcgatctggatctggagcaacaaacttctcactactcaaacaagcaggtgacgtggaggagaatcccgggcctactagtatggactggatttggcgcatccttttccttgtcggcgctgctaccggcgcgcattccttcgaacaggtgcaactccaggaatctggccctggcctcgtgaagcccagcgagacactgagcctgacctgtaccgtgtccggcgtgtccctgcctgactatggcgtgtcctggatcagacagccccctggcaagggcctggaatggatcggagtgatttggggcagcgaaaccacctactacaacagctccctgaagtccagagtgaccatctccaaggacaactccaagaaccaggtgtccctgaagctgagcagcgtgacagccgccgacaccgccgtgtattactgcgccaagcactactactacggcggcagctacgctatggactactggggccagggaaccctcgtgaccgtgtctagtacgcgtatccagaaccctgatcctgccgtgtaccagctgcgggatagcaagagcagcgacaagagcgtgtgtctgttcaccgacttcgacagccagaccaacgtgtcccagagcaaggactccgacgtgtacatcaccgataagtgcgtgctggacatgcggagcatggacttcaagagcaactccgccgtggcctggtccaacaagtccgatttcgcctgcgccaacgccttcaacaacagcattatccccgaggacacattcttcccaagccccgagagcagctgcgacgtgaagctggtggaaaagagcttcgagacagacaccaacctgaacttccagaacctgagcgtgatcggcttcagaatcctgctgctgaaagtggccggctttaacctgctgatgaccctgcggctgtggtccagc

SEQ ID NO: 1851 - DNA, 2268 bp, Artificial Sequence
  Synthetic Polynucloetide
atggccttaccagtgaccgccttgctcctgccgctggccttgctgctccacgccgccaggccggaagtgcagctggttgaatctggcggaggactggttcagcctggcggatctctgagactgtcttgtgccgccagcggcttcagcttcagcgacttttggatgagctgggtccgacaggcccctggcaaaggacttgaatgggtcgccacaatcagccaggccggcagcgagaaggactacgtggactctgtgaagggcagattcaccatcagccgggacaacgccaagaagtccctgtacctccagatgaacagcctgagagccgaggacaccgccgtgtactattgtgcctctggcgtgtacagcttcgactacagaggccagggcaccctggtcacagtctcttctggtaccggcggaggcggatctggcggcggaggtagcggtggcggaggatctgaattcgacgagatcgtgctgacacagagccccgccaccctgtcactgtctccaggcgaaagagccaccctgagctgtagcgccagcagcagcgtgtcctacatgcactggtatcagcagaagcccggccaggcccccagactgctgatctacgataccagcaagctggcctccggcatccccgccagattttctggcagcggctccggcaccgacttcaccctgacaatcagcagcctggaacccgaggacgtggccgtgtactactgttttcaaggcagcgtgtaccccttcaccttcggccagggcaccaagctggaaatcaagagactcgaggacctgaagaacgtgttcccacctgaggtggccgtgttcgagcctagcgaggccgagatcagccacacccagaaagccaccctcgtgtgcctggctaccggcttctaccccgaccatgtggaactgtcttggtgggtcaacggcaaagaggtgcacagcggcgtgtgtaccgacccccagccactgaaagaacagcccgccctgaacgacagccggtactgcctgagcagcagactgagagtgtccgccaccttctggcagaacccccggaaccacttcagatgccaggtgcagttctacggcctgagcgagaacgacgagtggacccaggacagagccaagcccgtgacccagatcgtgtctgccgaagcctggggcagagccgattgcggctttaccagcgagagctaccagcagggcgtgctgagcgccaccatcctgtacgagatcctgctgggcaaggccaccctgtacgccgtgctggtgtctgccctggtgctgatggctatggtcaagcggaaggacagccggggaagggccaagcgatctggatctggagcaacaaacttctcactactcaaacaagcaggtgacgtggaggagaatcccgggcctactagtatggactggatttggcgcatccttttccttgtcggcgctgctaccggcgcgcattccttcgaacaggtgcagctccaggaatctggccctggcctcgtgaagcctagccagaccctgagcctgacctgtaccgtgtctggcggcagcatcagcacaagcggcatgggcgtgggctggatcagacagcaccctggcaagggcctggaatggatcggccacatttggtgggacgacgacaagcggtacaaccccgccctgaagtccagagtgaccatcagcgtggacaccagcaagaaccagttcagcctgaagctgagcagcgtgacagccgccgataccgccgtgtattattgcgcccggatggaactgtggtcctactacttcgactactggggccagggaaccctcgtgaccgtgtctagtacgcgtatccagaaccctgatcctgccgtgtaccagctgcgggatagcaagagcagcgacaagagcgtgtgtctgttcaccgacttcgacagccagaccaacgtgtcccagagcaaggactccgacgtgtacatcaccgataagtgcgtgctggacatgcggagcatggacttcaagagcaactccgccgtggcctggtccaacaagtccgatttcgcctgcgccaacgccttcaacaacagcattatccccgaggacacattcttcccaagccccgagagcagctgcgacgtgaagctggtggaaaagagcttcgagacagacaccaacctgaacttccagaacctgagcgtgatcggcttcagaatcctgctgctgaaagtggccggctttaacctgctgatgaccctgcggctgtggtccagc

SEQ ID NO: 1852 - DNA, 2262 bp, Artificial Sequence
  Synthetic Polynucloetide
atggccttaccagtgaccgccttgctcctgccgctggccttgctgctccacgccgccaggccggaagtgcagctggttgaatctggcggaggactggttcagcctggcggatctctgagactgtcttgtgccgccagcggcttcagcttcagcgacttttggatgagctgggtccgacaggcccctggcaaaggacttgaatgggtcgccacaatcagccaggccggcagcgagaaggactacgtggactctgtgaagggcagattcaccatcagccgggacaacgccaagaagtccctgtacctccagatgaacagcctgagagccgaggacaccgccgtgtactattgtgcctctggcgtgtacagcttcgactacagaggccagggcaccctggtcacagtctcttctggtaccggcggaggcggatctggcggcggaggtagcggtggcggaggatctgaattcgactacatccacgtgacacagagccctagcagcctgtccgtgtccatcggcgatagagtgaccatcaactgccagacctctcaaggcgtgggcagcgacctgcactggtatcagcacaaacctggcagagcccctaagctgctgatccaccatgccagctctgtggaagatggcgtgcccagcagattttccggcaccggatttcacaccagcttcaacctgacaatcaacgacctccaggccgacgacatcggcacctactactgtcaagtgctccagagcttcggcagaggcagcagactggatacaaaactcgaggacctgaagaacgtgttcccacctgaggtggccgtgttcgagcctagcgaggccgagatcagccacacccagaaagccaccctcgtgtgcctggctaccggcttctaccccgaccatgtggaactgtcttggtgggtcaacggcaaagaggtgcacagcggcgtgtgtaccgacccccagccactgaaagaacagcccgccctgaacgacagccggtactgcctgagcagcagactgagagtgtccgccaccttctggcagaacccccggaaccacttcagatgccaggtgcagttctacggcctgagcgagaacgacgagtggacccaggacagagccaagcccgtgacccagatcgtgtctgccgaagcctggggcagagccgattgcggctttaccagcgagagctaccagcagggcgtgctgagcgccaccatcctgtacgagatcctgctgggcaaggccaccctgtacgccgtgctggtgtctgccctggtgctgatggctatggtcaagcggaaggacagccggggaagggccaagcgatctggatctggagcaacaaacttctcactactcaaacaagcaggtgacgtggaggagaatcccgggcctactagtatggactggatttggcgcatccttttccttgtcggcgctgctaccggcgcgcattccttcgaaagggcacacctggtgcagtctggcaccgccatgaagaaacctggcgcttccgtcagagtgtcctgtcagacaagcggctacaccttcacagcccacatcctgttctggttcagacaggccccaggcagaggactggaatgggtcggatggatcaagccccagtacggggccgtgaatttcggcggaggcttcagagacagagtgaccctgaccagggacgtgtaccgggaaatcgcctacatggacatccggggcctgaagcctgatgacaccgccgtgtactactgcgccagggatagaagctacggcgacagctcttgggctctcgatgcttggggacagggcacaacagtggtggtgtctgctacgcgtatccagaaccctgatcctgccgtgtaccagctgcgggatagcaagagcagcgacaagagcgtgtgtctgttcaccgacttcgacagccagaccaacgtgtcccagagcaaggactccgacgtgtacatcaccgataagtgcgtgctggacatgcggagcatggacttcaagagcaactccgccgtggcctggtccaacaagtccgatttcgcctgcgccaacgccttcaacaacagcattatccccgaggacacattcttcccaagccccgagagcagctgcgacgtgaagctggtggaaaagagcttcgagacagacaccaacctgaacttccagaacctgagcgtgatcggcttcagaatcctgctgctgaaagtggccggctttaacctgctgatgaccctgcggctgtggtccagc

SEQ ID NO: 1853 - DNA, 2292 bp, Artificial Sequence
  Synthetic Polynucloetide
atggccttaccagtgaccgccttgctcctgccgctggccttgctgctccacgccgccaggccggaagtgcagctggttgaatctggcggaggactggttcagcctggcggatctctgagactgtcttgtgccgccagcggcttcagcttcagcgacttttggatgagctgggtccgacaggcccctggcaaaggacttgaatgggtcgccacaatcagccaggccggcagcgagaaggactacgtggactctgtgaagggcagattcaccatcagccgggacaacgccaagaagtccctgtacctccagatgaacagcctgagagccgaggacaccgccgtgtactattgtgcctctggcgtgtacagcttcgactacagaggccagggcaccctggtcacagtctcttctggtaccggcggaggcggatctggcggcggaggtagcggtggcggaggatctgaattcgacgtgcagatgatccagacccccgatagcctggccgtgtccctgggacagagagccaccatctcttgcagagccagcgagagcgtggacaactacggcatcagcttcatgcactggtatcagcagaagcccggccagagccccaagctgctgatctacagagcctccaacctggaaagcggcatccccgccagattttccggcagcggcagcagaaccgacttcaccctgaccatcaaccccgtggaaaccgacgacgtggcaacctactactgccagcagaacaacaaggacccccccacctttggcggaggcaccaagctggaaatcaagctcgaggacctgaagaacgtgttcccacctgaggtggccgtgttcgagcctagcgaggccgagatcagccacacccagaaagccaccctcgtgtgcctggctaccggcttctaccccgaccatgtggaactgtcttggtgggtcaacggcaaagaggtgcacagcggcgtgtgtaccgacccccagccactgaaagaacagcccgccctgaacgacagccggtactgcctgagcagcagactgagagtgtccgccaccttctggcagaacccccggaaccacttcagatgccaggtgcagttctacggcctgagcgagaacgacgagtggacccaggacagagccaagcccgtgacccagatcgtgtctgccgaagcctggggcagagccgattgcggctttaccagcgagagctaccagcagggcgtgctgagcgccaccatcctgtacgagatcctgctgggcaaggccaccctgtacgccgtgctggtgtctgccctggtgctgatggctatggtcaagcggaaggacagccggggaagggccaagcgatctggatctggagcaacaaacttctcactactcaaacaagcaggtgacgtggaggagaatcccgggcctactagtatggactggatttggcgcatccttttccttgtcggcgctgctaccggcgcgcattccttcgaagggggaggcggctctcaggtgcaactccagcagtctggcgctgagcttgtgaagcctggggccagcgtgaagattagctgcaaggccagcggctacgccttcagcagctactggatgaactgggtcaagcagcggcctggcaagggcctggaatggatcggccaaatctaccccggcgacggcgacaccacctacaacggcaagttcaagggcaaggccaccctgacagccgacaagagcagcagcaccgtgtacatgcaactgaacagcctgaccagcgaggacagcgccgtgtacttctgcgtgcggtactactacggcagctccggctacttcgactattggggccagggcaccacactgaccgtgtcctctacgcgtatccagaaccctgatcctgccgtgtaccagctgcgggatagcaagagcagcgacaagagcgtgtgtctgttcaccgacttcgacagccagaccaacgtgtcccagagcaaggactccgacgtgtacatcaccgataagtgcgtgctggacatgcggagcatggacttcaagagcaactccgccgtggcctggtccaacaagtccgatttcgcctgcgccaacgccttcaacaacagcattatccccgaggacacattcttcccaagccccgagagcagctgcgacgtgaagctggtggaaaagagcttcgagacagacaccaacctgaacttccagaacctgagcgtgatcggcttcagaatcctgctgctgaaagtggccggctttaacctgctgatgaccctgcggctgtggtccagc

SEQ ID NO: 1854 - DNA, 2265 bp, Artificial Sequence
  Synthetic Polynucloetide
atggccttaccagtgaccgccttgctcctgccgctggccttgctgctccacgccgccaggccggaagtgcagctggttgaatctggcggaggactggttcagcctggcggatctctgagactgtcttgtgccgccagcggcttcagcttcagcgacttttggatgagctgggtccgacaggcccctggcaaaggacttgaatgggtcgccacaatcagccaggccggcagcgagaaggactacgtggactctgtgaagggcagattcaccatcagccgggacaacgccaagaagtccctgtacctccagatgaacagcctgagagccgaggacaccgccgtgtactattgtgcctctggcgtgtacagcttcgactacagaggccagggcaccctggtcacagtctcttctggtaccggcggaggcggatctggcggcggaggtagcggtggcggaggatctgaattcgacgtgcagatgatccagacccccagcagcctgtctgccagcctgggcgatagagtgaccatcagctgtcgggccagccaggacatcggcaactacctgaactggtatcagcagaaacccgacggcaccgtgaagctgctgatctactacaccagcagactgcacagcggcgtgcccagcagattttctggcagcggctctggcaccgagtacagcctgaccatctccaacctggaacaggaagatattgctacctacttctgtcagcaaggcagcgccctgccccctacatttggcggcggaacaaagctggaaatcaacctcgaggacctgaagaacgtgttcccacctgaggtggccgtgttcgagcctagcgaggccgagatcagccacacccagaaagccaccctcgtgtgcctggctaccggcttctaccccgaccatgtggaactgtcttggtgggtcaacggcaaagaggtgcacagcggcgtgtgtaccgacccccagccactgaaagaacagcccgccctgaacgacagccggtactgcctgagcagcagactgagagtgtccgccaccttctggcagaacccccggaaccacttcagatgccaggtgcagttctacggcctgagcgagaacgacgagtggacccaggacagagccaagcccgtgacccagatcgtgtctgccgaagcctggggcagagccgattgcggctttaccagcgagagctaccagcagggcgtgctgagcgccaccatcctgtacgagatcctgctgggcaaggccaccctgtacgccgtgctggtgtctgccctggtgctgatggctatggtcaagcggaaggacagccggggaagggccaagcgatctggatctggagcaacaaacttctcactactcaaacaagcaggtgacgtggaggagaatcccgggcctactagtatggactggatttggcgcatccttttccttgtcggcgctgctaccggcgcgcattccttcgaagctctccagctccagcagtctggcgcagaactcgtgcggcctggcgcttctgtgaccctgagctgtaaagccagcggctacaccttcaccgactacgagatgcactgggtcaagcagacccctgtgcacggcctggaatggatcggagccatcgaccctgagacaggcggcaccgcctacaaccagaagttcgagggcaaggccatcctgaccgccgacaagagcagcagcacagcctacatggaactgcggagcctgacctccgaggacagccccgtgtactactgtgccagacggcggtactacggcagcagctccttcgactattggggccagggcaccaccctgaccgtgtctagtacgcgtatccagaaccctgatcctgccgtgtaccagctgcgggatagcaagagcagcgacaagagcgtgtgtctgttcaccgacttcgacagccagaccaacgtgtcccagagcaaggactccgacgtgtacatcaccgataagtgcgtgctggacatgcggagcatggacttcaagagcaactccgccgtggcctggtccaacaagtccgatttcgcctgcgccaacgccttcaacaacagcattatccccgaggacacattcttcccaagccccgagagcagctgcgacgtgaagctggtggaaaagagcttcgagacagacaccaacctgaacttccagaacctgagcgtgatcggcttcagaatcctgctgctgaaagtggccggctttaacctgctgatgaccctgcggctgtggtccagc

SEQ ID NO: 1855 - DNA, 2277 bp, Artificial Sequence
  Synthetic Polynucloetide
atggccttaccagtgaccgccttgctcctgccgctggccttgctgctccacgccgccaggccggaagtgcagctggttgaatctggcggaggactggttcagcctggcggatctctgagactgtcttgtgccgccagcggcttcagcttcagcgacttttggatgagctgggtccgacaggcccctggcaaaggacttgaatgggtcgccacaatcagccaggccggcagcgagaaggactacgtggactctgtgaagggcagattcaccatcagccgggacaacgccaagaagtccctgtacctccagatgaacagcctgagagccgaggacaccgccgtgtactattgtgcctctggcgtgtacagcttcgactacagaggccagggcaccctggtcacagtctcttctggtaccggcggaggcggatctggcggcggaggtagcggtggcggaggatctgaattcgacatcgtcctgacccagtccccagccagcctggcggtgtccctgggtcaacgagctaccatttcctgcagagcctctaagtccgtatccacttccggctatagttacctgcattggtaccaacagaaaccagggcagccacccaagctgctcatctatctggcctcaaacctggagtccggcgtgcccgccagattctccggaagtgggagcggcaccgactttacattgaacatccacccagtcgaagaggaagatgctgccacttattactgtcagcactccagggagctgccatttacatttggctctggcacaaaactggagatcaaactcgaggacctgaagaacgtgttcccacctgaggtggccgtgttcgagcctagcgaggccgagatcagccacacccagaaagccaccctcgtgtgcctggctaccggcttctaccccgaccatgtggaactgtcttggtgggtcaacggcaaagaggtgcacagcggcgtgtgtaccgacccccagccactgaaagaacagcccgccctgaacgacagccggtactgcctgagcagcagactgagagtgtccgccaccttctggcagaacccccggaaccacttcagatgccaggtgcagttctacggcctgagcgagaacgacgagtggacccaggacagagccaagcccgtgacccagatcgtgtctgccgaagcctggggcagagccgattgcggctttaccagcgagagctaccagcagggcgtgctgagcgccaccatcctgtacgagatcctgctgggcaaggccaccctgtacgccgtgctggtgtctgccctggtgctgatggctatggtcaagcggaaggacagccggggaagggccaagcgatctggatctggagcaacaaacttctcactactcaaacaagcaggtgacgtggaggagaatcccgggcctactagtatggactggatttggcgcatccttttccttgtcggcgctgctaccggcgcgcattccttcgaacaggttcagctggtcgagtccgggggaggtctggtacagccgggtggcagcctcaagctgtcatgtgccgcatctggttttgactttagcaggtattggatgagctgggtccgccaggccccgggcaagggacttgagtggattggagaaataaaccctacttccagcacaatcaacttcacaccttctttgaaagataaggtttttatctctcgggataacgctaaaaacacactgtacttgcagatgtctaaggtgcgaagcgaagacaccgccctctattattgcgcccggggtaattactaccgctatggggatgcgatggactattgggggcaaggtacctccgtcacggtctcaacgcgtatccagaaccctgatcctgccgtgtaccagctgcgggatagcaagagcagcgacaagagcgtgtgtctgttcaccgacttcgacagccagaccaacgtgtcccagagcaaggactccgacgtgtacatcaccgataagtgcgtgctggacatgcggagcatggacttcaagagcaactccgccgtggcctggtccaacaagtccgatttcgcctgcgccaacgccttcaacaacagcattatccccgaggacacattcttcccaagccccgagagcagctgcgacgtgaagctggtggaaaagagcttcgagacagacaccaacctgaacttccagaacctgagcgtgatcggcttcagaatcctgctgctgaaagtggccggctttaacctgctgatgaccctgcggctgtggtccagc

SEQ ID NO: 1856 - DNA, 2271 bp, Artificial Sequence
  Synthetic Polynucloetide
atggccttaccagtgaccgccttgctcctgccgctggccttgctgctccacgccgccaggccggaagtgcagctggttgaatctggcggaggactggttcagcctggcggatctctgagactgtcttgtgccgccagcggcttcagcttcagcgacttttggatgagctgggtccgacaggcccctggcaaaggacttgaatgggtcgccacaatcagccaggccggcagcgagaaggactacgtggactctgtgaagggcagattcaccatcagccgggacaacgccaagaagtccctgtacctccagatgaacagcctgagagccgaggacaccgccgtgtactattgtgcctctggcgtgtacagcttcgactacagaggccagggcaccctggtcacagtctcttctggtaccggcggaggcggatctggcggcggaggtagcggtggcggaggatctgaattcgacatccagatgacccagagccctagctcactgagcgccagcgtgggcgacagggtgaccattacctgctccgccagccaggacatcagcaactacctgaactggtaccagcagaagcccggcaaggcccccaagctgctgatctactacacctccaacctgcactccggcgtgcccagcaggttcagcggaagcggcagcggcaccgatttcaccctgaccatctccagcctgcagcccgaggacttcgccacctactactgccagcagtacaggaagctcccctggactttcggccagggcaccaaactggagatcaagcgtctcgaggacctgaagaacgtgttcccacctgaggtggccgtgttcgagcctagcgaggccgagatcagccacacccagaaagccaccctcgtgtgcctggctaccggcttctaccccgaccatgtggaactgtcttggtgggtcaacggcaaagaggtgcacagcggcgtgtgtaccgacccccagccactgaaagaacagcccgccctgaacgacagccggtactgcctgagcagcagactgagagtgtccgccaccttctggcagaacccccggaaccacttcagatgccaggtgcagttctacggcctgagcgagaacgacgagtggacccaggacagagccaagcccgtgacccagatcgtgtctgccgaagcctggggcagagccgattgcggctttaccagcgagagctaccagcagggcgtgctgagcgccaccatcctgtacgagatcctgctgggcaaggccaccctgtacgccgtgctggtgtctgccctggtgctgatggctatggtcaagcggaaggacagccggggaagggccaagcgatctggatctggagcaacaaacttctcactactcaaacaagcaggtgacgtggaggagaatcccgggcctactagtatggactggatttggcgcatccttttccttgtcggcgctgctaccggcgcgcattccttcgaacaggtgcagctggtccagagcggcgccgaagtgaagaagcccggcagctccgtgaaagtgagctgcaaggccagcggcggcaccttcagcaactactggatgcactgggtgaggcaggcccccggacagggcctggagtggatgggcgccacctacaggggccacagcgacacctactacaaccagaagttcaagggccgggtgaccatcaccgccgacaagagcaccagcaccgcctacatggaactgagcagcctcaggagcgaggacaccgctgtgtattactgcgccaggggcgccatctacgacggctacgacgtgctggacaactggggccagggcacactggtgaccgtgtccagcacgcgtatccagaaccctgatcctgccgtgtaccagctgcgggatagcaagagcagcgacaagagcgtgtgtctgttcaccgacttcgacagccagaccaacgtgtcccagagcaaggactccgacgtgtacatcaccgataagtgcgtgctggacatgcggagcatggacttcaagagcaactccgccgtggcctggtccaacaagtccgatttcgcctgcgccaacgccttcaacaacagcattatccccgaggacacattcttcccaagccccgagagcagctgcgacgtgaagctggtggaaaagagcttcgagacagacaccaacctgaacttccagaacctgagcgtgatcggcttcagaatcctgctgctgaaagtggccggctttaacctgctgatgaccctgcggctgtggtccagc

SEQ ID NO: 1857 - DNA, 2271 bp, Artificial Sequence
  Synthetic Polynucloetide
atggccttaccagtgaccgccttgctcctgccgctggccttgctgctccacgccgccaggccggaagtgcagctggttgaatctggcggaggactggttcagcctggcggatctctgagactgtcttgtgccgccagcggcttcagcttcagcgacttttggatgagctgggtccgacaggcccctggcaaaggacttgaatgggtcgccacaatcagccaggccggcagcgagaaggactacgtggactctgtgaagggcagattcaccatcagccgggacaacgccaagaagtccctgtacctccagatgaacagcctgagagccgaggacaccgccgtgtactattgtgcctctggcgtgtacagcttcgactacagaggccagggcaccctggtcacagtctcttctggtaccggcggaggcggatctggcggcggaggtagcggtggcggaggatctgaattcgacatcgtgctgacacagagccctgccaccctgtctctgagccctggcgatagagccaccatcagctgtagagccagcgagagcgtgaccatcctgggcagccacctgatctactggtatcagcagaagcccggccagccccccagactgctgattcagctggcctccaatgtgcagaccggcgtgccagccagattttccggcagcggcagcagaaccgacttcaccctgaccatcagcagcgtggaacccgaggacttcgccgtgtactactgcctccagagccggaccatccccagaacattcggccagggcaccaagctggaaatcaagagactcgaggacctgaagaacgtgttcccacctgaggtggccgtgttcgagcctagcgaggccgagatcagccacacccagaaagccaccctcgtgtgcctggctaccggcttctaccccgaccatgtggaactgtcttggtgggtcaacggcaaagaggtgcacagcggcgtgtgtaccgacccccagccactgaaagaacagcccgccctgaacgacagccggtactgcctgagcagcagactgagagtgtccgccaccttctggcagaacccccggaaccacttcagatgccaggtgcagttctacggcctgagcgagaacgacgagtggacccaggacagagccaagcccgtgacccagatcgtgtctgccgaagcctggggcagagccgattgcggctttaccagcgagagctaccagcagggcgtgctgagcgccaccatcctgtacgagatcctgctgggcaaggccaccctgtacgccgtgctggtgtctgccctggtgctgatggctatggtcaagcggaaggacagccggggaagggccaagcgatctggatctggagcaacaaacttctcactactcaaacaagcaggtgacgtggaggagaatcccgggcctactagtatggactggatttggcgcatccttttccttgtcggcgctgctaccggcgcgcattccttcgaacaggtgcagctggtgcagtctggccccgaagtgaagaaacccggcgagtccgtgaagatcagctgcaaggccagcggctacaccttccggcactacagcatgaactgggtcaagcaggccccaggccagggcctgaagtggatgggcagaatcaacaccgagagcggcgtgcccatctacgccgacgacttcaagggccggttcagcttcaccgtggacaccagcgccagcaccgcctacctggaaatctccagcctgaccagcgaggataccgccgtgtatttctgctccaacgactacctgtacagcctggatttctggggccagggaaccaccctgacagtgtcctctacgcgtatccagaaccctgatcctgccgtgtaccagctgcgggatagcaagagcagcgacaagagcgtgtgtctgttcaccgacttcgacagccagaccaacgtgtcccagagcaaggactccgacgtgtacatcaccgataagtgcgtgctggacatgcggagcatggacttcaagagcaactccgccgtggcctggtccaacaagtccgatttcgcctgcgccaacgccttcaacaacagcattatccccgaggacacattcttcccaagccccgagagcagctgcgacgtgaagctggtggaaaagagcttcgagacagacaccaacctgaacttccagaacctgagcgtgatcggcttcagaatcctgctgctgaaagtggccggctttaacctgctgatgaccctgcggctgtggtccagc

SEQ ID NO: 1858 - DNA, 2274 bp, Artificial Sequence
  Synthetic Polynucloetide
atggccttaccagtgaccgccttgctcctgccgctggccttgctgctccacgccgccaggccggaagtgcagctggttgaatctggcggaggactggttcagcctggcggatctctgagactgtcttgtgccgccagcggcttcagcttcagcgacttttggatgagctgggtccgacaggcccctggcaaaggacttgaatgggtcgccacaatcagccaggccggcagcgagaaggactacgtggactctgtgaagggcagattcaccatcagccgggacaacgccaagaagtccctgtacctccagatgaacagcctgagagccgaggacaccgccgtgtactattgtgcctctggcgtgtacagcttcgactacagaggccagggcaccctggtcacagtctcttctggtaccggcggaggcggatctggcggcggaggtagcggtggcggaggatctgaattccagtctgtgctgacacagcctcctagtgtgtctggcgctcctggacagagagtgaccatcagctgtacaggcagcagcagcaatatcggagccggctttgacgtgcactggtatcagcagctgcctggcacagcccctaaactgctgatctacggcaacagcaacagacccagcggcgtgcccgatagattttccggctctaagagcggcacaagcgccagcctggctattactggactccaggccgaggacgaggccgactactactgtcagagctacgacagcagcctgagcggctacgttttcggcaccggcaccaaagtgacagtgcttggtctcgaggacctgaagaacgtgttcccacctgaggtggccgtgttcgagcctagcgaggccgagatcagccacacccagaaagccaccctcgtgtgcctggctaccggcttctaccccgaccatgtggaactgtcttggtgggtcaacggcaaagaggtgcacagcggcgtgtgtaccgacccccagccactgaaagaacagcccgccctgaacgacagccggtactgcctgagcagcagactgagagtgtccgccaccttctggcagaacccccggaaccacttcagatgccaggtgcagttctacggcctgagcgagaacgacgagtggacccaggacagagccaagcccgtgacccagatcgtgtctgccgaagcctggggcagagccgattgcggctttaccagcgagagctaccagcagggcgtgctgagcgccaccatcctgtacgagatcctgctgggcaaggccaccctgtacgccgtgctggtgtctgccctggtgctgatggctatggtcaagcggaaggacagccggggaagggccaagcgatctggatctggagcaacaaacttctcactactcaaacaagcaggtgacgtggaggagaatcccgggcctactagtatggactggatttggcgcatccttttccttgtcggcgctgctaccggcgcgcattccttcgaacaagttcagctggttcagagcggagccgaagtgaagaaacctggggcctctgtgaaggtgtcctgcaaggcttccggctacacctttaccgattactacatgcactgggtccgacaggctcccggccaaagacttgaatggatgggctggatcaaccccaacagcggcggcacaaattacgcccagaagttccaggaccggatcaccgtgaccagagacaccagctccaacaccggctacatggaactgacccggctgagatccgatgacaccgccgtgtactactgcgctagaagcccttactccggcgtgctggataagtggggacagggcacactggtcaccgtgtcatctacgcgtatccagaaccctgatcctgccgtgtaccagctgcgggatagcaagagcagcgacaagagcgtgtgtctgttcaccgacttcgacagccagaccaacgtgtcccagagcaaggactccgacgtgtacatcaccgataagtgcgtgctggacatgcggagcatggacttcaagagcaactccgccgtggcctggtccaacaagtccgatttcgcctgcgccaacgccttcaacaacagcattatccccgaggacacattcttcccaagccccgagagcagctgcgacgtgaagctggtggaaaagagcttcgagacagacaccaacctgaacttccagaacctgagcgtgatcggcttcagaatcctgctgctgaaagtggccggctttaacctgctgatgaccctgcggctgtggtccagc

SEQ ID NO: 1859 - DNA, 2265 bp, Artificial Sequence
  Synthetic Polynucloetide
atggccttaccagtgaccgccttgctcctgccgctggccttgctgctccacgccgccaggccggaagtgcagctggttgaatctggcggaggactggttcagcctggcggatctctgagactgtcttgtgccgccagcggcttcagcttcagcgacttttggatgagctgggtccgacaggcccctggcaaaggacttgaatgggtcgccacaatcagccaggccggcagcgagaaggactacgtggactctgtgaagggcagattcaccatcagccgggacaacgccaagaagtccctgtacctccagatgaacagcctgagagccgaggacaccgccgtgtactattgtgcctctggcgtgtacagcttcgactacagaggccagggcaccctggtcacagtctcttctggtaccggcggaggcggatctggcggcggaggtagcggtggcggaggatctgaattccaggctgttctgacacagcctccatctgcctctggcacacctggacagagagtgaccatctcctgtagcggcagcagcagcaacatcggcagctacaccgtgtcctggtatcagcagctccctggaacagcccctaagttcctgatctacagcaacaaccagcggcctagcggcgtgcccgatagattttctggcagcaagagcggcacaagcgccagcctggctatttctggactccagtctgaggacgaggccgactactattgtgccgcctgggacgatagcctgaacggctatgtgtttggcaccggcaccaaagtgacagtgcttggtctcgaggacctgaagaacgtgttcccacctgaggtggccgtgttcgagcctagcgaggccgagatcagccacacccagaaagccaccctcgtgtgcctggctaccggcttctaccccgaccatgtggaactgtcttggtgggtcaacggcaaagaggtgcacagcggcgtgtgtaccgacccccagccactgaaagaacagcccgccctgaacgacagccggtactgcctgagcagcagactgagagtgtccgccaccttctggcagaacccccggaaccacttcagatgccaggtgcagttctacggcctgagcgagaacgacgagtggacccaggacagagccaagcccgtgacccagatcgtgtctgccgaagcctggggcagagccgattgcggctttaccagcgagagctaccagcagggcgtgctgagcgccaccatcctgtacgagatcctgctgggcaaggccaccctgtacgccgtgctggtgtctgccctggtgctgatggctatggtcaagcggaaggacagccggggaagggccaagcgatctggatctggagcaacaaacttctcactactcaaacaagcaggtgacgtggaggagaatcccgggcctactagtatggactggatttggcgcatccttttccttgtcggcgctgctaccggcgcgcattccttcgaagttcaactggttcagagcggagccgaagtgaagaagcctggcgagagcctgaagattagctgcaaaggcagcggctacgacttcaccacctactggatcggctgggtccgacagatgcctggcaaaggactggaatggatgggcatcatctaccccggcgacagcgacaccagatacagccctagcgttagaggccgcgtgaccatcagcgccgacaagtctatcaacaccgcctacctccagtggtccagcctggaagcctctgacaccgccatgtactactgcgccagaatgtggaccttcagccaggatggatggggccagggaacactggtcacagtgtcatctacgcgtatccagaaccctgatcctgccgtgtaccagctgcgggatagcaagagcagcgacaagagcgtgtgtctgttcaccgacttcgacagccagaccaacgtgtcccagagcaaggactccgacgtgtacatcaccgataagtgcgtgctggacatgcggagcatggacttcaagagcaactccgccgtggcctggtccaacaagtccgatttcgcctgcgccaacgccttcaacaacagcattatccccgaggacacattcttcccaagccccgagagcagctgcgacgtgaagctggtggaaaagagcttcgagacagacaccaacctgaacttccagaacctgagcgtgatcggcttcagaatcctgctgctgaaagtggccggctttaacctgctgatgaccctgcggctgtggtccagc

SEQ ID NO: 1860 - DNA, 2274 bp, Artificial Sequence
  Synthetic Polynucloetide
atggccttaccagtgaccgccttgctcctgccgctggccttgctgctccacgccgccaggccggaagtgcagctggttgaatctggcggaggactggttcagcctggcggatctctgagactgtcttgtgccgccagcggcttcagcttcagcgacttttggatgagctgggtccgacaggcccctggcaaaggacttgaatgggtcgccacaatcagccaggccggcagcgagaaggactacgtggactctgtgaagggcagattcaccatcagccgggacaacgccaagaagtccctgtacctccagatgaacagcctgagagccgaggacaccgccgtgtactattgtgcctctggcgtgtacagcttcgactacagaggccagggcaccctggtcacagtctcttctggtaccggcggaggcggatctggcggcggaggtagcggtggcggaggatctgaattcgacatcgtgatgacccagagccccgatagcctggccgtgtctctgggagagagagccaccatcaactgcaagagcagccagagcatcctgtacagcagcaaccagaagaactacctggcctggtatcagcagaagcccggccagagccctaagctgctgatctactgggccagcaccagagaaagcggcgtgcccgatagattcagcggcagcggctctggcaccgacttcaccctgaccatcagttctcttcaggccgaggacgtggccgtgtactactgccaccagtacatcagctcctacaccttcggccagggcaccaagctggaaatcaagctcgaggacctgaagaacgtgttcccacctgaggtggccgtgttcgagcctagcgaggccgagatcagccacacccagaaagccaccctcgtgtgcctggctaccggcttctaccccgaccatgtggaactgtcttggtgggtcaacggcaaagaggtgcacagcggcgtgtgtaccgacccccagccactgaaagaacagcccgccctgaacgacagccggtactgcctgagcagcagactgagagtgtccgccaccttctggcagaacccccggaaccacttcagatgccaggtgcagttctacggcctgagcgagaacgacgagtggacccaggacagagccaagcccgtgacccagatcgtgtctgccgaagcctggggcagagccgattgcggctttaccagcgagagctaccagcagggcgtgctgagcgccaccatcctgtacgagatcctgctgggcaaggccaccctgtacgccgtgctggtgtctgccctggtgctgatggctatggtcaagcggaaggacagccggggaagggccaagcgatctggatctggagcaacaaacttctcactactcaaacaagcaggtgacgtggaggagaatcccgggcctactagtatggactggatttggcgcatccttttccttgtcggcgctgctaccggcgcgcattccttcgaacaggtgcagctggtgcagtctggcgctgaagtgaagaaacctggggccagcgtgaaggtgtcctgcaaggccagcggctacacctttgccagccagtggatgcactggatgagacaggcccctggacagggcctggaatggatcggctggatcaaccccggcaacgtgaacaccaagtacaacgagaagttcaagggcagagccaccctgacagtggacaccagcaccaacaccgcctacatggaactgagcagcctgcggagcgaggacaccgccgtgtattattgcgccagaagcacctggtacagacccctggattattggggccagggaacccttgtgaccgtgtcctctacgcgtatccagaaccctgatcctgccgtgtaccagctgcgggatagcaagagcagcgacaagagcgtgtgtctgttcaccgacttcgacagccagaccaacgtgtcccagagcaaggactccgacgtgtacatcaccgataagtgcgtgctggacatgcggagcatggacttcaagagcaactccgccgtggcctggtccaacaagtccgatttcgcctgcgccaacgccttcaacaacagcattatccccgaggacacattcttcccaagccccgagagcagctgcgacgtgaagctggtggaaaagagcttcgagacagacaccaacctgaacttccagaacctgagcgtgatcggcttcagaatcctgctgctgaaagtggccggctttaacctgctgatgaccctgcggctgtggtccagc

SEQ ID NO: 1861 - DNA, 2274 bp, Artificial Sequence
  Synthetic Polynucloetide
atggccttaccagtgaccgccttgctcctgccgctggccttgctgctccacgccgccaggccggaagtgcagctggttgaatctggcggaggactggttcagcctggcggatctctgagactgtcttgtgccgccagcggcttcagcttcagcgacttttggatgagctgggtccgacaggcccctggcaaaggacttgaatgggtcgccacaatcagccaggccggcagcgagaaggactacgtggactctgtgaagggcagattcaccatcagccgggacaacgccaagaagtccctgtacctccagatgaacagcctgagagccgaggacaccgccgtgtactattgtgcctctggcgtgtacagcttcgactacagaggccagggcaccctggtcacagtctcttctggtaccggcggaggcggatctggcggcggaggtagcggtggcggaggatctgaattcgaccacatcgtgctgacccagagccctagcagcctgtctgccagcctgggcgacagagtgaccatcagctgtagagccagccaggacatcagcacctacctgaactggtatcagcagaaacccgacggcaccgtgaagctgctgatcttctacaccagcagactgcacgccggggtgcccagcagattttctggcagcggctctggcacccaccacagcctgaccatctccaacctggaacaggaagatattgctacctacttctgtcagcaaggcaacagcctgcccttcaccttcggcagcggcaccaagctggaaatcaagagactcgaggacctgaagaacgtgttcccacctgaggtggccgtgttcgagcctagcgaggccgagatcagccacacccagaaagccaccctcgtgtgcctggctaccggcttctaccccgaccatgtggaactgtcttggtgggtcaacggcaaagaggtgcacagcggcgtgtgtaccgacccccagccactgaaagaacagcccgccctgaacgacagccggtactgcctgagcagcagactgagagtgtccgccaccttctggcagaacccccggaaccacttcagatgccaggtgcagttctacggcctgagcgagaacgacgagtggacccaggacagagccaagcccgtgacccagatcgtgtctgccgaagcctggggcagagccgattgcggctttaccagcgagagctaccagcagggcgtgctgagcgccaccatcctgtacgagatcctgctgggcaaggccaccctgtacgccgtgctggtgtctgccctggtgctgatggctatggtcaagcggaaggacagccggggaagggccaagcgatctggatctggagcaacaaacttctcactactcaaacaagcaggtgacgtggaggagaatcccgggcctactagtatggactggatttggcgcatccttttccttgtcggcgctgctaccggcgcgcattccttcgaacaggtgcagctgaaagagagcggccctgagctggaaaagcctggggccagcgtgaagattagctgcaaggccagcggctacagcttcaccgcctacagcatgaactgggtcaagcagaacaacggcatgagcctggaatggatcggcagcatcgacccctactacggcgacaccaaatacgcccagaagttcaagggcaaggccaccctgaccgtggataaggccagcagcaccgcctacctccagctgaagtctctgaccagcgaggacagcgccgtgtactactgcgccagacggatgattaccaccggcgactggtacttcgacgtgtggggagccggaaccaccgtgacagtgtctagcacgcgtatccagaaccctgatcctgccgtgtaccagctgcgggatagcaagagcagcgacaagagcgtgtgtctgttcaccgacttcgacagccagaccaacgtgtcccagagcaaggactccgacgtgtacatcaccgataagtgcgtgctggacatgcggagcatggacttcaagagcaactccgccgtggcctggtccaacaagtccgatttcgcctgcgccaacgccttcaacaacagcattatccccgaggacacattcttcccaagccccgagagcagctgcgacgtgaagctggtggaaaagagcttcgagacagacaccaacctgaacttccagaacctgagcgtgatcggcttcagaatcctgctgctgaaagtggccggctttaacctgctgatgaccctgcggctgtggtccagc

SEQ ID NO: 1862 - DNA, 2274 bp, Artificial Sequence; identical to SEQ ID NO: 1861
  Synthetic Polynucloetide

SEQ ID NO: 1863 - DNA, 2274 bp, Artificial Sequence
  Synthetic Polynucloetide
atggccttaccagtgaccgccttgctcctgccgctggccttgctgctccacgccgccaggccggaagtgcagctggttgaatctggcggaggactggttcagcctggcggatctctgagactgtcttgtgccgccagcggcttcagcttcagcgacttttggatgagctgggtccgacaggcccctggcaaaggacttgaatgggtcgccacaatcagccaggccggcagcgagaaggactacgtggactctgtgaagggcagattcaccatcagccgggacaacgccaagaagtccctgtacctccagatgaacagcctgagagccgaggacaccgccgtgtactattgtgcctctggcgtgtacagcttcgactacagaggccagggcaccctggtcacagtctcttctggtaccggcggaggcggatctggcggcggaggtagcggtggcggaggatctgaattcgacgagatcgtgctgacacagagccctgccaccctgtctctgagccctggcgaaagagccaccctgagctgtagagccagccagagcgtgtccagctacctggcctggtatcagcagaagcccggccaggctccccggctgctgatctacgatgccagcaatagagccaccggcatccccgccagattttccggctctggcagcggcaccgacttcaccctgaccatcagctccctggaacccgaggacttcgccgtgtactactgccagcagcggagcaactggcccatcacattcggccagggcacccggctggaaatcaaactcgaggacctgaagaacgtgttcccacctgaggtggccgtgttcgagcctagcgaggccgagatcagccacacccagaaagccaccctcgtgtgcctggctaccggcttctaccccgaccatgtggaactgtcttggtgggtcaacggcaaagaggtgcacagcggcgtgtgtaccgacccccagccactgaaagaacagcccgccctgaacgacagccggtactgcctgagcagcagactgagagtgtccgccaccttctggcagaacccccggaaccacttcagatgccaggtgcagttctacggcctgagcgagaacgacgagtggacccaggacagagccaagcccgtgacccagatcgtgtctgccgaagcctggggcagagccgattgcggctttaccagcgagagctaccagcagggcgtgctgagcgccaccatcctgtacgagatcctgctgggcaaggccaccctgtacgccgtgctggtgtctgccctggtgctgatggctatggtcaagcggaaggacagccggggaagggccaagcgatctggatctggagcaacaaacttctcactactcaaacaagcaggtgacgtggaggagaatcccgggcctactagtatggactggatttggcgcatccttttccttgtcggcgctgctaccggcgcgcattccttcgaagaagtgcagctggtggaatcaggcggcggactggtgcagcctggcagaagcctgagactgagctgtgccgccagcggcttcaccttcaacgactacgccatgcactgggtgcgccaggcccctggaaaaggactggaatgggtgtccacaatcagctggaacagcggcagcatcggctacgccgatagcgtgaagggccggttcaccatcagccgggacaacgccaagaagtccctgtacctccagatgaacagcctgcgggccgaggacacagccctgtactattgcgccaaggacatccagtacggcaactactactacggcatggacgtgtggggccagggaaccaccgtgaccgtgtcatctacgcgtatccagaaccctgatcctgccgtgtaccagctgcgggatagcaagagcagcgacaagagcgtgtgtctgttcaccgacttcgacagccagaccaacgtgtcccagagcaaggactccgacgtgtacatcaccgataagtgcgtgctggacatgcggagcatggacttcaagagcaactccgccgtggcctggtccaacaagtccgatttcgcctgcgccaacgccttcaacaacagcattatccccgaggacacattcttcccaagccccgagagcagctgcgacgtgaagctggtggaaaagagcttcgagacagacaccaacctgaacttccagaacctgagcgtgatcggcttcagaatcctgctgctgaaagtggccggctttaacctgctgatgaccctgcggctgtggtccagc

SEQ ID NO: 1864 - DNA, 2280 bp, Artificial Sequence
  Synthetic Polynucloetide
atggccttaccagtgaccgccttgctcctgccgctggccttgctgctccacgccgccaggccggaagtgcagctggttgaatctggcggaggactggttcagcctggcggatctctgagactgtcttgtgccgccagcggcttcagcttcagcgacttttggatgagctgggtccgacaggcccctggcaaaggacttgaatgggtcgccacaatcagccaggccggcagcgagaaggactacgtggactctgtgaagggcagattcaccatcagccgggacaacgccaagaagtccctgtacctccagatgaacagcctgagagccgaggacaccgccgtgtactattgtgcctctggcgtgtacagcttcgactacagaggccagggcaccctggtcacagtctcttctggtaccggcggaggcggatctggcggcggaggtagcggtggcggaggatctgaattcgacatcgtgatgacccagacccccctgagcctgcctgtgacacctggcgagcctgccagcatctcctgcagaagcagcaagagcctgctgcacagcaacggcatcacctacctgtactggtatctgcagaaacccggccagagcccccaactgctgatctaccagatgagcaacctggtgtccggcgtgcccgacagattttctggcagcggctccggcaccgacttcaccctgaagatcagccgggtggaagccgaggacgtgggcgtgtactactgcgcccagaacctggaactgccctacacctttggcggcggaacaaaggtggaaatcaagcggctcgaggacctgaagaacgtgttcccacctgaggtggccgtgttcgagcctagcgaggccgagatcagccacacccagaaagccaccctcgtgtgcctggctaccggcttctaccccgaccatgtggaactgtcttggtgggtcaacggcaaagaggtgcacagcggcgtgtgtaccgacccccagccactgaaagaacagcccgccctgaacgacagccggtactgcctgagcagcagactgagagtgtccgccaccttctggcagaacccccggaaccacttcagatgccaggtgcagttctacggcctgagcgagaacgacgagtggacccaggacagagccaagcccgtgacccagatcgtgtctgccgaagcctggggcagagccgattgcggctttaccagcgagagctaccagcagggcgtgctgagcgccaccatcctgtacgagatcctgctgggcaaggccaccctgtacgccgtgctggtgtctgccctggtgctgatggctatggtcaagcggaaggacagccggggaagggccaagcgatctggatctggagcaacaaacttctcactactcaaacaagcaggtgacgtggaggagaatcccgggcctactagtatggactggatttggcgcatccttttccttgtcggcgctgctaccggcgcgcattccttcgaacaggtgcaactggtgcagagcggagccgaagtgaaaaagcccggcagcagcgtgaaggtgtcctgcaaggccagcggctacgccttcagctactcctggatcaactgggtgcgccaggcccctggacagggcctggaatggatgggcagaatcttccccggcgacggcgacaccgactacaacggcaagttcaagggcagagtgaccatcaccgccgacaagagcaccagcaccgcctacatggaactgagcagcctgcggagcgaggataccgccgtgtactattgtgccagaaacgtgttcgacggctactggctggtgtactggggccagggaacacttgtgaccgtgtccagcacgcgtatccagaaccctgatcctgccgtgtaccagctgcgggatagcaagagcagcgacaagagcgtgtgtctgttcaccgacttcgacagccagaccaacgtgtcccagagcaaggactccgacgtgtacatcaccgataagtgcgtgctggacatgcggagcatggacttcaagagcaactccgccgtggcctggtccaacaagtccgatttcgcctgcgccaacgccttcaacaacagcattatccccgaggacacattcttcccaagccccgagagcagctgcgacgtgaagctggtggaaaagagcttcgagacagacaccaacctgaacttccagaacctgagcgtgatcggcttcagaatcctgctgctgaaagtggccggctttaacctgctgatgaccctgcggctgtggtccagc

SEQ ID NO: 1865 - DNA, 2283 bp, Artificial Sequence
  Synthetic Polynucloetide
atggccttaccagtgaccgccttgctcctgccgctggccttgctgctccacgccgccaggccggaagtgcagctggttgaatctggcggaggactggttcagcctggcggatctctgagactgtcttgtgccgccagcggcttcagcttcagcgacttttggatgagctgggtccgacaggcccctggcaaaggacttgaatgggtcgccacaatcagccaggccggcagcgagaaggactacgtggactctgtgaagggcagattcaccatcagccgggacaacgccaagaagtccctgtacctccagatgaacagcctgagagccgaggacaccgccgtgtactattgtgcctctggcgtgtacagcttcgactacagaggccagggcaccctggtcacagtctcttctggtaccggcggaggcggatctggcggcggaggtagcggtggcggaggatctgaattcgacatccagatgacccagagccccagcagcctgtctgccagcgtgggcgacagagtgaccatcacctgtcggagcagccagagcatcgtgcactccgtgggcaacaccttcctggaatggtatcagcagaagcccggcaaggcccccaagctgctgatctacaaggtgtccaacagattcagcggcgtgcccagcaggtttagcggctctggcagcggcaccgacttcaccctgaccatctctagcctccagcccgaggacttcgccacctactactgttttcaaggcagccagttcccctacaccttcggccagggaacaaaggtggaaatcaagcggctcgaggacctgaagaacgtgttcccacctgaggtggccgtgttcgagcctagcgaggccgagatcagccacacccagaaagccaccctcgtgtgcctggctaccggcttctaccccgaccatgtggaactgtcttggtgggtcaacggcaaagaggtgcacagcggcgtgtgtaccgacccccagccactgaaagaacagcccgccctgaacgacagccggtactgcctgagcagcagactgagagtgtccgccaccttctggcagaacccccggaaccacttcagatgccaggtgcagttctacggcctgagcgagaacgacgagtggacccaggacagagccaagcccgtgacccagatcgtgtctgccgaagcctggggcagagccgattgcggctttaccagcgagagctaccagcagggcgtgctgagcgccaccatcctgtacgagatcctgctgggcaaggccaccctgtacgccgtgctggtgtctgccctggtgctgatggctatggtcaagcggaaggacagccggggaagggccaagcgatctggatctggagcaacaaacttctcactactcaaacaagcaggtgacgtggaggagaatcccgggcctactagtatggactggatttggcgcatccttttccttgtcggcgctgctaccggcgcgcattccttcgaagaagtgcaactggtggaaagcggaggcggcctggtgcagcctggcggatctctgagactgagctgtgccgccagcggctacgagttcagccggtcctggatgaactgggtgcgccaggcccctggcaagggactggaatgggtgggaagaatctaccccggcgacggcgacaccaactacagcggcaagttcaagggccggttcaccatcagcgccgacaccagcaagaacaccgcctacctccagatgaacagcctgcgggccgaggataccgccgtgtactactgtgccagagatggcagctcctgggactggtacttcgacgtgtggggacagggaacccttgtgaccgtgtccagcacgcgtatccagaaccctgatcctgccgtgtaccagctgcgggatagcaagagcagcgacaagagcgtgtgtctgttcaccgacttcgacagccagaccaacgtgtcccagagcaaggactccgacgtgtacatcaccgataagtgcgtgctggacatgcggagcatggacttcaagagcaactccgccgtggcctggtccaacaagtccgatttcgcctgcgccaacgccttcaacaacagcattatccccgaggacacattcttcccaagccccgagagcagctgcgacgtgaagctggtggaaaagagcttcgagacagacaccaacctgaacttccagaacctgagcgtgatcggcttcagaatcctgctgctgaaagtggccggctttaacctgctgatgaccctgcggctgtggtccagc

SEQ ID NO: 1866 - DNA, 2277 bp, Artificial Sequence
  Synthetic Polynucloetide
atggccttaccagtgaccgccttgctcctgccgctggccttgctgctccacgccgccaggccggaagtgcagctggttgaatctggcggaggactggttcagcctggcggatctctgagactgtcttgtgccgccagcggcttcagcttcagcgacttttggatgagctgggtccgacaggcccctggcaaaggacttgaatgggtcgccacaatcagccaggccggcagcgagaaggactacgtggactctgtgaagggcagattcaccatcagccgggacaacgccaagaagtccctgtacctccagatgaacagcctgagagccgaggacaccgccgtgtactattgtgcctctggcgtgtacagcttcgactacagaggccagggcaccctggtcacagtctcttctggtaccggcggaggcggatctggcggcggaggtagcggtggcggaggatctgaattcgacatccagatgacccagagccccagcagcctgtctgccagcgtgggcgacagagtgaccatcacctgtagagccagccagaccatctggtcctacctgaactggtatcagcagaggcccggcaaggcccccaacctgctgatctatgccgccagctctctccagagcggcgtgcccagcagattttccggcagaggcagcggcaccgacttcaccctgaccatcagttccttgcaggccgaggacttcgccacctactactgccagcagagctacagcatcccccagattttcggccagggcaccaagctggaaatcaagctcgaggacctgaagaacgtgttcccacctgaggtggccgtgttcgagcctagcgaggccgagatcagccacacccagaaagccaccctcgtgtgcctggctaccggcttctaccccgaccatgtggaactgtcttggtgggtcaacggcaaagaggtgcacagcggcgtgtgtaccgacccccagccactgaaagaacagcccgccctgaacgacagccggtactgcctgagcagcagactgagagtgtccgccaccttctggcagaacccccggaaccacttcagatgccaggtgcagttctacggcctgagcgagaacgacgagtggacccaggacagagccaagcccgtgacccagatcgtgtctgccgaagcctggggcagagccgattgcggctttaccagcgagagctaccagcagggcgtgctgagcgccaccatcctgtacgagatcctgctgggcaaggccaccctgtacgccgtgctggtgtctgccctggtgctgatggctatggtcaagcggaaggacagccggggaagggccaagcgatctggatctggagcaacaaacttctcactactcaaacaagcaggtgacgtggaggagaatcccgggcctactagtatggactggatttggcgcatccttttccttgtcggcgctgctaccggcgcgcattccttcgaacaggtgcagctccagcagtctggacccggcctcgtgaagcctagccagacactgagcctgacctgcgccatcagcggcgatagcgtgtccagcaatagcgccgcctggaactggatcagacagtccccctctcggggcctggaatggctgggccggacctactaccgcagcaagtggtacaacgactacgccgtgtccgtgaagtcccggatcaccatcaaccccgacaccagcaagaaccagttctccttgcaactgaacagcgtgacccccgaggacaccgccgtgtactactgcgccagagaagtgaccggcgacctggaagatgccttcgacatctggggccagggaacaatggtcacagtgtccagcacgcgtatccagaaccctgatcctgccgtgtaccagctgcgggatagcaagagcagcgacaagagcgtgtgtctgttcaccgacttcgacagccagaccaacgtgtcccagagcaaggactccgacgtgtacatcaccgataagtgcgtgctggacatgcggagcatggacttcaagagcaactccgccgtggcctggtccaacaagtccgatttcgcctgcgccaacgccttcaacaacagcattatccccgaggacacattcttcccaagccccgagagcagctgcgacgtgaagctggtggaaaagagcttcgagacagacaccaacctgaacttccagaacctgagcgtgatcggcttcagaatcctgctgctgaaagtggccggctttaacctgctgatgaccctgcggctgtggtccagc

SEQ ID NO: 1867 - DNA, 2256 bp, Artificial Sequence
  Synthetic Polynucloetide
atggccttaccagtgaccgccttgctcctgccgctggccttgctgctccacgccgccaggccggaagtgcagctggttgaatctggcggaggactggttcagcctggcggatctctgagactgtcttgtgccgccagcggcttcagcttcagcgacttttggatgagctgggtccgacaggcccctggcaaaggacttgaatgggtcgccacaatcagccaggccggcagcgagaaggactacgtggactctgtgaagggcagattcaccatcagccgggacaacgccaagaagtccctgtacctccagatgaacagcctgagagccgaggacaccgccgtgtactattgtgcctctggcgtgtacagcttcgactacagaggccagggcaccctggtcacagtctcttctggtaccggcggaggcggatctggcggcggaggtagcggtggcggaggatctgaattcgacatccagatgacccagagccccgccaccatcgagaacacaagcctgtctgccagcgtgggcgacagagtgaccatcacctgtagagccagccagggcatcagctcttggctgacctggtatcagcagaagcccgagaaggcccccaagagcctgatctacgccgccagctctctgcagtctggcgtgcccagcagattttccggcagcggctctggcaccgacttcaccctgacaatcagcagcctgcagcccgaggacttcgccacctactactgccagcagtacgacagctaccccatcaccttcggccagggcacccggctggaaatcaagctcgaggacctgaagaacgtgttcccacctgaggtggccgtgttcgagcctagcgaggccgagatcagccacacccagaaagccaccctcgtgtgcctggctaccggcttctaccccgaccatgtggaactgtcttggtgggtcaacggcaaagaggtgcacagcggcgtgtgtaccgacccccagccactgaaagaacagcccgccctgaacgacagccggtactgcctgagcagcagactgagagtgtccgccaccttctggcagaacccccggaaccacttcagatgccaggtgcagttctacggcctgagcgagaacgacgagtggacccaggacagagccaagcccgtgacccagatcgtgtctgccgaagcctggggcagagccgattgcggctttaccagcgagagctaccagcagggcgtgctgagcgccaccatcctgtacgagatcctgctgggcaaggccaccctgtacgccgtgctggtgtctgccctggtgctgatggctatggtcaagcggaaggacagccggggaagggccaagcgatctggatctggagcaacaaacttctcactactcaaacaagcaggtgacgtggaggagaatcccgggcctactagtatggactggatttggcgcatccttttccttgtcggcgctgctaccggcgcgcattccttcgaacaggtgcaactgcagcagtggggagccggactgctgaagcctagcgagacactgagcctgacctgcgccgtgtacggcggcagcttcagcgcctactattggagctggatcagacagccccctggcaagggcctggaatggatcggcgacatcaatcacggcggaggcaccaactacaaccccagcctgaagtcccgcgtgaccatctccgtggacaccagcaagaaccagttctccctgaagctgaacagcgtgacagccgccgacacagccgtgtactactgtgccagcctgaccgcctattggggccagggatctcttgtgaccgtgtccagcacgcgtatccagaaccctgatcctgccgtgtaccagctgcgggatagcaagagcagcgacaagagcgtgtgtctgttcaccgacttcgacagccagaccaacgtgtcccagagcaaggactccgacgtgtacatcaccgataagtgcgtgctggacatgcggagcatggacttcaagagcaactccgccgtggcctggtccaacaagtccgatttcgcctgcgccaacgccttcaacaacagcattatccccgaggacacattcttcccaagccccgagagcagctgcgacgtgaagctggtggaaaagagcttcgagacagacaccaacctgaacttccagaacctgagcgtgatcggcttcagaatcctgctgctgaaagtggccggctttaacctgctgatgaccctgcggctgtggtccagc

SEQ ID NO: 1868 - DNA, 2271 bp, Artificial Sequence
  Synthetic Polynucloetide
atggccttaccagtgaccgccttgctcctgccgctggccttgctgctccacgccgccaggccggaagtgcagctggttgaatctggcggaggactggttcagcctggcggatctctgagactgtcttgtgccgccagcggcttcagcttcagcgacttttggatgagctgggtccgacaggcccctggcaaaggacttgaatgggtcgccacaatcagccaggccggcagcgagaaggactacgtggactctgtgaagggcagattcaccatcagccgggacaacgccaagaagtccctgtacctccagatgaacagcctgagagccgaggacaccgccgtgtactattgtgcctctggcgtgtacagcttcgactacagaggccagggcaccctggtcacagtctcttctggtaccggcggaggcggatctggcggcggaggtagcggtggcggaggatctgaattcgacgagatcgtgctgacccagagccctgatagcctggccgtgtctctgggcgagagagccaccatcaactgcaaggccagccagagcgtggacttcgacggcgacagctacctgaactggtatcagcagaagcccggccagccccccaaggtgctgatctatgccgccagcacactgcagagcggcgtgcccagcagattttctggcagcggctccggcaccgacttcaccctgaccatcaacagcctggaagccgaggacgccgccacctactactgccagcagagcaacgaggacccctggacctttggcggcggaacaaaggtggaaatcaagctcgaggacctgaagaacgtgttcccacctgaggtggccgtgttcgagcctagcgaggccgagatcagccacacccagaaagccaccctcgtgtgcctggctaccggcttctaccccgaccatgtggaactgtcttggtgggtcaacggcaaagaggtgcacagcggcgtgtgtaccgacccccagccactgaaagaacagcccgccctgaacgacagccggtactgcctgagcagcagactgagagtgtccgccaccttctggcagaacccccggaaccacttcagatgccaggtgcagttctacggcctgagcgagaacgacgagtggacccaggacagagccaagcccgtgacccagatcgtgtctgccgaagcctggggcagagccgattgcggctttaccagcgagagctaccagcagggcgtgctgagcgccaccatcctgtacgagatcctgctgggcaaggccaccctgtacgccgtgctggtgtctgccctggtgctgatggctatggtcaagcggaaggacagccggggaagggccaagcgatctggatctggagcaacaaacttctcactactcaaacaagcaggtgacgtggaggagaatcccgggcctactagtatggactggatttggcgcatccttttccttgtcggcgctgctaccggcgcgcattccttcgaacaggtgcaactggtgcagtccggcgctgaagtgaagaaacctggggccagcgtgaaggtgtcctgcaaggtgtccggctacacctttaccgactactacattacctgggtgcgccaggcccctggacaggccctggaatggatgggctggatctaccccggcagcggcaacaccaagtacagccagaagttccagggcagattcgtgttcagcgtggacaccagcgccagcaccgcctacctgcaactgtctagcctgaaggccgaagataccgccgtgtactactgcgccaactacggcaactattggttcgcctattggggccagggaacccttgtgaccgtgtcctctacgcgtatccagaaccctgatcctgccgtgtaccagctgcgggatagcaagagcagcgacaagagcgtgtgtctgttcaccgacttcgacagccagaccaacgtgtcccagagcaaggactccgacgtgtacatcaccgataagtgcgtgctggacatgcggagcatggacttcaagagcaactccgccgtggcctggtccaacaagtccgatttcgcctgcgccaacgccttcaacaacagcattatccccgaggacacattcttcccaagccccgagagcagctgcgacgtgaagctggtggaaaagagcttcgagacagacaccaacctgaacttccagaacctgagcgtgatcggcttcagaatcctgctgctgaaagtggccggctttaacctgctgatgaccctgcggctgtggtccagc

SEQ ID NO: 1869 - DNA, 2262 bp, Artificial Sequence
  Synthetic Polynucloetide
atggccttaccagtgaccgccttgctcctgccgctggccttgctgctccacgccgccaggccggaagtgcagctggttgaatctggcggaggactggttcagcctggcggatctctgagactgtcttgtgccgccagcggcttcagcttcagcgacttttggatgagctgggtccgacaggcccctggcaaaggacttgaatgggtcgccacaatcagccaggccggcagcgagaaggactacgtggactctgtgaagggcagattcaccatcagccgggacaacgccaagaagtccctgtacctccagatgaacagcctgagagccgaggacaccgccgtgtactattgtgcctctggcgtgtacagcttcgactacagaggccagggcaccctggtcacagtctcttctggtaccggcggaggcggatctggcggcggaggtagcggtggcggaggatctgaattcgacatccagatgacccagagccccagcagcctgtctgccagcgtgggcgacagagtgaccatcacctgtagagccagccagggcatcagctcttggctggcctggtatcagcagaagcccgagaaggcccccaagagcctgatctacgccgcctctagtctccagagcggcgtgcccagcagattttctggcagcggctccggcaccgacttcaccctgacaatcagctccctccagcccgaggacttcgccacctactactgccagcagtacaacagctaccctcccacctttggcggaggcaccaaggtggaaatcaagctcgaggacctgaagaacgtgttcccacctgaggtggccgtgttcgagcctagcgaggccgagatcagccacacccagaaagccaccctcgtgtgcctggctaccggcttctaccccgaccatgtggaactgtcttggtgggtcaacggcaaagaggtgcacagcggcgtgtgtaccgacccccagccactgaaagaacagcccgccctgaacgacagccggtactgcctgagcagcagactgagagtgtccgccaccttctggcagaacccccggaaccacttcagatgccaggtgcagttctacggcctgagcgagaacgacgagtggacccaggacagagccaagcccgtgacccagatcgtgtctgccgaagcctggggcagagccgattgcggctttaccagcgagagctaccagcagggcgtgctgagcgccaccatcctgtacgagatcctgctgggcaaggccaccctgtacgccgtgctggtgtctgccctggtgctgatggctatggtcaagcggaaggacagccggggaagggccaagcgatctggatctggagcaacaaacttctcactactcaaacaagcaggtgacgtggaggagaatcccgggcctactagtatggactggatttggcgcatccttttccttgtcggcgctgctaccggcgcgcattccttcgaagaagtgcaactggtgcagtctggcggagggctggtgcatcctgggggaagcctgagactgagctgtgccggctctggcttcgccttcagcagcagcaccatgcactggatcagacaggcccctggcaagggcctggaatggatcagcctgatcggaagcggagggggcatctactacggcgacagcgtgaagggccggttcaccatcagccgggacaacgccaagaacagcctgtacctccagatgaactccctgcgggccgaggacatggccgtgtactattgtgtgcggggctacttcgactgggtggactacttcgattactggggccagggcaccctcgtgaccgtgtcatctacgcgtatccagaaccctgatcctgccgtgtaccagctgcgggatagcaagagcagcgacaagagcgtgtgtctgttcaccgacttcgacagccagaccaacgtgtcccagagcaaggactccgacgtgtacatcaccgataagtgcgtgctggacatgcggagcatggacttcaagagcaactccgccgtggcctggtccaacaagtccgatttcgcctgcgccaacgccttcaacaacagcattatccccgaggacacattcttcccaagccccgagagcagctgcgacgtgaagctggtggaaaagagcttcgagacagacaccaacctgaacttccagaacctgagcgtgatcggcttcagaatcctgctgctgaaagtggccggctttaacctgctgatgaccctgcggctgtggtccagc

SEQ ID NO: 1870 - DNA, 2292 bp, Artificial Sequence
  Synthetic Polynucloetide
atggccttaccagtgaccgccttgctcctgccgctggccttgctgctccacgccgccaggccggaagtgcagctggttgaatctggcggaggactggttcagcctggcggatctctgagactgtcttgtgccgccagcggcttcagcttcagcgacttttggatgagctgggtccgacaggcccctggcaaaggacttgaatgggtcgccacaatcagccaggccggcagcgagaaggactacgtggactctgtgaagggcagattcaccatcagccgggacaacgccaagaagtccctgtacctccagatgaacagcctgagagccgaggacaccgccgtgtactattgtgcctctggcgtgtacagcttcgactacagaggccagggcaccctggtcacagtctcttctggtaccggcggaggcggatctggcggcggaggtagcggtggcggaggatctgaattcgacgacatcgtgatgacacagtcaccagatagcctcaccgtctccctgggggagcggaccaccattaattgtaaatccagccaaagcgtgctggactcaagcaagaacaagaatagcctcgcctggtatcagcagaagcccggtcagcctccaaagctgctgctttcttgggcctccaccagagagtccgggattcctgataggtttagtggttcaggctccggcacagattttactctgaccattgattctctccagccagaggattctgcaacttattactgccagcaaagcgcccactttcctataacttttggccagggaacccgacttgaaatcaagctcgaggacctgaagaacgtgttcccacctgaggtggccgtgttcgagcctagcgaggccgagatcagccacacccagaaagccaccctcgtgtgcctggctaccggcttctaccccgaccatgtggaactgtcttggtgggtcaacggcaaagaggtgcacagcggcgtgtgtaccgacccccagccactgaaagaacagcccgccctgaacgacagccggtactgcctgagcagcagactgagagtgtccgccaccttctggcagaacccccggaaccacttcagatgccaggtgcagttctacggcctgagcgagaacgacgagtggacccaggacagagccaagcccgtgacccagatcgtgtctgccgaagcctggggcagagccgattgcggctttaccagcgagagctaccagcagggcgtgctgagcgccaccatcctgtacgagatcctgctgggcaaggccaccctgtacgccgtgctggtgtctgccctggtgctgatggctatggtcaagcggaaggacagccggggaagggccaagcgatctggatctggagcaacaaacttctcactactcaaacaagcaggtgacgtggaggagaatcccgggcctactagtatggactggatttggcgcatccttttccttgtcggcgctgctaccggcgcgcattccttcgaacaggtgcagctggtgcagagcggtgccgaagtgaagaaaccaggtgcatccgttaaagtttcatgtaaggctagtggatataccttcaccaattacggaatgaactgggtgaaacaggcccctggccagggactgaagtggatggggtggattaacacctacaccggggagccgacttatgcagacgactttaaggggcgggtcacgatgacctccgacacctccaccagtaccgcctacctggagctgcacaaccttaggtcagacgataccgccgtgtattactgtgcccgatggtcttggtccgacggatactatgtctacttcgactattggggccaggggaccacagttaccgtgtcctctacgcgtatccagaaccctgatcctgccgtgtaccagctgcgggatagcaagagcagcgacaagagcgtgtgtctgttcaccgacttcgacagccagaccaacgtgtcccagagcaaggactccgacgtgtacatcaccgataagtgcgtgctggacatgcggagcatggacttcaagagcaactccgccgtggcctggtccaacaagtccgatttcgcctgcgccaacgccttcaacaacagcattatccccgaggacacattcttcccaagccccgagagcagctgcgacgtgaagctggtggaaaagagcttcgagacagacaccaacctgaacttccagaacctgagcgtgatcggcttcagaatcctgctgctgaaagtggccggctttaacctgctgatgaccctgcggctgtggtccagc

SEQ ID NO: 1871 - DNA, 2280 bp, Artificial Sequence
  Synthetic Polynucloetide
atggccttaccagtgaccgccttgctcctgccgctggccttgctgctccacgccgccaggccggaagtgcagctggttgaatctggcggaggactggttcagcctggcggatctctgagactgtcttgtgccgccagcggcttcagcttcagcgacttttggatgagctgggtccgacaggcccctggcaaaggacttgaatgggtcgccacaatcagccaggccggcagcgagaaggactacgtggactctgtgaagggcagattcaccatcagccgggacaacgccaagaagtccctgtacctccagatgaacagcctgagagccgaggacaccgccgtgtactattgtgcctctggcgtgtacagcttcgactacagaggccagggcaccctggtcacagtctcttctggtaccggcggaggcggatctggcggcggaggtagcggtggcggaggatctgaattcgacgagatcgtgctgacacagagccctggaagcctggccgtgtctcctggcgagcgcgtgacaatgagctgcaagagcagccagagcgtgttcttcagcagctcccagaagaactacctggcctggtatcagcagatccccggccagagccccagactgctgatctactgggccagcaccagagaaagcggcgtgcccgatagattcaccggcagcggctctggcaccgacttcaccctgacaatcagcagcgtgcagcccgaggacctggctatctactactgccaccagtacctgagcagccggaccttcggccagggcaccaagctggaaatcaagagactcgaggacctgaagaacgtgttcccacctgaggtggccgtgttcgagcctagcgaggccgagatcagccacacccagaaagccaccctcgtgtgcctggctaccggcttctaccccgaccatgtggaactgtcttggtgggtcaacggcaaagaggtgcacagcggcgtgtgtaccgacccccagccactgaaagaacagcccgccctgaacgacagccggtactgcctgagcagcagactgagagtgtccgccaccttctggcagaacccccggaaccacttcagatgccaggtgcagttctacggcctgagcgagaacgacgagtggacccaggacagagccaagcccgtgacccagatcgtgtctgccgaagcctggggcagagccgattgcggctttaccagcgagagctaccagcagggcgtgctgagcgccaccatcctgtacgagatcctgctgggcaaggccaccctgtacgccgtgctggtgtctgccctggtgctgatggctatggtcaagcggaaggacagccggggaagggccaagcgatctggatctggagcaacaaacttctcactactcaaacaagcaggtgacgtggaggagaatcccgggcctactagtatggactggatttggcgcatccttttccttgtcggcgctgctaccggcgcgcattccttcgaacaggtgcaactgcagcagcctggcgctgaggtcgtgaagccaggcgcttccgtgaagatgtcctgcaaggccagcggctacaccttcaccagctactacatccactggatcaagcagacccctggacagggcctggaatgggtgggagtgatctaccccggcaacgacgacatcagctacaaccagaagttccagggcaaggccaccctgaccgccgacaagtctagcaccaccgcctacatgcaactgtccagcctgaccagcgaggacagcgccgtgtactactgcgccagagaagtgcggctgcggtacttcgatgtgtggggccagggaaccaccgtgaccgtgtcatctacgcgtatccagaaccctgatcctgccgtgtaccagctgcgggatagcaagagcagcgacaagagcgtgtgtctgttcaccgacttcgacagccagaccaacgtgtcccagagcaaggactccgacgtgtacatcaccgataagtgcgtgctggacatgcggagcatggacttcaagagcaactccgccgtggcctggtccaacaagtccgatttcgcctgcgccaacgccttcaacaacagcattatccccgaggacacattcttcccaagccccgagagcagctgcgacgtgaagctggtggaaaagagcttcgagacagacaccaacctgaacttccagaacctgagcgtgatcggcttcagaatcctgctgctgaaagtggccggctttaacctgctgatgaccctgcggctgtggtccagc

SEQ ID NO: 1872 - DNA, 2292 bp, Artificial Sequence
  Synthetic Polynucloetide
atggccttaccagtgaccgccttgctcctgccgctggccttgctgctccacgccgccaggccggaagtgcagctggttgaatctggcggaggactggttcagcctggcggatctctgagactgtcttgtgccgccagcggcttcagcttcagcgacttttggatgagctgggtccgacaggcccctggcaaaggacttgaatgggtcgccacaatcagccaggccggcagcgagaaggactacgtggactctgtgaagggcagattcaccatcagccgggacaacgccaagaagtccctgtacctccagatgaacagcctgagagccgaggacaccgccgtgtactattgtgcctctggcgtgtacagcttcgactacagaggccagggcaccctggtcacagtctcttctggtaccggcggaggcggatctggcggcggaggtagcggtggcggaggatctgaattcgatgtgctgctgacccagagccctctgagcctgcctgtgacactgggacagcctgccagcatctcctgtcggagcagccagaccatcgtgcacagcaacggcaacacctacctggaatggttccagcagcggccaggccagagccccagactgctgatctaccaggtgtccaacagattcagcggcgtgcccgacagattctccggcagcggctctggcaccgacttcaccctgaagatcagccgggtggaagccgaggacgtgggcgtgtactactgttttcaaggcagccacgtgccccggacctttggcggaggaacaaaggtggaaatcaagagagccctcgaggacctgaagaacgtgttcccacctgaggtggccgtgttcgagcctagcgaggccgagatcagccacacccagaaagccaccctcgtgtgcctggctaccggcttctaccccgaccatgtggaactgtcttggtgggtcaacggcaaagaggtgcacagcggcgtgtgtaccgacccccagccactgaaagaacagcccgccctgaacgacagccggtactgcctgagcagcagactgagagtgtccgccaccttctggcagaacccccggaaccacttcagatgccaggtgcagttctacggcctgagcgagaacgacgagtggacccaggacagagccaagcccgtgacccagatcgtgtctgccgaagcctggggcagagccgattgcggctttaccagcgagagctaccagcagggcgtgctgagcgccaccatcctgtacgagatcctgctgggcaaggccaccctgtacgccgtgctggtgtctgccctggtgctgatggctatggtcaagcggaaggacagccggggaagggccaagcgatctggatctggagcaacaaacttctcactactcaaacaagcaggtgacgtggaggagaatcccgggcctactagtatggactggatttggcgcatccttttccttgtcggcgctgctaccggcgcgcattccttcgaacagatccaactggtgcagagcggcagcgagctgaagaaacctggggccagcgtgaaggtgtcctgcaaggccagcggctacacctttaccaactacggcatgaactgggtgcgccaggcccctggacagggcctgaaatggatgggctggatcaacaccaacaccggcgagcctaagtacgccgaagagttcaagggcagattcgccctgagcctggacaccagcgtgtccacagcctacctccagatcaacagcctgaaggccgaggataccgccgtgtacttctgcgccagaggctacggcaactacgccagaggggcttggctggcctattggggccagggaacactcgtgaccgtgtcctctacgcgtatccagaaccctgatcctgccgtgtaccagctgcgggatagcaagagcagcgacaagagcgtgtgtctgttcaccgacttcgacagccagaccaacgtgtcccagagcaaggactccgacgtgtacatcaccgataagtgcgtgctggacatgcggagcatggacttcaagagcaactccgccgtggcctggtccaacaagtccgatttcgcctgcgccaacgccttcaacaacagcattatccccgaggacacattcttcccaagccccgagagcagctgcgacgtgaagctggtggaaaagagcttcgagacagacaccaacctgaacttccagaacctgagcgtgatcggcttcagaatcctgctgctgaaagtggccggctttaacctgctgatgaccctgcggctgtggtccagc

SEQ ID NO: 1873 - DNA, 2247 bp, Artificial Sequence
  Synthetic Polynucloetide
atggccttaccagtgaccgccttgctcctgccgctggccttgctgctccacgccgccaggccggaagtgcagctggttgaatctggcggaggactggttcagcctggcggatctctgagactgtcttgtgccgccagcggcttcagcttcagcgacttttggatgagctgggtccgacaggcccctggcaaaggacttgaatgggtcgccacaatcagccaggccggcagcgagaaggactacgtggactctgtgaagggcagattcaccatcagccgggacaacgccaagaagtccctgtacctccagatgaacagcctgagagccgaggacaccgccgtgtactattgtgcctctggcgtgtacagcttcgactacagaggccagggcaccctggtcacagtctcttctggtaccggcggaggcggatctggcggcggaggtagcggtggcggaggatctgaattcgacgagatcgtgctgacacagagccctgccacactctctctgagccctggcgaaagagccaccctgagctgtagcgccagcagcagcatcaactacatctactggctccagcagaagcccggccaggcccccagaatcctgatctacctgaccagcaacctggcctccggcgtgccagccagattttctggcagcggctccggcaccgacttcaccctgacaatcagcagcctggaacccgaggacttcgccgtgtactactgcctccagtggtccagcaaccccctgacctttggcggaggcaccaaggtggaaatcaagctcgaggacctgaagaacgtgttcccacctgaggtggccgtgttcgagcctagcgaggccgagatcagccacacccagaaagccaccctcgtgtgcctggctaccggcttctaccccgaccatgtggaactgtcttggtgggtcaacggcaaagaggtgcacagcggcgtgtgtaccgacccccagccactgaaagaacagcccgccctgaacgacagccggtactgcctgagcagcagactgagagtgtccgccaccttctggcagaacccccggaaccacttcagatgccaggtgcagttctacggcctgagcgagaacgacgagtggacccaggacagagccaagcccgtgacccagatcgtgtctgccgaagcctggggcagagccgattgcggctttaccagcgagagctaccagcagggcgtgctgagcgccaccatcctgtacgagatcctgctgggcaaggccaccctgtacgccgtgctggtgtctgccctggtgctgatggctatggtcaagcggaaggacagccggggaagggccaagcgatctggatctggagcaacaaacttctcactactcaaacaagcaggtgacgtggaggagaatcccgggcctactagtatggactggatttggcgcatccttttccttgtcggcgctgctaccggcgcgcattccttcgaagaagtgcaactggtggaaagcgggggaggacttgtgaagcctggcggctctctgagactgagctgtgccgcctctggcttcaccttcagcagctacgacatgagctgggtgcgccaggctcctggcaagggactggaatgggtgtccaccatcagcagcggcggcagctacacctactacctggacagcatcaagggccggttcaccatctccagagacaacgccaagaacagcctgtacctccagatgaactccctgcgggccgaggacacagccgtgtattattgcgccagacagggcctggattactggggcagaggcacccttgtgaccgtgtcctctacgcgtatccagaaccctgatcctgccgtgtaccagctgcgggatagcaagagcagcgacaagagcgtgtgtctgttcaccgacttcgacagccagaccaacgtgtcccagagcaaggactccgacgtgtacatcaccgataagtgcgtgctggacatgcggagcatggacttcaagagcaactccgccgtggcctggtccaacaagtccgatttcgcctgcgccaacgccttcaacaacagcattatccccgaggacacattcttcccaagccccgagagcagctgcgacgtgaagctggtggaaaagagcttcgagacagacaccaacctgaacttccagaacctgagcgtgatcggcttcagaatcctgctgctgaaagtggccggctttaacctgctgatgaccctgcggctgtggtccagc

SEQ ID NO: 1874 - DNA, 2274 bp, Artificial Sequence
  Synthetic Polynucloetide
atggccttaccagtgaccgccttgctcctgccgctggccttgctgctccacgccgccaggccggaagtgcagctggttgaatctggcggaggactggttcagcctggcggatctctgagactgtcttgtgccgccagcggcttcagcttcagcgacttttggatgagctgggtccgacaggcccctggcaaaggacttgaatgggtcgccacaatcagccaggccggcagcgagaaggactacgtggactctgtgaagggcagattcaccatcagccgggacaacgccaagaagtccctgtacctccagatgaacagcctgagagccgaggacaccgccgtgtactattgtgcctctggcgtgtacagcttcgactacagaggccagggcaccctggtcacagtctcttctggtaccggcggaggcggatctggcggcggaggtagcggtggcggaggatctgaattcgacatcgtgatgacccagagccccgatagcctggccgtgtctctgggagagagagccaccatcaactgccgggccagcaagagcgtgtccaccagcggctacagcttcatgcactggtatcagcagaagcccggccagccccccaagctgctgatctacctggcctccaacctggaaagcggcgtgcccgatagattcagcggcagcggctctggcaccgacttcaccctgaccatcagttctcttcaggccgaggacgtggccgtgtactactgccagcacagcagagaggtgccctggacattcggccagggcacaaaggtggaaatcaagcggctcgaggacctgaagaacgtgttcccacctgaggtggccgtgttcgagcctagcgaggccgagatcagccacacccagaaagccaccctcgtgtgcctggctaccggcttctaccccgaccatgtggaactgtcttggtgggtcaacggcaaagaggtgcacagcggcgtgtgtaccgacccccagccactgaaagaacagcccgccctgaacgacagccggtactgcctgagcagcagactgagagtgtccgccaccttctggcagaacccccggaaccacttcagatgccaggtgcagttctacggcctgagcgagaacgacgagtggacccaggacagagccaagcccgtgacccagatcgtgtctgccgaagcctggggcagagccgattgcggctttaccagcgagagctaccagcagggcgtgctgagcgccaccatcctgtacgagatcctgctgggcaaggccaccctgtacgccgtgctggtgtctgccctggtgctgatggctatggtcaagcggaaggacagccggggaagggccaagcgatctggatctggagcaacaaacttctcactactcaaacaagcaggtgacgtggaggagaatcccgggcctactagtatggactggatttggcgcatccttttccttgtcggcgctgctaccggcgcgcattccttcgaacaggtgcagctggtgcagtctggggccgaagtgaagaaacctggggccagcgtgaaggtgtcctgcaaggccagcggatacacctttaccaactacggcatgaactgggtgcgccaggcccctggacagggcctggaatggatgggctggatcaacacctacaccggcgagcccacatacgccgacgccttcaagggcagattcgccttcagcctggacaccagcacctccaccgcctacctccagatcaacagcctgcggagcgacgacaccgccgtgtattattgcgccagagattacggcgactacgggatggactattggggccagggaaccaccgtgaccgtgtcctctacgcgtatccagaaccctgatcctgccgtgtaccagctgcgggatagcaagagcagcgacaagagcgtgtgtctgttcaccgacttcgacagccagaccaacgtgtcccagagcaaggactccgacgtgtacatcaccgataagtgcgtgctggacatgcggagcatggacttcaagagcaactccgccgtggcctggtccaacaagtccgatttcgcctgcgccaacgccttcaacaacagcattatccccgaggacacattcttcccaagccccgagagcagctgcgacgtgaagctggtggaaaagagcttcgagacagacaccaacctgaacttccagaacctgagcgtgatcggcttcagaatcctgctgctgaaagtggccggctttaacctgctgatgaccctgcggctgtggtccagc

SEQ ID NO: 1875 - DNA, 2262 bp, Artificial Sequence
  Synthetic Polynucloetide
atggccttaccagtgaccgccttgctcctgccgctggccttgctgctccacgccgccaggccggaagtgcagctggttgaatctggcggaggactggttcagcctggcggatctctgagactgtcttgtgccgccagcggcttcagcttcagcgacttttggatgagctgggtccgacaggcccctggcaaaggacttgaatgggtcgccacaatcagccaggccggcagcgagaaggactacgtggactctgtgaagggcagattcaccatcagccgggacaacgccaagaagtccctgtacctccagatgaacagcctgagagccgaggacaccgccgtgtactattgtgcctctggcgtgtacagcttcgactacagaggccagggcaccctggtcacagtctcttctggtaccggcggaggcggatctggcggcggaggtagcggtggcggaggatctgaattcgacatcgtgatgacccagacccccctgaccctgagcgtgacaatcggacagcctgccagcatctcctgcaagagcagccagagcctgctggacagcgacggcaagacctacctgaactggctgctgcagaggccaggccagagccccgagagactgatctacctggtgtccaagctggactccggcgtgcccgatagattcacaggcagcggctccggcaccgacttcaccctgaagatcagccgggtggaagccgaggacctgggcgtgtactgttgttggcagggcacccacttcccttacaccttcggcggagggaccaaggtggaaatcaagggcctcgaggacctgaagaacgtgttcccacctgaggtggccgtgttcgagcctagcgaggccgagatcagccacacccagaaagccaccctcgtgtgcctggctaccggcttctaccccgaccatgtggaactgtcttggtgggtcaacggcaaagaggtgcacagcggcgtgtgtaccgacccccagccactgaaagaacagcccgccctgaacgacagccggtactgcctgagcagcagactgagagtgtccgccaccttctggcagaacccccggaaccacttcagatgccaggtgcagttctacggcctgagcgagaacgacgagtggacccaggacagagccaagcccgtgacccagatcgtgtctgccgaagcctggggcagagccgattgcggctttaccagcgagagctaccagcagggcgtgctgagcgccaccatcctgtacgagatcctgctgggcaaggccaccctgtacgccgtgctggtgtctgccctggtgctgatggctatggtcaagcggaaggacagccggggaagggccaagcgatctggatctggagcaacaaacttctcactactcaaacaagcaggtgacgtggaggagaatcccgggcctactagtatggactggatttggcgcatccttttccttgtcggcgctgctaccggcgcgcattccttcgaacaggtgcaactgcagcagcctggcgctgaacttgtgcggccaggcgcctctgtgaagctgagctgtaaagccagcggctacaccttcaccagctactggatgaactgggtcaagcagcgcccaggccagggcctggaatggatcggaatgatcgaccccagcgacagcgagacacactacaaccacatcttcaaggacaaggccaccctgaccgtggacaagtccagcagcacagcctacctgcaactgtccagcctgaccagcgaggacagcgccgtgtactactgcgcccggaacctgtatctgtggggccagggaacaagcgtgaccgtgtctagcacgcgtatccagaaccctgatcctgccgtgtaccagctgcgggatagcaagagcagcgacaagagcgtgtgtctgttcaccgacttcgacagccagaccaacgtgtcccagagcaaggactccgacgtgtacatcaccgataagtgcgtgctggacatgcggagcatggacttcaagagcaactccgccgtggcctggtccaacaagtccgatttcgcctgcgccaacgccttcaacaacagcattatccccgaggacacattcttcccaagccccgagagcagctgcgacgtgaagctggtggaaaagagcttcgagacagacaccaacctgaacttccagaacctgagcgtgatcggcttcagaatcctgctgctgaaagtggccggctttaacctgctgatgaccctgcggctgtggtccagc

SEQ ID NO: 1876 - DNA, 2286 bp, Artificial Sequence
  Synthetic Polynucloetide
atggccttaccagtgaccgccttgctcctgccgctggccttgctgctccacgccgccaggccggaagtgcagctggttgaatctggcggaggactggttcagcctggcggatctctgagactgtcttgtgccgccagcggcttcagcttcagcgacttttggatgagctgggtccgacaggcccctggcaaaggacttgaatgggtcgccacaatcagccaggccggcagcgagaaggactacgtggactctgtgaagggcagattcaccatcagccgggacaacgccaagaagtccctgtacctccagatgaacagcctgagagccgaggacaccgccgtgtactattgtgcctctggcgtgtacagcttcgactacagaggccagggcaccctggtcacagtctcttctggtaccggcggaggcggatctggcggcggaggtagcggtggcggaggatctgaattcgacatcgtgatgacccagagccccgatagcctggccgtgtctctgggagagagagccaccatcaactgcgagagcagccagagcctgctgaacagcggcaaccagaagaactacctgacctggtatcagcagaagcccggccagccccccaagcccctgatctattgggccagcaccagagaaagcggcgtgcccgatagattcagcggcagcggaagcggcaccgacttcaccctgaccatcagttctcttcaggccgaggacgtggccgtgtactactgccagaacgactacagctacccctacaccttcggccagggcaccaagctggaaatcaagagactcgaggacctgaagaacgtgttcccacctgaggtggccgtgttcgagcctagcgaggccgagatcagccacacccagaaagccaccctcgtgtgcctggctaccggcttctaccccgaccatgtggaactgtcttggtgggtcaacggcaaagaggtgcacagcggcgtgtgtaccgacccccagccactgaaagaacagcccgccctgaacgacagccggtactgcctgagcagcagactgagagtgtccgccaccttctggcagaacccccggaaccacttcagatgccaggtgcagttctacggcctgagcgagaacgacgagtggacccaggacagagccaagcccgtgacccagatcgtgtctgccgaagcctggggcagagccgattgcggctttaccagcgagagctaccagcagggcgtgctgagcgccaccatcctgtacgagatcctgctgggcaaggccaccctgtacgccgtgctggtgtctgccctggtgctgatggctatggtcaagcggaaggacagccggggaagggccaagcgatctggatctggagcaacaaacttctcactactcaaacaagcaggtgacgtggaggagaatcccgggcctactagtatggactggatttggcgcatccttttccttgtcggcgctgctaccggcgcgcattccttcgaagaagtgcagctggtgcagtctggggccgaagtgaagaagcctggcgagagcctgaagatcagctgcaagggcagcggctacagcttcaccgactactacatgaagtgggccagacagatgcccggcaagggcctggaatggatgggcgacatcatccccagcaacggggccaccttctacaaccagaaattcaagggccaagtgaccatctccgccgacaagagcatcagcaccacctacctccagtggtccagcctgaaggccagcgacaccgccatgtactattgcgccagaagccatctgctgcgggccagttggttcgcctattggggccagggaacaatggtcacagtgtccagcacgcgtatccagaaccctgatcctgccgtgtaccagctgcgggatagcaagagcagcgacaagagcgtgtgtctgttcaccgacttcgacagccagaccaacgtgtcccagagcaaggactccgacgtgtacatcaccgataagtgcgtgctggacatgcggagcatggacttcaagagcaactccgccgtggcctggtccaacaagtccgatttcgcctgcgccaacgccttcaacaacagcattatccccgaggacacattcttcccaagccccgagagcagctgcgacgtgaagctggtggaaaagagcttcgagacagacaccaacctgaacttccagaacctgagcgtgatcggcttcagaatcctgctgctgaaagtggccggctttaacctgctgatgaccctgcggctgtggtccagc

SEQ ID NO: 1877 - DNA, 2271 bp, Artificial Sequence
  Synthetic Polynucloetide
atggccttaccagtgaccgccttgctcctgccgctggccttgctgctccacgccgccaggccggaagtgcagctggttgaatctggcggaggactggttcagcctggcggatctctgagactgtcttgtgccgccagcggcttcagcttcagcgacttttggatgagctgggtccgacaggcccctggcaaaggacttgaatgggtcgccacaatcagccaggccggcagcgagaaggactacgtggactctgtgaagggcagattcaccatcagccgggacaacgccaagaagtccctgtacctccagatgaacagcctgagagccgaggacaccgccgtgtactattgtgcctctggcgtgtacagcttcgactacagaggccagggcaccctggtcacagtctcttctggtaccggcggaggcggatctggcggcggaggtagcggtggcggaggatctgaattcgacatccagatgacccagtctaccagttccctgagtgcatccctcggagacagggtgacgatcagttgcagcgcaagccaagggatcaataactatctgaactggtatcagcagaaaccggacggaacagtcgaactcctgatttattacaccagcacccttcagagtggcgtcccttcccggttcagtggctccggaagcgggaccgattactccctgaccatttctaatctggagccagaggacataggaacgtattattgccagcagtatagtaaactgccacgaacttttggaggggggacgaaactggagatcaaactcgaggacctgaagaacgtgttcccacctgaggtggccgtgttcgagcctagcgaggccgagatcagccacacccagaaagccaccctcgtgtgcctggctaccggcttctaccccgaccatgtggaactgtcttggtgggtcaacggcaaagaggtgcacagcggcgtgtgtaccgacccccagccactgaaagaacagcccgccctgaacgacagccggtactgcctgagcagcagactgagagtgtccgccaccttctggcagaacccccggaaccacttcagatgccaggtgcagttctacggcctgagcgagaacgacgagtggacccaggacagagccaagcccgtgacccagatcgtgtctgccgaagcctggggcagagccgattgcggctttaccagcgagagctaccagcagggcgtgctgagcgccaccatcctgtacgagatcctgctgggcaaggccaccctgtacgccgtgctggtgtctgccctggtgctgatggctatggtcaagcggaaggacagccggggaagggccaagcgatctggatctggagcaacaaacttctcactactcaaacaagcaggtgacgtggaggagaatcccgggcctactagtatggactggatttggcgcatccttttccttgtcggcgctgctaccggcgcgcattccttcgaacaggtgcaactccagcagtccggaagcgagcttatgatgccaggggcatcagtgaagatcagctgcaaggctactggctacaccttctctaattactggatagagtgggttaaacaaaggccagggcacggcctggaatggatcggcgagatcctgcctgggacaggccgaaccatttataacgagaagttcaaaggcaaggctactttcaccgcagatataagctctaatacagtgcaaatgcagctctcttccctgacaagtgaggatagtgccgtgtattattgcgcacgaagagattactatggaaatttttattacgctatggattattggggtcaaggaacaagtgtgaccgttagcagcacgcgtatccagaaccctgatcctgccgtgtaccagctgcgggatagcaagagcagcgacaagagcgtgtgtctgttcaccgacttcgacagccagaccaacgtgtcccagagcaaggactccgacgtgtacatcaccgataagtgcgtgctggacatgcggagcatggacttcaagagcaactccgccgtggcctggtccaacaagtccgatttcgcctgcgccaacgccttcaacaacagcattatccccgaggacacattcttcccaagccccgagagcagctgcgacgtgaagctggtggaaaagagcttcgagacagacaccaacctgaacttccagaacctgagcgtgatcggcttcagaatcctgctgctgaaagtggccggctttaacctgctgatgaccctgcggctgtggtccagc

SEQ ID NO: 1878 - DNA, 2256 bp, Artificial Sequence
  Synthetic Polynucloetide
atggccttaccagtgaccgccttgctcctgccgctggccttgctgctccacgccgccaggccggaagtgcagctggttgaatctggcggaggactggttcagcctggcggatctctgagactgtcttgtgccgccagcggcttcagcttcagcgacttttggatgagctgggtccgacaggcccctggcaaaggacttgaatgggtcgccacaatcagccaggccggcagcgagaaggactacgtggactctgtgaagggcagattcaccatcagccgggacaacgccaagaagtccctgtacctccagatgaacagcctgagagccgaggacaccgccgtgtactattgtgcctctggcgtgtacagcttcgactacagaggccagggcaccctggtcacagtctcttctggtaccggcggaggcggatctggcggcggaggtagcggtggcggaggatctgaattcgacatccagatgacccagagccctgccagcctgtccgtgtctgtgggcgagacagtgaccatcacctgtcgggccagcgagaacatctacagcaacctggcctggtatcagcagaagcagggcaagagcccccaactgctggtgtacgccgccaccaatctggccgatggcgtgcccagcagattttccggctctggcagcggcacccagtacagcctgaagatcaacagcctccagagcgaggacttcggcagctactactgccagcacttctggggcacctggacctttggaggaggcaccaccctggaaatcaagctcgaggacctgaagaacgtgttcccacctgaggtggccgtgttcgagcctagcgaggccgagatcagccacacccagaaagccaccctcgtgtgcctggctaccggcttctaccccgaccatgtggaactgtcttggtgggtcaacggcaaagaggtgcacagcggcgtgtgtaccgacccccagccactgaaagaacagcccgccctgaacgacagccggtactgcctgagcagcagactgagagtgtccgccaccttctggcagaacccccggaaccacttcagatgccaggtgcagttctacggcctgagcgagaacgacgagtggacccaggacagagccaagcccgtgacccagatcgtgtctgccgaagcctggggcagagccgattgcggctttaccagcgagagctaccagcagggcgtgctgagcgccaccatcctgtacgagatcctgctgggcaaggccaccctgtacgccgtgctggtgtctgccctggtgctgatggctatggtcaagcggaaggacagccggggaagggccaagcgatctggatctggagcaacaaacttctcactactcaaacaagcaggtgacgtggaggagaatcccgggcctactagtatggactggatttggcgcatccttttccttgtcggcgctgctaccggcgcgcattccttcgaagaagtgcaactccagcagagcggccctgagcttgtgaagcctggcgcttccgtgaagatgagctgcaaggccagcggctacaccttcaccgactactacatgaagtggatgaagcagagccacggcaagtccctggaatggatcggcgacatcaaccccaacaacggcggcaccacctacaaccagaagttcaagggcaaggccaccctgaccgtggacaagagcagcagcaccgcctacatgcaactgaacagcctgaccagcgaggacagcgccgtgtactactgcgccagagactacggctacggctatttcgactactggggccagggcacaaccctgacagtgtcctctacgcgtatccagaaccctgatcctgccgtgtaccagctgcgggatagcaagagcagcgacaagagcgtgtgtctgttcaccgacttcgacagccagaccaacgtgtcccagagcaaggactccgacgtgtacatcaccgataagtgcgtgctggacatgcggagcatggacttcaagagcaactccgccgtggcctggtccaacaagtccgatttcgcctgcgccaacgccttcaacaacagcattatccccgaggacacattcttcccaagccccgagagcagctgcgacgtgaagctggtggaaaagagcttcgagacagacaccaacctgaacttccagaacctgagcgtgatcggcttcagaatcctgctgctgaaagtggccggctttaacctgctgatgaccctgcggctgtggtccagc

SEQ ID NO: 1879 - DNA, 2265 bp, Artificial Sequence
  Synthetic Polynucloetide
atggccttaccagtgaccgccttgctcctgccgctggccttgctgctccacgccgccaggccggaagtgcagctggttgaatctggcggaggactggttcagcctggcggatctctgagactgtcttgtgccgccagcggcttcagcttcagcgacttttggatgagctgggtccgacaggcccctggcaaaggacttgaatgggtcgccacaatcagccaggccggcagcgagaaggactacgtggactctgtgaagggcagattcaccatcagccgggacaacgccaagaagtccctgtacctccagatgaacagcctgagagccgaggacaccgccgtgtactattgtgcctctggcgtgtacagcttcgactacagaggccagggcaccctggtcacagtctcttctggtaccggcggaggcggatctggcggcggaggtagcggtggcggaggatctgaattcgagatcgtgctgacacagagccctggcaccctgagcctgtctccaggcgaaagagccacactgagctgtcgggcctctcagagcgtgggaggctacctggcttggtatcagcagaagccaggccaggcccccagactgctgatctacgacgccagcaatcgggccacaggcatccccgccagattttctggcagcggctccggcaccgacttcaccctgacaatcagcagcctggaacccgaggacttcgccgtgtactactgccagcagcggaacaactggccccccatgtacacattcggccagggcaccaagctggaaatcaagagactcgaggacctgaagaacgtgttcccacctgaggtggccgtgttcgagcctagcgaggccgagatcagccacacccagaaagccaccctcgtgtgcctggctaccggcttctaccccgaccatgtggaactgtcttggtgggtcaacggcaaagaggtgcacagcggcgtgtgtaccgacccccagccactgaaagaacagcccgccctgaacgacagccggtactgcctgagcagcagactgagagtgtccgccaccttctggcagaacccccggaaccacttcagatgccaggtgcagttctacggcctgagcgagaacgacgagtggacccaggacagagccaagcccgtgacccagatcgtgtctgccgaagcctggggcagagccgattgcggctttaccagcgagagctaccagcagggcgtgctgagcgccaccatcctgtacgagatcctgctgggcaaggccaccctgtacgccgtgctggtgtctgccctggtgctgatggctatggtcaagcggaaggacagccggggaagggccaagcgatctggatctggagcaacaaacttctcactactcaaacaagcaggtgacgtggaggagaatcccgggcctactagtatggactggatttggcgcatccttttccttgtcggcgctgctaccggcgcgcattccttcgaacaggtgcaactggtgcagagcggagccgaagtgaagaaacccggcagcagcgtgaaggtgtcctgcaaggcttccggcggcaccttcagcagctacgccatttcttgggtgcgccaggctcctggacagggcctggaatggatgggcggcatcatccctatcctgggcaccgccaactacgcccagaaattccagggcagagtgaccatcaccgccgacgagagcaccagcaccgcctacatggaactgagcagcctgcggagcgaggacacagccgtgtattattgcgccagatggggcggaggggccttcgacatttggggccagggaacaatggtcaccgtgtccagcacgcgtatccagaaccctgatcctgccgtgtaccagctgcgggatagcaagagcagcgacaagagcgtgtgtctgttcaccgacttcgacagccagaccaacgtgtcccagagcaaggactccgacgtgtacatcaccgataagtgcgtgctggacatgcggagcatggacttcaagagcaactccgccgtggcctggtccaacaagtccgatttcgcctgcgccaacgccttcaacaacagcattatccccgaggacacattcttcccaagccccgagagcagctgcgacgtgaagctggtggaaaagagcttcgagacagacaccaacctgaacttccagaacctgagcgtgatcggcttcagaatcctgctgctgaaagtggccggctttaacctgctgatgaccctgcggctgtggtccagc

SEQ ID NO: 1880 - DNA, 2250 bp, Artificial Sequence
  Synthetic Polynucloetide
atggccttaccagtgaccgccttgctcctgccgctggccttgctgctccacgccgccaggccggaagtgcagctggttgaatctggcggaggactggttcagcctggcggatctctgagactgtcttgtgccgccagcggcttcagcttcagcgacttttggatgagctgggtccgacaggcccctggcaaaggacttgaatgggtcgccacaatcagccaggccggcagcgagaaggactacgtggactctgtgaagggcagattcaccatcagccgggacaacgccaagaagtccctgtacctccagatgaacagcctgagagccgaggacaccgccgtgtactattgtgcctctggcgtgtacagcttcgactacagaggccagggcaccctggtcacagtctcttctggtaccggcggaggcggatctggcggcggaggtagcggtggcggaggatctgaattccagatcgtgctgacacagagccctgccctgatgagcgccagccctggcgagaaagtgaccatgacctgtagcgccagcagcagcgtgcgctacatgtactggtatcagcagaagcccagaagcagccccaagccctggattcacctgaccagcaatctggcctctggcgtgcccgctagattttccggctctggcagcggcaccagctacagcctgaccatcagcagcatggaagccgaggacgccgccacctactactgccagcagtggtccagccaccccttcacatttggctccggcaccaagctggaaatcaagctcgaggacctgaagaacgtgttcccacctgaggtggccgtgttcgagcctagcgaggccgagatcagccacacccagaaagccaccctcgtgtgcctggctaccggcttctaccccgaccatgtggaactgtcttggtgggtcaacggcaaagaggtgcacagcggcgtgtgtaccgacccccagccactgaaagaacagcccgccctgaacgacagccggtactgcctgagcagcagactgagagtgtccgccaccttctggcagaacccccggaaccacttcagatgccaggtgcagttctacggcctgagcgagaacgacgagtggacccaggacagagccaagcccgtgacccagatcgtgtctgccgaagcctggggcagagccgattgcggctttaccagcgagagctaccagcagggcgtgctgagcgccaccatcctgtacgagatcctgctgggcaaggccaccctgtacgccgtgctggtgtctgccctggtgctgatggctatggtcaagcggaaggacagccggggaagggccaagcgatctggatctggagcaacaaacttctcactactcaaacaagcaggtgacgtggaggagaatcccgggcctactagtatggactggatttggcgcatccttttccttgtcggcgctgctaccggcgcgcattccttcgaagatgtgcaactccaggaaagcggccctggccttgtgaagcctagccagagcctgtccctgacctgtaccgtgaccggcttcagcatcaccagcgactactcttggaactggatcagacagttccctggcaacaaactggaatggatgggctacatcagctactccggccacacctcctacaaccccagcctggaaagccggatctccatcaccagagacaccagcaagaaccagttcttcttgcaactgaacagcgtgaccaccgaggataccgccacatattactgtaccagaggcaactgggacgtggtgtactggggccagggcacacttgtgaccgtgtctgctacgcgtatccagaaccctgatcctgccgtgtaccagctgcgggatagcaagagcagcgacaagagcgtgtgtctgttcaccgacttcgacagccagaccaacgtgtcccagagcaaggactccgacgtgtacatcaccgataagtgcgtgctggacatgcggagcatggacttcaagagcaactccgccgtggcctggtccaacaagtccgatttcgcctgcgccaacgccttcaacaacagcattatccccgaggacacattcttcccaagccccgagagcagctgcgacgtgaagctggtggaaaagagcttcgagacagacaccaacctgaacttccagaacctgagcgtgatcggcttcagaatcctgctgctgaaagtggccggctttaacctgctgatgaccctgcggctgtggtccagc

SEQ ID NO: 1881 - DNA, 2280 bp, Artificial Sequence
  Synthetic Polynucloetide
atggccttaccagtgaccgccttgctcctgccgctggccttgctgctccacgccgccaggccggaagtgcagctggttgaatctggcggaggactggttcagcctggcggatctctgagactgtcttgtgccgccagcggcttcagcttcagcgacttttggatgagctgggtccgacaggcccctggcaaaggacttgaatgggtcgccacaatcagccaggccggcagcgagaaggactacgtggactctgtgaagggcagattcaccatcagccgggacaacgccaagaagtccctgtacctccagatgaacagcctgagagccgaggacaccgccgtgtactattgtgcctctggcgtgtacagcttcgactacagaggccagggcaccctggtcacagtctcttctggtaccggcggaggcggatctggcggcggaggtagcggtggcggaggatctgaattcgacgtcgtgatgacccagagccctctgagcctgcctgtgacactgggacagcctgccagcatctcctgtcggagcagccagagcatcgtgcacagcgacggcaacacctacctggaatggtatcagcagcggccaggccagagccccagacggctgatctacaaggtgtccaacagattcagcggcgtgcccgacagattctccggcagcggctctggcaccgacttcaccctgaagatcagcagagtggaagccgaggacgtgggcgtgtactactgttttcaaggcagccacgccccctggacctttggcggaggaacaaaggtggaaatcaagctcgaggacctgaagaacgtgttcccacctgaggtggccgtgttcgagcctagcgaggccgagatcagccacacccagaaagccaccctcgtgtgcctggctaccggcttctaccccgaccatgtggaactgtcttggtgggtcaacggcaaagaggtgcacagcggcgtgtgtaccgacccccagccactgaaagaacagcccgccctgaacgacagccggtactgcctgagcagcagactgagagtgtccgccaccttctggcagaacccccggaaccacttcagatgccaggtgcagttctacggcctgagcgagaacgacgagtggacccaggacagagccaagcccgtgacccagatcgtgtctgccgaagcctggggcagagccgattgcggctttaccagcgagagctaccagcagggcgtgctgagcgccaccatcctgtacgagatcctgctgggcaaggccaccctgtacgccgtgctggtgtctgccctggtgctgatggctatggtcaagcggaaggacagccggggaagggccaagcgatctggatctggagcaacaaacttctcactactcaaacaagcaggtgacgtggaggagaatcccgggcctactagtatggactggatttggcgcatccttttccttgtcggcgctgctaccggcgcgcattccttcgaagaagtgcaactggtggaatcaggcggcggactggtgcagcctggcggatctctgagactgagctgtgccgccagcggcttcaccttcagcagctacggaatgcactgggtgcgccaggcccctggcaaaggactggaatgggtggcctacatcaccaccagaagcagcaccatctactacgccgacagcgtgaagggccggttcaccatctccagagacaacgccaagaacagcctgtacctccagatgaactccctgcgggccgaggacaccgccgtgtactattgcaccagagagcccctgaccggctactacgctatggactattggggccagggcaccagcgtgaccgtgtctagtacgcgtatccagaaccctgatcctgccgtgtaccagctgcgggatagcaagagcagcgacaagagcgtgtgtctgttcaccgacttcgacagccagaccaacgtgtcccagagcaaggactccgacgtgtacatcaccgataagtgcgtgctggacatgcggagcatggacttcaagagcaactccgccgtggcctggtccaacaagtccgatttcgcctgcgccaacgccttcaacaacagcattatccccgaggacacattcttcccaagccccgagagcagctgcgacgtgaagctggtggaaaagagcttcgagacagacaccaacctgaacttccagaacctgagcgtgatcggcttcagaatcctgctgctgaaagtggccggctttaacctgctgatgaccctgcggctgtggtccagc

SEQ ID NO: 1882 - DNA, 2256 bp, Artificial Sequence
  Synthetic Polynucloetide
atggccttaccagtgaccgccttgctcctgccgctggccttgctgctccacgccgccaggccggaagtgcagctggttgaatctggcggaggactggttcagcctggcggatctctgagactgtcttgtgccgccagcggcttcagcttcagcgacttttggatgagctgggtccgacaggcccctggcaaaggacttgaatgggtcgccacaatcagccaggccggcagcgagaaggactacgtggactctgtgaagggcagattcaccatcagccgggacaacgccaagaagtccctgtacctccagatgaacagcctgagagccgaggacaccgccgtgtactattgtgcctctggcgtgtacagcttcgactacagaggccagggcaccctggtcacagtctcttctggtaccggcggaggcggatctggcggcggaggtagcggtggcggaggatctgaattcgacatccagatgacccagagccccagcagcctgtctgccagcgtgggcgacagagtgaccatcacctgtagagccagccagagcatcagcctgtggctgaactggtatcagcagaagcccggcaaggcccccaagctgctgatctacgccgccagcacactccagagcggcgtgccaagcagattttccggcagcggctccggcaccgacttcaccctgacaatcagctccctccagcccgaggacttcgccacctactactgccagcagtactacaccagcccctacaccttcggccagggcaccaaggtggaaatcaagagactcgaggacctgaagaacgtgttcccacctgaggtggccgtgttcgagcctagcgaggccgagatcagccacacccagaaagccaccctcgtgtgcctggctaccggcttctaccccgaccatgtggaactgtcttggtgggtcaacggcaaagaggtgcacagcggcgtgtgtaccgacccccagccactgaaagaacagcccgccctgaacgacagccggtactgcctgagcagcagactgagagtgtccgccaccttctggcagaacccccggaaccacttcagatgccaggtgcagttctacggcctgagcgagaacgacgagtggacccaggacagagccaagcccgtgacccagatcgtgtctgccgaagcctggggcagagccgattgcggctttaccagcgagagctaccagcagggcgtgctgagcgccaccatcctgtacgagatcctgctgggcaaggccaccctgtacgccgtgctggtgtctgccctggtgctgatggctatggtcaagcggaaggacagccggggaagggccaagcgatctggatctggagcaacaaacttctcactactcaaacaagcaggtgacgtggaggagaatcccgggcctactagtatggactggatttggcgcatccttttccttgtcggcgctgctaccggcgcgcattccttcgaacaggtgcaactgctggaatctggcggcggactggtgcagcctggcggatctctgagactgagctgtgccgccagcggcttcaccttcagcagctacgccatgagctgggtgcgccaggcccctggaaaaggactggaatgggtgtccgtgatccggtccagcggcagcagcacctattacgccgatagcgtgaagggccggttcaccatcagccgggacaacagcaagaacaccctgtacctccagatgaacagcctgcgggccgaggacaccgccgtgtactattgtgctaggggaggcggctacttcgactactggggccagggaacactcgtgaccgtgtcctctacgcgtatccagaaccctgatcctgccgtgtaccagctgcgggatagcaagagcagcgacaagagcgtgtgtctgttcaccgacttcgacagccagaccaacgtgtcccagagcaaggactccgacgtgtacatcaccgataagtgcgtgctggacatgcggagcatggacttcaagagcaactccgccgtggcctggtccaacaagtccgatttcgcctgcgccaacgccttcaacaacagcattatccccgaggacacattcttcccaagccccgagagcagctgcgacgtgaagctggtggaaaagagcttcgagacagacaccaacctgaacttccagaacctgagcgtgatcggcttcagaatcctgctgctgaaagtggccggctttaacctgctgatgaccctgcggctgtggtccagc

SEQ ID NO: 1883 - DNA, 2265 bp, Artificial Sequence
  Synthetic Polynucloetide
atggccttaccagtgaccgccttgctcctgccgctggccttgctgctccacgccgccaggccggaagtgcagctggttgaatctggcggaggactggttcagcctggcggatctctgagactgtcttgtgccgccagcggcttcagcttcagcgacttttggatgagctgggtccgacaggcccctggcaaaggacttgaatgggtcgccacaatcagccaggccggcagcgagaaggactacgtggactctgtgaagggcagattcaccatcagccgggacaacgccaagaagtccctgtacctccagatgaacagcctgagagccgaggacaccgccgtgtactattgtgcctctggcgtgtacagcttcgactacagaggccagggcaccctggtcacagtctcttctggtaccggcggaggcggatctggcggcggaggtagcggtggcggaggatctgaattcgacatccagatgacccagagccccagcagcctgtctgccagcgtgggcgacagagtgaccatcacctgtagagccagccagagcatcagcagctacctgaactggtatcagcagaagcccggcaaggcccccaaactgctgatctacgccgtgtccacactccagagcggcgtgcccagcagattttctggcagcggctccggcaccgacttcaccctgacaatcagctccctccagcccgaggacttcgccacctactactgtcagcagagcggcaccttccctcccaccacatttggacagggcaccaaggtggaaatcaagagactcgaggacctgaagaacgtgttcccacctgaggtggccgtgttcgagcctagcgaggccgagatcagccacacccagaaagccaccctcgtgtgcctggctaccggcttctaccccgaccatgtggaactgtcttggtgggtcaacggcaaagaggtgcacagcggcgtgtgtaccgacccccagccactgaaagaacagcccgccctgaacgacagccggtactgcctgagcagcagactgagagtgtccgccaccttctggcagaacccccggaaccacttcagatgccaggtgcagttctacggcctgagcgagaacgacgagtggacccaggacagagccaagcccgtgacccagatcgtgtctgccgaagcctggggcagagccgattgcggctttaccagcgagagctaccagcagggcgtgctgagcgccaccatcctgtacgagatcctgctgggcaaggccaccctgtacgccgtgctggtgtctgccctggtgctgatggctatggtcaagcggaaggacagccggggaagggccaagcgatctggatctggagcaacaaacttctcactactcaaacaagcaggtgacgtggaggagaatcccgggcctactagtatggactggatttggcgcatccttttccttgtcggcgctgctaccggcgcgcattccttcgaacaggtgcaactgctggaatctggcggcggactggtgcagcctggcggatctctgagactgagctgtgccgccagcggcttcaccttcagcagccacggaatgcactgggtgcgccaggcccctggaaagggactggaatgggtgtccgtgatctccggcagcggcagcaataccggctacgccgatagcgtgaagggccggttcaccatcagccgggacaacagcaagaacaccctgtacctccagatgaacagcctgcgggccgaggacaccgccgtgtactattgtgccagacagtggggcagctacgccttcgattcttggggccagggcaccctcgtgaccgtgtcatctacgcgtatccagaaccctgatcctgccgtgtaccagctgcgggatagcaagagcagcgacaagagcgtgtgtctgttcaccgacttcgacagccagaccaacgtgtcccagagcaaggactccgacgtgtacatcaccgataagtgcgtgctggacatgcggagcatggacttcaagagcaactccgccgtggcctggtccaacaagtccgatttcgcctgcgccaacgccttcaacaacagcattatccccgaggacacattcttcccaagccccgagagcagctgcgacgtgaagctggtggaaaagagcttcgagacagacaccaacctgaacttccagaacctgagcgtgatcggcttcagaatcctgctgctgaaagtggccggctttaacctgctgatgaccctgcggctgtggtccagc

SEQ ID NO: 1884 - DNA, 2295 bp, Artificial Sequence
  Synthetic Polynucloetide
atggccttaccagtgaccgccttgctcctgccgctggccttgctgctccacgccgccaggccggaagtgcagctggttgaatctggcggaggactggttcagcctggcggatctctgagactgtcttgtgccgccagcggcttcagcttcagcgacttttggatgagctgggtccgacaggcccctggcaaaggacttgaatgggtcgccacaatcagccaggccggcagcgagaaggactacgtggactctgtgaagggcagattcaccatcagccgggacaacgccaagaagtccctgtacctccagatgaacagcctgagagccgaggacaccgccgtgtactattgtgcctctggcgtgtacagcttcgactacagaggccagggcaccctggtcacagtctcttctggtaccggcggaggcggatctggcggcggaggtagcggtggcggaggatctgaattcgacatcgtgatgagccagagccctagcagcctggccgtgtccgtgggcgagaaagtgaccatgagctgcaagagcagccagtccctgctgcacagcagcaaccagaagaactacctggcctggtatcagcagaagcccggccagtcccccaaggtgctgatctactgggccagcaccagagaaagcggcgtgcccgatagattcaccggcagcggctctggcaccgacttcaccctgaccatcaccagcgtgaagtccgaggacctggctgtgtactactgccagcagtattacagctacccctggaccttcggcggaggcacccggctggaaatcaaaagactcgaggacctgaagaacgtgttcccacctgaggtggccgtgttcgagcctagcgaggccgagatcagccacacccagaaagccaccctcgtgtgcctggctaccggcttctaccccgaccatgtggaactgtcttggtgggtcaacggcaaagaggtgcacagcggcgtgtgtaccgacccccagccactgaaagaacagcccgccctgaacgacagccggtactgcctgagcagcagactgagagtgtccgccaccttctggcagaacccccggaaccacttcagatgccaggtgcagttctacggcctgagcgagaacgacgagtggacccaggacagagccaagcccgtgacccagatcgtgtctgccgaagcctggggcagagccgattgcggctttaccagcgagagctaccagcagggcgtgctgagcgccaccatcctgtacgagatcctgctgggcaaggccaccctgtacgccgtgctggtgtctgccctggtgctgatggctatggtcaagcggaaggacagccggggaagggccaagcgatctggatctggagcaacaaacttctcactactcaaacaagcaggtgacgtggaggagaatcccgggcctactagtatggactggatttggcgcatccttttccttgtcggcgctgctaccggcgcgcattccttcgaagaagtgcaactccagcagagcgtggccgagcttgtgaagcctggcgcttccgtgaagatgtcctgcaaggtgtccggctacaccctgacagaccacaccatccactggatgaagcagcggcctgagcagggcctggaatggatcggctacatctaccccagggacggcatcaccggctacaacgagaagttcaagggcaaggccacactgaccgccgacaccagcagcagcacagcctacatgcaactgaacagcctgaccagcgaggacagcgccgtgtacttctgtgccagatggggctacagctacagaaactacgcctactactacgactactggggccagggcacaaccctgaccgtgtctagtacgcgtatccagaaccctgatcctgccgtgtaccagctgcgggatagcaagagcagcgacaagagcgtgtgtctgttcaccgacttcgacagccagaccaacgtgtcccagagcaaggactccgacgtgtacatcaccgataagtgcgtgctggacatgcggagcatggacttcaagagcaactccgccgtggcctggtccaacaagtccgatttcgcctgcgccaacgccttcaacaacagcattatccccgaggacacattcttcccaagccccgagagcagctgcgacgtgaagctggtggaaaagagcttcgagacagacaccaacctgaacttccagaacctgagcgtgatcggcttcagaatcctgctgctgaaagtggccggctttaacctgctgatgaccctgcggctgtggtccagc

SEQ ID NO: 1885 - DNA, 2286 bp, Artificial Sequence
  Synthetic Polynucloetide
atggccttaccagtgaccgccttgctcctgccgctggccttgctgctccacgccgccaggccggaagtgcagctggttgaatctggcggaggactggttcagcctggcggatctctgagactgtcttgtgccgccagcggcttcagcttcagcgacttttggatgagctgggtccgacaggcccctggcaaaggacttgaatgggtcgccacaatcagccaggccggcagcgagaaggactacgtggactctgtgaagggcagattcaccatcagccgggacaacgccaagaagtccctgtacctccagatgaacagcctgagagccgaggacaccgccgtgtactattgtgcctctggcgtgtacagcttcgactacagaggccagggcaccctggtcacagtctcttctggtaccggcggaggcggatctggcggcggaggtagcggtggcggaggatctgaattcgagatcgtgctgacacagagccctggcaccctgagcctgtctccaggcgaaagagccacactgagctgtcgggccagccagagcgtgtccagctcttacctggcctggtatcagcagaagcccggccaggctccccggctgctgatctacggaacaagcagcagagccaccggcatccccgacagattttctggcagcggctccggcaccgacttcaccctgacaatcagcagactggaacccgaggacttcgccgtgtactactgccagcagtacggcagcagccccttcacctttggcggaggcaccaaggtggaaatcaagagactcgaggacctgaagaacgtgttcccacctgaggtggccgtgttcgagcctagcgaggccgagatcagccacacccagaaagccaccctcgtgtgcctggctaccggcttctaccccgaccatgtggaactgtcttggtgggtcaacggcaaagaggtgcacagcggcgtgtgtaccgacccccagccactgaaagaacagcccgccctgaacgacagccggtactgcctgagcagcagactgagagtgtccgccaccttctggcagaacccccggaaccacttcagatgccaggtgcagttctacggcctgagcgagaacgacgagtggacccaggacagagccaagcccgtgacccagatcgtgtctgccgaagcctggggcagagccgattgcggctttaccagcgagagctaccagcagggcgtgctgagcgccaccatcctgtacgagatcctgctgggcaaggccaccctgtacgccgtgctggtgtctgccctggtgctgatggctatggtcaagcggaaggacagccggggaagggccaagcgatctggatctggagcaacaaacttctcactactcaaacaagcaggtgacgtggaggagaatcccgggcctactagtatggactggatttggcgcatccttttccttgtcggcgctgctaccggcgcgcattccttcgaacaggtgcaactccaggaatctggccccggactggctaagcccagcgagacactgagcctgacctgtaccgtgtccggcgacagcatcaccagctactactggtcctggatcagacagccccctggcaagggcctggaatggatcggctacatctactacagcggcagcaccaactacaaccccagcctgaagtccagagtgaccatcagcgtggacaccagcaagaaccagttctccctgaagctgagcagcgtgacagccgccgacaccgccgtgtattattgcgccagagatcagcggagaatcgccgctgccggcacccacttttacggcatggatgtgtggggccagggcaccaccgtgaccgtgtcatctacgcgtatccagaaccctgatcctgccgtgtaccagctgcgggatagcaagagcagcgacaagagcgtgtgtctgttcaccgacttcgacagccagaccaacgtgtcccagagcaaggactccgacgtgtacatcaccgataagtgcgtgctggacatgcggagcatggacttcaagagcaactccgccgtggcctggtccaacaagtccgatttcgcctgcgccaacgccttcaacaacagcattatccccgaggacacattcttcccaagccccgagagcagctgcgacgtgaagctggtggaaaagagcttcgagacagacaccaacctgaacttccagaacctgagcgtgatcggcttcagaatcctgctgctgaaagtggccggctttaacctgctgatgaccctgcggctgtggtccagc

SEQ ID NO: 1886 - DNA, 2262 bp, Artificial Sequence
  Synthetic Polynucloetide
atggccttaccagtgaccgccttgctcctgccgctggccttgctgctccacgccgccaggccggaagtgcagctggttgaatctggcggaggactggttcagcctggcggatctctgagactgtcttgtgccgccagcggcttcagcttcagcgacttttggatgagctgggtccgacaggcccctggcaaaggacttgaatgggtcgccacaatcagccaggccggcagcgagaaggactacgtggactctgtgaagggcagattcaccatcagccgggacaacgccaagaagtccctgtacctccagatgaacagcctgagagccgaggacaccgccgtgtactattgtgcctctggcgtgtacagcttcgactacagaggccagggcaccctggtcacagtctcttctggtaccggcggaggcggatctggcggcggaggtagcggtggcggaggatctgaattcgacatcctgctgacccagagccccgtgatcctgtccgtgtctcctggcgagagagtgtccttcagctgtcgggccagccagagcatcggcaccaacatccactggtatcagcagcggaccaacggcagccccagactgctgattaagtacgccagcgagtccatcagcggcatccccagcagattttccggcagcggctccggcaccgacttcaccctgagcatcaacagcgtggaaagcgaggacattgccgactactactgccagcagaacaacaactggcccaccaccttcggagccggcaccaagctggaactgaagctcgaggacctgaagaacgtgttcccacctgaggtggccgtgttcgagcctagcgaggccgagatcagccacacccagaaagccaccctcgtgtgcctggctaccggcttctaccccgaccatgtggaactgtcttggtgggtcaacggcaaagaggtgcacagcggcgtgtgtaccgacccccagccactgaaagaacagcccgccctgaacgacagccggtactgcctgagcagcagactgagagtgtccgccaccttctggcagaacccccggaaccacttcagatgccaggtgcagttctacggcctgagcgagaacgacgagtggacccaggacagagccaagcccgtgacccagatcgtgtctgccgaagcctggggcagagccgattgcggctttaccagcgagagctaccagcagggcgtgctgagcgccaccatcctgtacgagatcctgctgggcaaggccaccctgtacgccgtgctggtgtctgccctggtgctgatggctatggtcaagcggaaggacagccggggaagggccaagcgatctggatctggagcaacaaacttctcactactcaaacaagcaggtgacgtggaggagaatcccgggcctactagtatggactggatttggcgcatccttttccttgtcggcgctgctaccggcgcgcattccttcgaacaggtgcagctgaagcagagcggacctggcctggtgcagcctagccagagcctgtccatcacctgtaccgtgtccggcttcagcctgaccaactacggcgtgcactgggtgcgccagagccctggaaaaggactggaatggctgggagtgatttggagcggcggcaacaccgactacaacacccccttcaccagcagactgtctatcaacaaggacaacagcaagagccaggtgttcttcaagatgaacagcctccagagcaacgacaccgccatctactactgtgctagagccctgacctactatgactacgagttcgcctactggggccagggcacactcgtgacagtgtctgctacgcgtatccagaaccctgatcctgccgtgtaccagctgcgggatagcaagagcagcgacaagagcgtgtgtctgttcaccgacttcgacagccagaccaacgtgtcccagagcaaggactccgacgtgtacatcaccgataagtgcgtgctggacatgcggagcatggacttcaagagcaactccgccgtggcctggtccaacaagtccgatttcgcctgcgccaacgccttcaacaacagcattatccccgaggacacattcttcccaagccccgagagcagctgcgacgtgaagctggtggaaaagagcttcgagacagacaccaacctgaacttccagaacctgagcgtgatcggcttcagaatcctgctgctgaaagtggccggctttaacctgctgatgaccctgcggctgtggtccagc

SEQ ID NO: 1887 - DNA, 2241 bp, Artificial Sequence
  Synthetic Polynucloetide
atggccttaccagtgaccgccttgctcctgccgctggccttgctgctccacgccgccaggccggaagtgcagctggttgaatctggcggaggactggttcagcctggcggatctctgagactgtcttgtgccgccagcggcttcagcttcagcgacttttggatgagctgggtccgacaggcccctggcaaaggacttgaatgggtcgccacaatcagccaggccggcagcgagaaggactacgtggactctgtgaagggcagattcaccatcagccgggacaacgccaagaagtccctgtacctccagatgaacagcctgagagccgaggacaccgccgtgtactattgtgcctctggcgtgtacagcttcgactacagaggccagggcaccctggtcacagtctcttctggtaccggcggaggcggatctggcggcggaggtagcggtggcggaggatctgaattcatgacccagagccccaagttcctgctggtgtctgccggcgacagagtgaccctgacatgcaaggccagccagagcgtgaacaacgacgtgtactggtatcagcaggaacccggccagtcccccaagctgctgatctactgggccagcaccagagaaagcggcgtgcccgatagattcaccggcagcggctctggcaccgacttcaccctgacaatcagcagcgtgcaggccgaggacctggccgtgtactactgcaagcagagctacaacctgtacaccttcggcggaggcaccaagctggaaatcaagagactcgaggacctgaagaacgtgttcccacctgaggtggccgtgttcgagcctagcgaggccgagatcagccacacccagaaagccaccctcgtgtgcctggctaccggcttctaccccgaccatgtggaactgtcttggtgggtcaacggcaaagaggtgcacagcggcgtgtgtaccgacccccagccactgaaagaacagcccgccctgaacgacagccggtactgcctgagcagcagactgagagtgtccgccaccttctggcagaacccccggaaccacttcagatgccaggtgcagttctacggcctgagcgagaacgacgagtggacccaggacagagccaagcccgtgacccagatcgtgtctgccgaagcctggggcagagccgattgcggctttaccagcgagagctaccagcagggcgtgctgagcgccaccatcctgtacgagatcctgctgggcaaggccaccctgtacgccgtgctggtgtctgccctggtgctgatggctatggtcaagcggaaggacagccggggaagggccaagcgatctggatctggagcaacaaacttctcactactcaaacaagcaggtgacgtggaggagaatcccgggcctactagtatggactggatttggcgcatccttttccttgtcggcgctgctaccggcgcgcattccttcgaagaatctggaagaggactggtgcagcctggcggcagcagaaagctgtcttgtgccgccagcggcttcaccttcagcaccagcggaatgcactgggtgcgccaggcccctgagaagggactggaatgggtggcctacatcagctccggcagcaccaccatctaccacgccgataccgtgaagggccggttcaccatcagccgggacaaccccaagaataccctgttcctccagatgaccagcctgcggagcgaggacaccgccatgtactattgctgcgccagaagcggccagttcggcaactacttcgactactggggccagggcaccaccctgaccgtgtcatctacgcgtatccagaaccctgatcctgccgtgtaccagctgcgggatagcaagagcagcgacaagagcgtgtgtctgttcaccgacttcgacagccagaccaacgtgtcccagagcaaggactccgacgtgtacatcaccgataagtgcgtgctggacatgcggagcatggacttcaagagcaactccgccgtggcctggtccaacaagtccgatttcgcctgcgccaacgccttcaacaacagcattatccccgaggacacattcttcccaagccccgagagcagctgcgacgtgaagctggtggaaaagagcttcgagacagacaccaacctgaacttccagaacctgagcgtgatcggcttcagaatcctgctgctgaaagtggccggctttaacctgctgatgaccctgcggctgtggtccagc

SEQ ID NO: 1888 - DNA, 2256 bp, Artificial Sequence
  Synthetic Polynucloetide
atggccttaccagtgaccgccttgctcctgccgctggccttgctgctccacgccgccaggccggaagtgcagctggttgaatctggcggaggactggttcagcctggcggatctctgagactgtcttgtgccgccagcggcttcagcttcagcgacttttggatgagctgggtccgacaggcccctggcaaaggacttgaatgggtcgccacaatcagccaggccggcagcgagaaggactacgtggactctgtgaagggcagattcaccatcagccgggacaacgccaagaagtccctgtacctccagatgaacagcctgagagccgaggacaccgccgtgtactattgtgcctctggcgtgtacagcttcgactacagaggccagggcaccctggtcacagtctcttctggtaccggcggaggcggatctggcggcggaggtagcggtggcggaggatctgaattccagagcccatctagcctggctgtgtctgccggcgagaaagtgaccatgagctgcaagagcagccagagcctgctgaacagccggacccggaagaactacctggcctggtatcagcagaagcccggccagagccccaagctgctgatctactgggccagcaccagagaaagcggcgtgcccgatagattcaccggctctggcagcggcaccgacttcaccctgacaatcagcagcgtgcaggccgaggacctggccgtgtactactgcaagcagagcaacctgtacaccttcggcggaggcaccaagctggaaatcaagctcgaggacctgaagaacgtgttcccacctgaggtggccgtgttcgagcctagcgaggccgagatcagccacacccagaaagccaccctcgtgtgcctggctaccggcttctaccccgaccatgtggaactgtcttggtgggtcaacggcaaagaggtgcacagcggcgtgtgtaccgacccccagccactgaaagaacagcccgccctgaacgacagccggtactgcctgagcagcagactgagagtgtccgccaccttctggcagaacccccggaaccacttcagatgccaggtgcagttctacggcctgagcgagaacgacgagtggacccaggacagagccaagcccgtgacccagatcgtgtctgccgaagcctggggcagagccgattgcggctttaccagcgagagctaccagcagggcgtgctgagcgccaccatcctgtacgagatcctgctgggcaaggccaccctgtacgccgtgctggtgtctgccctggtgctgatggctatggtcaagcggaaggacagccggggaagggccaagcgatctggatctggagcaacaaacttctcactactcaaacaagcaggtgacgtggaggagaatcccgggcctactagtatggactggatttggcgcatccttttccttgtcggcgctgctaccggcgcgcattccttcgaacaggtgcagctggaagagtctggacccgagcttgtgaagcctggggccagcgtgaagctgtcctgtaaagccagcggctacaccttcaccgagtacatcatccactgggtcaagcagcggagcggccagggcctggaatggatcggctggttttaccctggctccggcagcatcaagtacaacgagaagttcaaggacaaggccaccctgaccgccgacaagtccagcagcaccgtgtacatggaactgagcggcctgaccagcgaggacagcgccgtgtatttctgcgccagacacgacggctacagctacttcgactattggggccagggcaccacactgaccgtgtcctctacgcgtatccagaaccctgatcctgccgtgtaccagctgcgggatagcaagagcagcgacaagagcgtgtgtctgttcaccgacttcgacagccagaccaacgtgtcccagagcaaggactccgacgtgtacatcaccgataagtgcgtgctggacatgcggagcatggacttcaagagcaactccgccgtggcctggtccaacaagtccgatttcgcctgcgccaacgccttcaacaacagcattatccccgaggacacattcttcccaagccccgagagcagctgcgacgtgaagctggtggaaaagagcttcgagacagacaccaacctgaacttccagaacctgagcgtgatcggcttcagaatcctgctgctgaaagtggccggctttaacctgctgatgaccctgcggctgtggtccagc

SEQ ID NO: 1889 - DNA, 2265 bp, Artificial Sequence
  Synthetic Polynucloetide
atggccttaccagtgaccgccttgctcctgccgctggccttgctgctccacgccgccaggccggaagtgcagctggttgaatctggcggaggactggttcagcctggcggatctctgagactgtcttgtgccgccagcggcttcagcttcagcgacttttggatgagctgggtccgacaggcccctggcaaaggacttgaatgggtcgccacaatcagccaggccggcagcgagaaggactacgtggactctgtgaagggcagattcaccatcagccgggacaacgccaagaagtccctgtacctccagatgaacagcctgagagccgaggacaccgccgtgtactattgtgcctctggcgtgtacagcttcgactacagaggccagggcaccctggtcacagtctcttctggtaccggcggaggcggatctggcggcggaggtagcggtggcggaggatctgaattcgacatccagatgacccagagccccagcagcctgtctgcctctctgggcgagagagtgtccctgacctgtcgggccacacaggaactgagcggctacctgtcttggctgcagcagaagcccgacggcaccatcaagcggctgatctacgccgccagcaccctggatagcggcgtgcccaagagattcagcggcaacagaagcggcagcgactacagcctgaccatcagctccctggaaagcgaggacttcgccgactactactgcctgcagtacgccatctacccctacaccttcggcggaggcaccaagctggaaatcaagctcgaggacctgaagaacgtgttcccacctgaggtggccgtgttcgagcctagcgaggccgagatcagccacacccagaaagccaccctcgtgtgcctggctaccggcttctaccccgaccatgtggaactgtcttggtgggtcaacggcaaagaggtgcacagcggcgtgtgtaccgacccccagccactgaaagaacagcccgccctgaacgacagccggtactgcctgagcagcagactgagagtgtccgccaccttctggcagaacccccggaaccacttcagatgccaggtgcagttctacggcctgagcgagaacgacgagtggacccaggacagagccaagcccgtgacccagatcgtgtctgccgaagcctggggcagagccgattgcggctttaccagcgagagctaccagcagggcgtgctgagcgccaccatcctgtacgagatcctgctgggcaaggccaccctgtacgccgtgctggtgtctgccctggtgctgatggctatggtcaagcggaaggacagccggggaagggccaagcgatctggatctggagcaacaaacttctcactactcaaacaagcaggtgacgtggaggagaatcccgggcctactagtatggactggatttggcgcatccttttccttgtcggcgctgctaccggcgcgcattccttcgaagaggtgcaactgcagcagtctggccccgagcttgtgaagcctggcgcctccgtgaagatgagctgcaaggccagcggctacacctttaccagctacttcatccactgggtcaagcagaaacccggccagggcctggaatggatcggcttcatcaacccttacaacgacggcagcaagtacaacgagaagttcaagggcaaggccaccctgaccagcgacaagagcagcagcaccgcctacatggaactgtccagcctgacatccgaggacagcgccgtgtactactgcaccagggacgacggctactacggctacgccatggactactggggccagggaacaagcgtcaccgtgtcctctacgcgtatccagaaccctgatcctgccgtgtaccagctgcgggatagcaagagcagcgacaagagcgtgtgtctgttcaccgacttcgacagccagaccaacgtgtcccagagcaaggactccgacgtgtacatcaccgataagtgcgtgctggacatgcggagcatggacttcaagagcaactccgccgtggcctggtccaacaagtccgatttcgcctgcgccaacgccttcaacaacagcattatccccgaggacacattcttcccaagccccgagagcagctgcgacgtgaagctggtggaaaagagcttcgagacagacaccaacctgaacttccagaacctgagcgtgatcggcttcagaatcctgctgctgaaagtggccggctttaacctgctgatgaccctgcggctgtggtccagc

SEQ ID NO: 1890 - DNA, 2280 bp, Artificial Sequence
  Synthetic Polynucloetide
atggccttaccagtgaccgccttgctcctgccgctggccttgctgctccacgccgccaggccggaagtgcagctggttgaatctggcggaggactggttcagcctggcggatctctgagactgtcttgtgccgccagcggcttcagcttcagcgacttttggatgagctgggtccgacaggcccctggcaaaggacttgaatgggtcgccacaatcagccaggccggcagcgagaaggactacgtggactctgtgaagggcagattcaccatcagccgggacaacgccaagaagtccctgtacctccagatgaacagcctgagagccgaggacaccgccgtgtactattgtgcctctggcgtgtacagcttcgactacagaggccagggcaccctggtcacagtctcttctggtaccggcggaggcggatctggcggcggaggtagcggtggcggaggatctgaattcgacaccatcgtgctgacacagagccctgcttccctggccgtgtccctgggacagagagccaccatctcttgcagagccagcgagagcgtggacagctacggcaacagcttcatgcactggtatcagcagaagcccggccagccccccaagctgctgatctacctggcctccaacctggaaagcggcgtgcccgccagattttctggcagcggcagcagaaccgacttcaccctgaccatcgaccccgtggaagccgatgatgccgccacctactactgccagcagaacaactacgacccctggaccttcggcggaggcaccaagctggaaatcaagctcgaggacctgaagaacgtgttcccacctgaggtggccgtgttcgagcctagcgaggccgagatcagccacacccagaaagccaccctcgtgtgcctggctaccggcttctaccccgaccatgtggaactgtcttggtgggtcaacggcaaagaggtgcacagcggcgtgtgtaccgacccccagccactgaaagaacagcccgccctgaacgacagccggtactgcctgagcagcagactgagagtgtccgccaccttctggcagaacccccggaaccacttcagatgccaggtgcagttctacggcctgagcgagaacgacgagtggacccaggacagagccaagcccgtgacccagatcgtgtctgccgaagcctggggcagagccgattgcggctttaccagcgagagctaccagcagggcgtgctgagcgccaccatcctgtacgagatcctgctgggcaaggccaccctgtacgccgtgctggtgtctgccctggtgctgatggctatggtcaagcggaaggacagccggggaagggccaagcgatctggatctggagcaacaaacttctcactactcaaacaagcaggtgacgtggaggagaatcccgggcctactagtatggactggatttggcgcatccttttccttgtcggcgctgctaccggcgcgcattccttcgaagaagtgcaactccagcagagcggccctgagcttgtgaagcctggcgcttccgtgaagatgagctgcaaggccagcggctacaccttcaccagctacgtgatgcactgggtcaagcagaaacctggacagggcctggaatggatcggctacatcaacccctacaacgacggcaccaagtacaacgagaagttcaagggcaaggccaccctgacaagcgacaccagcagcagcaccgcctacatggaactgaacagcctgaccagcgaggacagcgccgtgtacttctgcgccagacccatctacttcgacaacgactacttcgattactggggccagggcaccaccctgaaggtgtcctctacgcgtatccagaaccctgatcctgccgtgtaccagctgcgggatagcaagagcagcgacaagagcgtgtgtctgttcaccgacttcgacagccagaccaacgtgtcccagagcaaggactccgacgtgtacatcaccgataagtgcgtgctggacatgcggagcatggacttcaagagcaactccgccgtggcctggtccaacaagtccgatttcgcctgcgccaacgccttcaacaacagcattatccccgaggacacattcttcccaagccccgagagcagctgcgacgtgaagctggtggaaaagagcttcgagacagacaccaacctgaacttccagaacctgagcgtgatcggcttcagaatcctgctgctgaaagtggccggctttaacctgctgatgaccctgcggctgtggtccagc

SEQ ID NO: 1891 - DNA, 2265 bp, Artificial Sequence
  Synthetic Polynucloetide
atggccttaccagtgaccgccttgctcctgccgctggccttgctgctccacgccgccaggccggaagtgcagctggttgaatctggcggaggactggttcagcctggcggatctctgagactgtcttgtgccgccagcggcttcagcttcagcgacttttggatgagctgggtccgacaggcccctggcaaaggacttgaatgggtcgccacaatcagccaggccggcagcgagaaggactacgtggactctgtgaagggcagattcaccatcagccgggacaacgccaagaagtccctgtacctccagatgaacagcctgagagccgaggacaccgccgtgtactattgtgcctctggcgtgtacagcttcgactacagaggccagggcaccctggtcacagtctcttctggtaccggcggaggcggatctggcggcggaggtagcggtggcggaggatctgaattcgacatccagatgacccagagccccagcagcctgtctgccagcgtgggcgacagagtgaccatcacatgcaaggccagccaggacgtgggaatcgccgtggcctggtatcagcagaaacccggcaaggtgcccaagctgctgatctactgggccagcaccagacacaccggcgtgcccgatagattttccggcagcggctccggcaccgacttcaccctgacaatcagctccctccagcccgaggacgtggcaacctactactgccagcagtacagcagctacccctacaccttcggccagggcaccaaggtggaaatcaagagactcgaggacctgaagaacgtgttcccacctgaggtggccgtgttcgagcctagcgaggccgagatcagccacacccagaaagccaccctcgtgtgcctggctaccggcttctaccccgaccatgtggaactgtcttggtgggtcaacggcaaagaggtgcacagcggcgtgtgtaccgacccccagccactgaaagaacagcccgccctgaacgacagccggtactgcctgagcagcagactgagagtgtccgccaccttctggcagaacccccggaaccacttcagatgccaggtgcagttctacggcctgagcgagaacgacgagtggacccaggacagagccaagcccgtgacccagatcgtgtctgccgaagcctggggcagagccgattgcggctttaccagcgagagctaccagcagggcgtgctgagcgccaccatcctgtacgagatcctgctgggcaaggccaccctgtacgccgtgctggtgtctgccctggtgctgatggctatggtcaagcggaaggacagccggggaagggccaagcgatctggatctggagcaacaaacttctcactactcaaacaagcaggtgacgtggaggagaatcccgggcctactagtatggactggatttggcgcatccttttccttgtcggcgctgctaccggcgcgcattccttcgaagaagtgcaactggtggaatcaggcggcggactggtgcagcctggcggatctctgagactgagctgtgccgccagcggcttcgacttcagccggtactggatgagctgggtgcgccaggcccctggcaaaggactggaatggatcggcgagatcaaccccgacagcagcaccatcaactacgcccccagcctgaaggacaagttcatcatcagccgggacaacgccaagaacagcctgtacctccagatgaactccctgcgggccgaggacaccgccgtgtactattgcgccagacccgacggcaactactggtacttcgacgtgtggggccagggaaccctcgtgaccgtgtcatctacgcgtatccagaaccctgatcctgccgtgtaccagctgcgggatagcaagagcagcgacaagagcgtgtgtctgttcaccgacttcgacagccagaccaacgtgtcccagagcaaggactccgacgtgtacatcaccgataagtgcgtgctggacatgcggagcatggacttcaagagcaactccgccgtggcctggtccaacaagtccgatttcgcctgcgccaacgccttcaacaacagcattatccccgaggacacattcttcccaagccccgagagcagctgcgacgtgaagctggtggaaaagagcttcgagacagacaccaacctgaacttccagaacctgagcgtgatcggcttcagaatcctgctgctgaaagtggccggctttaacctgctgatgaccctgcggctgtggtccagc

SEQ ID NO: 1892 - DNA, 2265 bp, Artificial Sequence
  Synthetic Polynucloetide
atggccttaccagtgaccgccttgctcctgccgctggccttgctgctccacgccgccaggccggaagtgcagctggttgaatctggcggaggactggttcagcctggcggatctctgagactgtcttgtgccgccagcggcttcagcttcagcgacttttggatgagctgggtccgacaggcccctggcaaaggacttgaatgggtcgccacaatcagccaggccggcagcgagaaggactacgtggactctgtgaagggcagattcaccatcagccgggacaacgccaagaagtccctgtacctccagatgaacagcctgagagccgaggacaccgccgtgtactattgtgcctctggcgtgtacagcttcgactacagaggccagggcaccctggtcacagtctcttctggtaccggcggaggcggatctggcggcggaggtagcggtggcggaggatctgaattcgacatcgtgatgacccagagccagaagagcatgagcaccagcgtgggcgacagagtgagcatcacctgcaaggccagccaggacgtgatcaccggcgtggcctggtaccagcagaagcccggccagagccccaagctgctgatctacagcgccagctacagatacaccggcgtgcccgacagattcaccggcagcggcagcggcaccgacttcaccttcaccatcagcaacgtgcaggccgaggacctggccgtgtactactgccagcagcactacagcacccccctgaccttcggcgccggcaccaagctggagctgaagctcgaggacctgaagaacgtgttcccacctgaggtggccgtgttcgagcctagcgaggccgagatcagccacacccagaaagccaccctcgtgtgcctggctaccggcttctaccccgaccatgtggaactgtcttggtgggtcaacggcaaagaggtgcacagcggcgtgtgtaccgacccccagccactgaaagaacagcccgccctgaacgacagccggtactgcctgagcagcagactgagagtgtccgccaccttctggcagaacccccggaaccacttcagatgccaggtgcagttctacggcctgagcgagaacgacgagtggacccaggacagagccaagcccgtgacccagatcgtgtctgccgaagcctggggcagagccgattgcggctttaccagcgagagctaccagcagggcgtgctgagcgccaccatcctgtacgagatcctgctgggcaaggccaccctgtacgccgtgctggtgtctgccctggtgctgatggctatggtcaagcggaaggacagccggggaagggccaagcgatctggatctggagcaacaaacttctcactactcaaacaagcaggtgacgtggaggagaatcccgggcctactagtatggactggatttggcgcatccttttccttgtcggcgctgctaccggcgcgcattccttcgaacaggtgcagctgcagcagcccggcgccgagctggtgagacccggcgccagcgtgaagctgagctgcaaggccagcggctacagcttcaccacctactggatgaactgggtgaagcagagacccggccagggcctggagtggatcggcatgatccaccccagcgacagcgagaccagactgaaccagaagttcaaggacaaggccaccctgaccgtggacaagagcagcagcaccgcctacatgcagctgagcagccccaccagcgaggacagcgccgtgtactactgcgccagaagcaccatgatcgccaccagagccatggactactggggccagggcaccagcgtgaccgtgagcagcacgcgtatccagaaccctgatcctgccgtgtaccagctgcgggatagcaagagcagcgacaagagcgtgtgtctgttcaccgacttcgacagccagaccaacgtgtcccagagcaaggactccgacgtgtacatcaccgataagtgcgtgctggacatgcggagcatggacttcaagagcaactccgccgtggcctggtccaacaagtccgatttcgcctgcgccaacgccttcaacaacagcattatccccgaggacacattcttcccaagccccgagagcagctgcgacgtgaagctggtggaaaagagcttcgagacagacaccaacctgaacttccagaacctgagcgtgatcggcttcagaatcctgctgctgaaagtggccggctttaacctgctgatgaccctgcggctgtggtccagc

SEQ ID NO: 1893 - DNA, 2283 bp, Artificial Sequence
  Synthetic Polynucloetide
atggccttaccagtgaccgccttgctcctgccgctggccttgctgctccacgccgccaggccggaagtgcagctggttgaatctggcggaggactggttcagcctggcggatctctgagactgtcttgtgccgccagcggcttcagcttcagcgacttttggatgagctgggtccgacaggcccctggcaaaggacttgaatgggtcgccacaatcagccaggccggcagcgagaaggactacgtggactctgtgaagggcagattcaccatcagccgggacaacgccaagaagtccctgtacctccagatgaacagcctgagagccgaggacaccgccgtgtactattgtgcctctggcgtgtacagcttcgactacagaggccagggcaccctggtcacagtctcttctggtaccggcggaggcggatctggcggcggaggtagcggtggcggaggatctgaattccagagcgtgctgacacagcctccatccgtgtctggcgctccaggccagagagtgaccatctcctgtaccggcagcggcagcaacatcggagccccctacgacgtgtcctggtatcagcaactgcctggcaccgcccccaagctgctgatctaccacaacaacaagcggcccagcggcgtgcccgatagattcagcggctctaagagcggcaccagcgccagcctggctatcactggactccaggccgaggacgaggccgactactactgtgccacagtggaagccggcctgagcggctctgtgtttggcggcggaacaaagctgaccgtgctgggagctctcgaggacctgaagaacgtgttcccacctgaggtggccgtgttcgagcctagcgaggccgagatcagccacacccagaaagccaccctcgtgtgcctggctaccggcttctaccccgaccatgtggaactgtcttggtgggtcaacggcaaagaggtgcacagcggcgtgtgtaccgacccccagccactgaaagaacagcccgccctgaacgacagccggtactgcctgagcagcagactgagagtgtccgccaccttctggcagaacccccggaaccacttcagatgccaggtgcagttctacggcctgagcgagaacgacgagtggacccaggacagagccaagcccgtgacccagatcgtgtctgccgaagcctggggcagagccgattgcggctttaccagcgagagctaccagcagggcgtgctgagcgccaccatcctgtacgagatcctgctgggcaaggccaccctgtacgccgtgctggtgtctgccctggtgctgatggctatggtcaagcggaaggacagccggggaagggccaagcgatctggatctggagcaacaaacttctcactactcaaacaagcaggtgacgtggaggagaatcccgggcctactagtatggactggatttggcgcatccttttccttgtcggcgctgctaccggcgcgcattccttcgaacaggtgcaactggtgcagagcggagccgaagtgaagaaacctggggccagcgtgaaggtgtcctgcaaggtgtccggctacaccctgaccgagctgagcattcactgggtgcgccaggcccctggcaagggactggaatggatgggcggcttcgaccccgaagagaacgagatcgtgtacgcccagcggttccagggcagagtgacaatgaccgaggacaccagcaccgacaccgcctacatggaactgagcagcctgcggagcgaggataccgccgtgtactactgcgccatcgtgggcagcttcagccctctgacactgggcctgtggggccagggaactatggtcaccgtgtccagcacgcgtatccagaaccctgatcctgccgtgtaccagctgcgggatagcaagagcagcgacaagagcgtgtgtctgttcaccgacttcgacagccagaccaacgtgtcccagagcaaggactccgacgtgtacatcaccgataagtgcgtgctggacatgcggagcatggacttcaagagcaactccgccgtggcctggtccaacaagtccgatttcgcctgcgccaacgccttcaacaacagcattatccccgaggacacattcttcccaagccccgagagcagctgcgacgtgaagctggtggaaaagagcttcgagacagacaccaacctgaacttccagaacctgagcgtgatcggcttcagaatcctgctgctgaaagtggccggctttaacctgctgatgaccctgcggctgtggtccagc

SEQ ID NO: 1894 - DNA, 2283 bp, Artificial Sequence
  Synthetic Polynucloetide
atggccttaccagtgaccgccttgctcctgccgctggccttgctgctccacgccgccaggccggaagtgcagctggttgaatctggcggaggactggttcagcctggcggatctctgagactgtcttgtgccgccagcggcttcagcttcagcgacttttggatgagctgggtccgacaggcccctggcaaaggacttgaatgggtcgccacaatcagccaggccggcagcgagaaggactacgtggactctgtgaagggcagattcaccatcagccgggacaacgccaagaagtccctgtacctccagatgaacagcctgagagccgaggacaccgccgtgtactattgtgcctctggcgtgtacagcttcgactacagaggccagggcaccctggtcacagtctcttctggtaccggcggaggcggatctggcggcggaggtagcggtggcggaggatctgaattccagagcgtgctgacacagcctccatccgtgtctggcgctccaggccagagagtgaccatctcctgtaccggcagcggcagcaacatcggagccccctacgacgtgtcctggtatcagcaactgcctggcaccgcccccaagctgctgatctaccacaacaacaagcggcccagcggcgtgcccgatagattcagcggctctaagagcggcaccagcgccagcctggctatcactggactccaggccgaggacgaggccgactactactgccagagctacgacagcagcagcatcagcaccatcttcggcggaggcaccaagctgacagtgctgggagctctcgaggacctgaagaacgtgttcccacctgaggtggccgtgttcgagcctagcgaggccgagatcagccacacccagaaagccaccctcgtgtgcctggctaccggcttctaccccgaccatgtggaactgtcttggtgggtcaacggcaaagaggtgcacagcggcgtgtgtaccgacccccagccactgaaagaacagcccgccctgaacgacagccggtactgcctgagcagcagactgagagtgtccgccaccttctggcagaacccccggaaccacttcagatgccaggtgcagttctacggcctgagcgagaacgacgagtggacccaggacagagccaagcccgtgacccagatcgtgtctgccgaagcctggggcagagccgattgcggctttaccagcgagagctaccagcagggcgtgctgagcgccaccatcctgtacgagatcctgctgggcaaggccaccctgtacgccgtgctggtgtctgccctggtgctgatggctatggtcaagcggaaggacagccggggaagggccaagcgatctggatctggagcaacaaacttctcactactcaaacaagcaggtgacgtggaggagaatcccgggcctactagtatggactggatttggcgcatccttttccttgtcggcgctgctaccggcgcgcattccttcgaacaggtgcaactggtgcagagcggagccgaagtgaagaaacctggggccagcgtgaaggtgtcctgcaaggtgtccggctacaccctgaccgagctgagcattcactgggtgcgccaggcccctggcaagggactggaatggatgggcggcttcgaccccgaagagaacgagatcgtgtacgcccagcggttccagggcagagtgacaatgaccgaggacaccagcaccgacaccgcctacatggaactgagcagcctgcggagcgaggataccgccgtgtactactgtgccatcgtgggcagcttcagcggaatcgcctacagaccttggggccagggcacaatggtcaccgtgtctagcacgcgtatccagaaccctgatcctgccgtgtaccagctgcgggatagcaagagcagcgacaagagcgtgtgtctgttcaccgacttcgacagccagaccaacgtgtcccagagcaaggactccgacgtgtacatcaccgataagtgcgtgctggacatgcggagcatggacttcaagagcaactccgccgtggcctggtccaacaagtccgatttcgcctgcgccaacgccttcaacaacagcattatccccgaggacacattcttcccaagccccgagagcagctgcgacgtgaagctggtggaaaagagcttcgagacagacaccaacctgaacttccagaacctgagcgtgatcggcttcagaatcctgctgctgaaagtggccggctttaacctgctgatgaccctgcggctgtggtccagc

SEQ ID NO: 1895 - DNA, 2247 bp, Artificial Sequence
  Synthetic Polynucloetide
atggccttaccagtgaccgccttgctcctgccgctggccttgctgctccacgccgccaggccggaagtgcagctggttgaatctggcggaggactggttcagcctggcggatctctgagactgtcttgtgccgccagcggcttcagcttcagcgacttttggatgagctgggtccgacaggcccctggcaaaggacttgaatgggtcgccacaatcagccaggccggcagcgagaaggactacgtggactctgtgaagggcagattcaccatcagccgggacaacgccaagaagtccctgtacctccagatgaacagcctgagagccgaggacaccgccgtgtactattgtgcctctggcgtgtacagcttcgactacagaggccagggcaccctggtcacagtctcttctggtaccggcggaggcggatctggcggcggaggtagcggtggcggaggatctgaattcgacatccagatgacccagagccccagcagcctgtctgccagcgtgggcgacagagtgaccatcacctgtagagccagccagggcatcagaaacaacctggcctggtatcagcagaagcccggcaaggcccccaagcggctgatctacgccgccagcaatctccagagcggcgtgcccagcagattcacaggctctggcagcggcaccgagttcaccctgatcgtgtctagcctccagcccgaggacttcgccacctactactgcctccagcaccacagctaccccctgacatctggcggaggcaccaaggtggaactcgaggacctgaagaacgtgttcccacctgaggtggccgtgttcgagcctagcgaggccgagatcagccacacccagaaagccaccctcgtgtgcctggctaccggcttctaccccgaccatgtggaactgtcttggtgggtcaacggcaaagaggtgcacagcggcgtgtgtaccgacccccagccactgaaagaacagcccgccctgaacgacagccggtactgcctgagcagcagactgagagtgtccgccaccttctggcagaacccccggaaccacttcagatgccaggtgcagttctacggcctgagcgagaacgacgagtggacccaggacagagccaagcccgtgacccagatcgtgtctgccgaagcctggggcagagccgattgcggctttaccagcgagagctaccagcagggcgtgctgagcgccaccatcctgtacgagatcctgctgggcaaggccaccctgtacgccgtgctggtgtctgccctggtgctgatggctatggtcaagcggaaggacagccggggaagggccaagcgatctggatctggagcaacaaacttctcactactcaaacaagcaggtgacgtggaggagaatcccgggcctactagtatggactggatttggcgcatccttttccttgtcggcgctgctaccggcgcgcattccttcgaagaggtgcaggtgctggaaagtggcggaggactggtgcagcctggcggctctctgagactgtcttgtgccgccagcggcttcaccttcagcagctacgccatgagctgggtgcgccaggcccctggaaaaggactggaatgggtgtccgccatcagcggctctggcgggtctaccaactacgccgatagcgtgaagggccggttcaccatcagccgggacaacagcaagaacaccctgtacctccagatgaacagcctgcgggccgaggacaccgccgtgtattattgtgccggcagcagcgggtggagcgagtattggggacagggcaccctcgtgaccgtgtcctctacgcgtatccagaaccctgatcctgccgtgtaccagctgcgggatagcaagagcagcgacaagagcgtgtgtctgttcaccgacttcgacagccagaccaacgtgtcccagagcaaggactccgacgtgtacatcaccgataagtgcgtgctggacatgcggagcatggacttcaagagcaactccgccgtggcctggtccaacaagtccgatttcgcctgcgccaacgccttcaacaacagcattatccccgaggacacattcttcccaagccccgagagcagctgcgacgtgaagctggtggaaaagagcttcgagacagacaccaacctgaacttccagaacctgagcgtgatcggcttcagaatcctgctgctgaaagtggccggctttaacctgctgatgaccctgcggctgtggtccagc

SEQ ID NO: 1896 - DNA, 2265 bp, Artificial Sequence
  Synthetic Polynucloetide
atggccttaccagtgaccgccttgctcctgccgctggccttgctgctccacgccgccaggccggaagtgcagctggttgaatctggcggaggactggttcagcctggcggatctctgagactgtcttgtgccgccagcggcttcagcttcagcgacttttggatgagctgggtccgacaggcccctggcaaaggacttgaatgggtcgccacaatcagccaggccggcagcgagaaggactacgtggactctgtgaagggcagattcaccatcagccgggacaacgccaagaagtccctgtacctccagatgaacagcctgagagccgaggacaccgccgtgtactattgtgcctctggcgtgtacagcttcgactacagaggccagggcaccctggtcacagtctcttctggtaccggcggaggcggatctggcggcggaggtagcggtggcggaggatctgaattcgacgagatccagctggtgcagagcggagccgaagtgaagaagcctggcgagagcctgcggatcagctgcaagggcagcggcttcaacatcgaggactactacatccactgggtgcgccagatgcccggcaagggcctggaatggatgggcagaatcgaccccgagaacgacgagactaagtacggccccatcttccagggccacgtgaccatcagcgccgacaccagcatcaacaccgtgtacctccagtggtccagcctgaaggccagcgacaccgccatgtactactgcgcctttagaggcggcgtgtactggggccagggcaccacagtgacagtgtctagcctcgaggacctgaagaacgtgttcccacctgaggtggccgtgttcgagcctagcgaggccgagatcagccacacccagaaagccaccctcgtgtgcctggctaccggcttctaccccgaccatgtggaactgtcttggtgggtcaacggcaaagaggtgcacagcggcgtgtgtaccgacccccagccactgaaagaacagcccgccctgaacgacagccggtactgcctgagcagcagactgagagtgtccgccaccttctggcagaacccccggaaccacttcagatgccaggtgcagttctacggcctgagcgagaacgacgagtggacccaggacagagccaagcccgtgacccagatcgtgtctgccgaagcctggggcagagccgattgcggctttaccagcgagagctaccagcagggcgtgctgagcgccaccatcctgtacgagatcctgctgggcaaggccaccctgtacgccgtgctggtgtctgccctggtgctgatggctatggtcaagcggaaggacagccggggaagggccaagcgatctggatctggagcaacaaacttctcactactcaaacaagcaggtgacgtggaggagaatcccgggcctactagtatggactggatttggcgcatccttttccttgtcggcgctgctaccggcgcgcattccttcgaagatgtcgtgatgacccagagccccgacagcctggctgtgtctctgggagagagagccaccatcaactgcaagtccagccagtccctgctggacagcgacggcaagacctacctgaactggctccagcagaagcccggccagccccccaagagactgatctccctggtgtccaagctggactccggcgtgcccgatagattttccggctctggcagcggcaccgacttcaccctgacaatcagctcccttcaggccgaggacgtggccgtgtactattgctggcagggcacacacttccccggcacctttggcggaggcaccaaggtggaaatcaagacgcgtatccagaaccctgatcctgccgtgtaccagctgcgggatagcaagagcagcgacaagagcgtgtgtctgttcaccgacttcgacagccagaccaacgtgtcccagagcaaggactccgacgtgtacatcaccgataagtgcgtgctggacatgcggagcatggacttcaagagcaactccgccgtggcctggtccaacaagtccgatttcgcctgcgccaacgccttcaacaacagcattatccccgaggacacattcttcccaagccccgagagcagctgcgacgtgaagctggtggaaaagagcttcgagacagacaccaacctgaacttccagaacctgagcgtgatcggcttcagaatcctgctgctgaaagtggccggctttaacctgctgatgaccctgcggctgtggtccagc

SEQ ID NO: 1897 - DNA, 2286 bp, Artificial Sequence
  Synthetic Polynucloetide
atggccttaccagtgaccgccttgctcctgccgctggccttgctgctccacgccgccaggccggaagtgcagctggttgaatctggcggaggactggttcagcctggcggatctctgagactgtcttgtgccgccagcggcttcagcttcagcgacttttggatgagctgggtccgacaggcccctggcaaaggacttgaatgggtcgccacaatcagccaggccggcagcgagaaggactacgtggactctgtgaagggcagattcaccatcagccgggacaacgccaagaagtccctgtacctccagatgaacagcctgagagccgaggacaccgccgtgtactattgtgcctctggcgtgtacagcttcgactacagaggccagggcaccctggtcacagtctcttctggtaccggcggaggcggatctggcggcggaggtagcggtggcggaggatctgaattcgacgagcttgtgatgacccagagccccagcagcctgacagtgacagccggcgagaaagtgaccatgagctgcaagagcagccagagcctgctgaacagcggcaaccagaagaactacctgacctggtatcagcagaagcccggccagccccccaagctgctgatctactgggccagcaccagagaaagcggcgtgcccgatagattcaccggctctggcagcggcaccgacttcaccctgacaatcagcagcgtgcaggccgaggacctggccgtgtactactgccagaacgactacagctaccccctgaccttcggagccggcaccaagctggaaatcaagctcgaggacctgaagaacgtgttcccacctgaggtggccgtgttcgagcctagcgaggccgagatcagccacacccagaaagccaccctcgtgtgcctggctaccggcttctaccccgaccatgtggaactgtcttggtgggtcaacggcaaagaggtgcacagcggcgtgtgtaccgacccccagccactgaaagaacagcccgccctgaacgacagccggtactgcctgagcagcagactgagagtgtccgccaccttctggcagaacccccggaaccacttcagatgccaggtgcagttctacggcctgagcgagaacgacgagtggacccaggacagagccaagcccgtgacccagatcgtgtctgccgaagcctggggcagagccgattgcggctttaccagcgagagctaccagcagggcgtgctgagcgccaccatcctgtacgagatcctgctgggcaaggccaccctgtacgccgtgctggtgtctgccctggtgctgatggctatggtcaagcggaaggacagccggggaagggccaagcgatctggatctggagcaacaaacttctcactactcaaacaagcaggtgacgtggaggagaatcccgggcctactagtatggactggatttggcgcatccttttccttgtcggcgctgctaccggcgcgcattccttcgaagaagtgcagctgctggaacagtctggcgccgaacttgtgcggcctggcaccagcgtgaagatcagctgtaaagccagcggctacgccttcaccaactactggctgggctgggtcaagcagaggcctggacacggcctggaatggatcggcgacatctttcccggctccggcaacatccactacaacgagaagttcaagggcaaggccaccctgaccgccgacaagtctagcagcaccgcctacatgcagctgtccagcctgacctttgaggacagcgccgtgtatttctgtgcccggctgcggaactgggacgagcccatggattattggggccagggcaccaccgtgaccgtgtctagtacgcgtatccagaaccctgatcctgccgtgtaccagctgcgggatagcaagagcagcgacaagagcgtgtgtctgttcaccgacttcgacagccagaccaacgtgtcccagagcaaggactccgacgtgtacatcaccgataagtgcgtgctggacatgcggagcatggacttcaagagcaactccgccgtggcctggtccaacaagtccgatttcgcctgcgccaacgccttcaacaacagcattatccccgaggacacattcttcccaagccccgagagcagctgcgacgtgaagctggtggaaaagagcttcgagacagacaccaacctgaacttccagaacctgagcgtgatcggcttcagaatcctgctgctgaaagtggccggctttaacctgctgatgaccctgcggctgtggtccagc

SEQ ID NO: 1898 - DNA, 2289 bp, Artificial Sequence
  Synthetic Polynucloetide
atggccttaccagtgaccgccttgctcctgccgctggccttgctgctccacgccgccaggccggaagtgcagctggttgaatctggcggaggactggttcagcctggcggatctctgagactgtcttgtgccgccagcggcttcagcttcagcgacttttggatgagctgggtccgacaggcccctggcaaaggacttgaatgggtcgccacaatcagccaggccggcagcgagaaggactacgtggactctgtgaagggcagattcaccatcagccgggacaacgccaagaagtccctgtacctccagatgaacagcctgagagccgaggacaccgccgtgtactattgtgcctctggcgtgtacagcttcgactacagaggccagggcaccctggtcacagtctcttctggtaccggcggaggcggatctggcggcggaggtagcggtggcggaggatctgaattcgacgagctgcagatgacccagagccctagcagcctgtctgccagcgtgggcgacagagtgaccatcacctgtagagccagccagagcatcagcagctacctgaactggtatcagcagaagcccggccagccccccaaactgctgatctactgggccagcaccagagaaagcggcgtgcccgatagattcagcggcagcgagagcggcaccaactacaccctgaccatcagctccctgcagcccgaggacttcgccacctacttttgccagcagagcgacagcctgcccatcacctttggacagggcacccggctggacattcagctcgaggacctgaagaacgtgttcccacctgaggtggccgtgttcgagcctagcgaggccgagatcagccacacccagaaagccaccctcgtgtgcctggctaccggcttctaccccgaccatgtggaactgtcttggtgggtcaacggcaaagaggtgcacagcggcgtgtgtaccgacccccagccactgaaagaacagcccgccctgaacgacagccggtactgcctgagcagcagactgagagtgtccgccaccttctggcagaacccccggaaccacttcagatgccaggtgcagttctacggcctgagcgagaacgacgagtggacccaggacagagccaagcccgtgacccagatcgtgtctgccgaagcctggggcagagccgattgcggctttaccagcgagagctaccagcagggcgtgctgagcgccaccatcctgtacgagatcctgctgggcaaggccaccctgtacgccgtgctggtgtctgccctggtgctgatggctatggtcaagcggaaggacagccggggaagggccaagcgatctggatctggagcaacaaacttctcactactcaaacaagcaggtgacgtggaggagaatcccgggcctactagtatggactggatttggcgcatccttttccttgtcggcgctgctaccggcgcgcattccttcgaagaggtgcaactgctggaatctgggggcggagtggtgcagcctggcagaagcctgagactgagctgtgccgccagcggcttcaccttcagctcctacggaatgcactgggtgcgccaggcccctggcaaaggactggaatgggtggccgtgatctcctacgacggcagcaacaagtactacgccgacagcgtgaagggccggttcaccatcagccgggacaacagcaagaacaccctgtacctgcagatgaacagcctgcgggccgaggacaccgccgtgtactactgcgccaaggatatgggctggggcagcggctggcggccttactactactacggcatggacgtgtggggccagggcaccaccgtgacagtgtcatctacgcgtatccagaaccctgatcctgccgtgtaccagctgcgggatagcaagagcagcgacaagagcgtgtgtctgttcaccgacttcgacagccagaccaacgtgtcccagagcaaggactccgacgtgtacatcaccgataagtgcgtgctggacatgcggagcatggacttcaagagcaactccgccgtggcctggtccaacaagtccgatttcgcctgcgccaacgccttcaacaacagcattatccccgaggacacattcttcccaagccccgagagcagctgcgacgtgaagctggtggaaaagagcttcgagacagacaccaacctgaacttccagaacctgagcgtgatcggcttcagaatcctgctgctgaaagtggccggctttaacctgctgatgaccctgcggctgtggtccagc

SEQ ID NO: 1899 - DNA, 2280 bp, Artificial Sequence
  Synthetic Polynucloetide
atggccttaccagtgaccgccttgctcctgccgctggccttgctgctccacgccgccaggccggaagtgcagctggttgaatctggcggaggactggttcagcctggcggatctctgagactgtcttgtgccgccagcggcttcagcttcagcgacttttggatgagctgggtccgacaggcccctggcaaaggacttgaatgggtcgccacaatcagccaggccggcagcgagaaggactacgtggactctgtgaagggcagattcaccatcagccgggacaacgccaagaagtccctgtacctccagatgaacagcctgagagccgaggacaccgccgtgtactattgtgcctctggcgtgtacagcttcgactacagaggccagggcaccctggtcacagtctcttctggtaccggcggaggcggatctggcggcggaggtagcggtggcggaggatctgaattcgacgacatccaaatgacacagagtccttctagtttgagtgcgagcgtgggggacagggtgaccattacctgcagggccagccagagcataagctcataccttaattggtaccagcaaaaaccaggtaaggcccctaagctcctgatctacgcggcctcttcacttcaatctggggtcccttcccgcttcagtggctccggcagcggcaccgacttcacgctcactatatcaagtctgcagcctgaggatctcgccacctattactgtcaacaaagttattccacccctttcacctttggaccgggcacgaaagtggatattaagctcgaggacctgaagaacgtgttcccacctgaggtggccgtgttcgagcctagcgaggccgagatcagccacacccagaaagccaccctcgtgtgcctggctaccggcttctaccccgaccatgtggaactgtcttggtgggtcaacggcaaagaggtgcacagcggcgtgtgtaccgacccccagccactgaaagaacagcccgccctgaacgacagccggtactgcctgagcagcagactgagagtgtccgccaccttctggcagaacccccggaaccacttcagatgccaggtgcagttctacggcctgagcgagaacgacgagtggacccaggacagagccaagcccgtgacccagatcgtgtctgccgaagcctggggcagagccgattgcggctttaccagcgagagctaccagcagggcgtgctgagcgccaccatcctgtacgagatcctgctgggcaaggccaccctgtacgccgtgctggtgtctgccctggtgctgatggctatggtcaagcggaaggacagccggggaagggccaagcgatctggatctggagcaacaaacttctcactactcaaacaagcaggtgacgtggaggagaatcccgggcctactagtatggactggatttggcgcatccttttccttgtcggcgctgctaccggcgcgcattccttcgaagtgcacgaggtccagcttgtgcagtccggggcagaggtcaagaagcctggttctagcgtaaaagtgagttgcaaagcctcaggtgggacattttcatcctacgcgatcagttgggttagacaggctcctggtcaagggctggaatggatgggcggaattattccaatcttcggaacagcgaattacgcgcagaagttccagggtagagtaaccatcactgctgacaagtccacctccaccgcatacatggaattgtctagtctccggagcgaggatacggcggtgtattattgtgctacgttcgccctgtttggcttccgcgaacaggctttcgacatctgggggcagggcacgacagtcacggttagtagtacgcgtatccagaaccctgatcctgccgtgtaccagctgcgggatagcaagagcagcgacaagagcgtgtgtctgttcaccgacttcgacagccagaccaacgtgtcccagagcaaggactccgacgtgtacatcaccgataagtgcgtgctggacatgcggagcatggacttcaagagcaactccgccgtggcctggtccaacaagtccgatttcgcctgcgccaacgccttcaacaacagcattatccccgaggacacattcttcccaagccccgagagcagctgcgacgtgaagctggtggaaaagagcttcgagacagacaccaacctgaacttccagaacctgagcgtgatcggcttcagaatcctgctgctgaaagtggccggctttaacctgctgatgaccctgcggctgtggtccagc

SEQ ID NO: 1900 - DNA, 2274 bp, Artificial Sequence
  Synthetic Polynucloetide
atggccttaccagtgaccgccttgctcctgccgctggccttgctgctccacgccgccaggccggaagtgcagctggttgaatctggcggaggactggttcagcctggcggatctctgagactgtcttgtgccgccagcggcttcagcttcagcgacttttggatgagctgggtccgacaggcccctggcaaaggacttgaatgggtcgccacaatcagccaggccggcagcgagaaggactacgtggactctgtgaagggcagattcaccatcagccgggacaacgccaagaagtccctgtacctccagatgaacagcctgagagccgaggacaccgccgtgtactattgtgcctctggcgtgtacagcttcgactacagaggccagggcaccctggtcacagtctcttctggtaccggcggaggcggatctggcggcggaggtagcggtggcggaggatctgaattcgacatcgtgctgacccagagccctctgagcctggccgtgtctctgggacagcctgccatcatcagctgcaaggccagccagagcgtgtcctttgccggcacctctctgatgcactggtatcaccagaagcccggccagcagcccagactgctgatctacagagccagcaacctggaagccggcgtgcccgatagattttccggcagcggcagcaagaccgacttcaccctgaccatcagccccgtggaagccgaagatgccgccacctactactgccagcagagcagagagtacccctacaccttcggcggaggcaccaagctggaaatcaagaggctcgaggacctgaagaacgtgttcccacctgaggtggccgtgttcgagcctagcgaggccgagatcagccacacccagaaagccaccctcgtgtgcctggctaccggcttctaccccgaccatgtggaactgtcttggtgggtcaacggcaaagaggtgcacagcggcgtgtgtaccgacccccagccactgaaagaacagcccgccctgaacgacagccggtactgcctgagcagcagactgagagtgtccgccaccttctggcagaacccccggaaccacttcagatgccaggtgcagttctacggcctgagcgagaacgacgagtggacccaggacagagccaagcccgtgacccagatcgtgtctgccgaagcctggggcagagccgattgcggctttaccagcgagagctaccagcagggcgtgctgagcgccaccatcctgtacgagatcctgctgggcaaggccaccctgtacgccgtgctggtgtctgccctggtgctgatggctatggtcaagcggaaggacagccggggaagggccaagcgatctggatctggagcaacaaacttctcactactcaaacaagcaggtgacgtggaggagaatcccgggcctactagtatggactggatttggcgcatccttttccttgtcggcgctgctaccggcgcgcattccttcgaacaggtccaactggtgcagagcggagccgaggtcgtgaagcctggcgcttccgtgaagattagctgcaaagccagcggctacacctttaccggctactttatgaactgggtcaagcagagccctggccagagcctggaatggatcggcagaatccacccctacgacggcgacaccttctacaaccagaagttccagggcaaggccaccctgacagtggacaagagcagcaacaccgcccacatggaactgctgagcctgaccagcgaggacttcgccgtgtactactgcaccagatacgacggcagccgggctatggactattggggccagggcaccaccgtgaccgtgtctagtacgcgtatccagaaccctgatcctgccgtgtaccagctgcgggatagcaagagcagcgacaagagcgtgtgtctgttcaccgacttcgacagccagaccaacgtgtcccagagcaaggactccgacgtgtacatcaccgataagtgcgtgctggacatgcggagcatggacttcaagagcaactccgccgtggcctggtccaacaagtccgatttcgcctgcgccaacgccttcaacaacagcattatccccgaggacacattcttcccaagccccgagagcagctgcgacgtgaagctggtggaaaagagcttcgagacagacaccaacctgaacttccagaacctgagcgtgatcggcttcagaatcctgctgctgaaagtggccggctttaacctgctgatgaccctgcggctgtggtccagc

SEQ ID NO: 1901 - DNA, 2265 bp, Artificial Sequence
  Synthetic Polynucloetide
atggccttaccagtgaccgccttgctcctgccgctggccttgctgctccacgccgccaggccggaagtgcagctggttgaatctggcggaggactggttcagcctggcggatctctgagactgtcttgtgccgccagcggcttcagcttcagcgacttttggatgagctgggtccgacaggcccctggcaaaggacttgaatgggtcgccacaatcagccaggccggcagcgagaaggactacgtggactctgtgaagggcagattcaccatcagccgggacaacgccaagaagtccctgtacctccagatgaacagcctgagagccgaggacaccgccgtgtactattgtgcctctggcgtgtacagcttcgactacagaggccagggcaccctggtcacagtctcttctggtaccggcggaggcggatctggcggcggaggtagcggtggcggaggatctgaattcgacgacgttgtgatgacccagacccccctgagcctgcctgtgacacctggcgaacctgccagcatcagctgtcggagcagccagagcctggtgcacagaaacggcaacacctacctgcactggtatctccagaagcccggccagagccccaagctgctgatccacaaggtgtccaacagattcagcggcgtgcccgacagattctccggcagcggctctggcaccgacttcaccctgaagatcagccgggtggaagccgaggacctgggcgtgtacttctgtagccagagcacccatgtgccccccctgacatttggagccggcaccaagctggaactgaagctcgaggacctgaagaacgtgttcccacctgaggtggccgtgttcgagcctagcgaggccgagatcagccacacccagaaagccaccctcgtgtgcctggctaccggcttctaccccgaccatgtggaactgtcttggtgggtcaacggcaaagaggtgcacagcggcgtgtgtaccgacccccagccactgaaagaacagcccgccctgaacgacagccggtactgcctgagcagcagactgagagtgtccgccaccttctggcagaacccccggaaccacttcagatgccaggtgcagttctacggcctgagcgagaacgacgagtggacccaggacagagccaagcccgtgacccagatcgtgtctgccgaagcctggggcagagccgattgcggctttaccagcgagagctaccagcagggcgtgctgagcgccaccatcctgtacgagatcctgctgggcaaggccaccctgtacgccgtgctggtgtctgccctggtgctgatggctatggtcaagcggaaggacagccggggaagggccaagcgatctggatctggagcaacaaacttctcactactcaaacaagcaggtgacgtggaggagaatcccgggcctactagtatggactggatttggcgcatccttttccttgtcggcgctgctaccggcgcgcattccttcgaagaagtgcagctggtgcagtctggcgctgaggtggaaaagcctggggccagcgtgaagattagctgcaaggccagcggcagcagcttcaccggctacaacatgaactgggtgcgccagaacatcggcaagagcctggaatggatcggagccatcgacccctactacggcggcaccagctacaaccagaagttcaagggcagagccaccctgaccgtggacaagagcaccagcaccgcctacatgcacctgaagtccctgcggagcgaggacaccgccgtgtactactgtgtgtccggcatggaatattggggccagggcaccagcgtgaccgtgtctagtacgcgtatccagaaccctgatcctgccgtgtaccagctgcgggatagcaagagcagcgacaagagcgtgtgtctgttcaccgacttcgacagccagaccaacgtgtcccagagcaaggactccgacgtgtacatcaccgataagtgcgtgctggacatgcggagcatggacttcaagagcaactccgccgtggcctggtccaacaagtccgatttcgcctgcgccaacgccttcaacaacagcattatccccgaggacacattcttcccaagccccgagagcagctgcgacgtgaagctggtggaaaagagcttcgagacagacaccaacctgaacttccagaacctgagcgtgatcggcttcagaatcctgctgctgaaagtggccggctttaacctgctgatgaccctgcggctgtggtccagc

SEQ ID NO: 1902 - DNA, 2259 bp, Artificial Sequence
  Synthetic Polynucloetide
atggccttaccagtgaccgccttgctcctgccgctggccttgctgctccacgccgccaggccggaagtgcagctggttgaatctggcggaggactggttcagcctggcggatctctgagactgtcttgtgccgccagcggcttcagcttcagcgacttttggatgagctgggtccgacaggcccctggcaaaggacttgaatgggtcgccacaatcagccaggccggcagcgagaaggactacgtggactctgtgaagggcagattcaccatcagccgggacaacgccaagaagtccctgtacctccagatgaacagcctgagagccgaggacaccgccgtgtactattgtgcctctggcgtgtacagcttcgactacagaggccagggcaccctggtcacagtctcttctggtaccggcggaggcggatctggcggcggaggtagcggtggcggaggatctgaattcgacgagatcgtgatgacccagacccctgccaccctgtctgtgtctgccggcgagagagtgaccattacctgcaaggccagccagagcgtgtccaacgacgtgacctggtatcagcagaagcccggccaggcccccagactgctgatctacagcgccagcaacagatacagcggcgtgcccgccagattttccggcagcggctacggcaccgagttcaccttcaccatcagcagcgtgcagagcgaggacttcgccgtgtacttctgtcagcaagactacagcagcttcggccagggcaccaagctggaaatcaagaggctcgaggacctgaagaacgtgttcccacctgaggtggccgtgttcgagcctagcgaggccgagatcagccacacccagaaagccaccctcgtgtgcctggctaccggcttctaccccgaccatgtggaactgtcttggtgggtcaacggcaaagaggtgcacagcggcgtgtgtaccgacccccagccactgaaagaacagcccgccctgaacgacagccggtactgcctgagcagcagactgagagtgtccgccaccttctggcagaacccccggaaccacttcagatgccaggtgcagttctacggcctgagcgagaacgacgagtggacccaggacagagccaagcccgtgacccagatcgtgtctgccgaagcctggggcagagccgattgcggctttaccagcgagagctaccagcagggcgtgctgagcgccaccatcctgtacgagatcctgctgggcaaggccaccctgtacgccgtgctggtgtctgccctggtgctgatggctatggtcaagcggaaggacagccggggaagggccaagcgatctggatctggagcaacaaacttctcactactcaaacaagcaggtgacgtggaggagaatcccgggcctactagtatggactggatttggcgcatccttttccttgtcggcgctgctaccggcgcgcattccttcgaacaggtgcagctggtggaatctggacctggcgtggtgcagcctggcagaagcctgagaatcagctgtgccgtgtccggcttcagcgtgaccaactacggcgtgcactgggtgcgccagccacctggaaaaggactggaatggctgggcgtgatctgggctggcggcatcaccaactacaacagcgccttcatgtcccggctgaccatctccaaggacaacagcaagaacaccgtgtacctccagatgaacagcctgcgggccgaggacaccgccatgtactactgtgcttccagaggcggccactacggctacgccctggattattggggccagggaaccctcgtgaccgtgtcctctacgcgtatccagaaccctgatcctgccgtgtaccagctgcgggatagcaagagcagcgacaagagcgtgtgtctgttcaccgacttcgacagccagaccaacgtgtcccagagcaaggactccgacgtgtacatcaccgataagtgcgtgctggacatgcggagcatggacttcaagagcaactccgccgtggcctggtccaacaagtccgatttcgcctgcgccaacgccttcaacaacagcattatccccgaggacacattcttcccaagccccgagagcagctgcgacgtgaagctggtggaaaagagcttcgagacagacaccaacctgaacttccagaacctgagcgtgatcggcttcagaatcctgctgctgaaagtggccggctttaacctgctgatgaccctgcggctgtggtccagc

SEQ ID NO: 1903 - DNA, 2265 bp, Artificial Sequence
  Synthetic Polynucloetide
atggccttaccagtgaccgccttgctcctgccgctggccttgctgctccacgccgccaggccggaagtgcagctggttgaatctggcggaggactggttcagcctggcggatctctgagactgtcttgtgccgccagcggcttcagcttcagcgacttttggatgagctgggtccgacaggcccctggcaaaggacttgaatgggtcgccacaatcagccaggccggcagcgagaaggactacgtggactctgtgaagggcagattcaccatcagccgggacaacgccaagaagtccctgtacctccagatgaacagcctgagagccgaggacaccgccgtgtactattgtgcctctggcgtgtacagcttcgactacagaggccagggcaccctggtcacagtctcttctggtaccggcggaggcggatctggcggcggaggtagcggtggcggaggatctgaattcgacatccagatgacccagaccgccagcagcctgcctgcctctctgggcgacagagtgaccatctcctgtagcgccagccaggacatcagcaactacctgaactggtatcagcagaaacccgacggcaccgtgaagctgctgatcttctacagcagcaacctgcacagcggcgtgcccagcagattttctggcggcggaagcggcaccgactacagcctgaccatcagcaatctggaacccgaggacattgccacctacttttgccaccagtacagcaagctgccctggacctttggcggaggcaccaagctggaaatcaagagactcgaggacctgaagaacgtgttcccacctgaggtggccgtgttcgagcctagcgaggccgagatcagccacacccagaaagccaccctcgtgtgcctggctaccggcttctaccccgaccatgtggaactgtcttggtgggtcaacggcaaagaggtgcacagcggcgtgtgtaccgacccccagccactgaaagaacagcccgccctgaacgacagccggtactgcctgagcagcagactgagagtgtccgccaccttctggcagaacccccggaaccacttcagatgccaggtgcagttctacggcctgagcgagaacgacgagtggacccaggacagagccaagcccgtgacccagatcgtgtctgccgaagcctggggcagagccgattgcggctttaccagcgagagctaccagcagggcgtgctgagcgccaccatcctgtacgagatcctgctgggcaaggccaccctgtacgccgtgctggtgtctgccctggtgctgatggctatggtcaagcggaaggacagccggggaagggccaagcgatctggatctggagcaacaaacttctcactactcaaacaagcaggtgacgtggaggagaatcccgggcctactagtatggactggatttggcgcatccttttccttgtcggcgctgctaccggcgcgcattccttcgaagaagtgaccctggtggaaagcggcggagacttcgtgaagcctggcggctctctgaaggtgtcctgtgccgccagcggcttcgcctttagccactacgccatgagctgggtgcgccagacccctgccaagagactggaatgggtggcctacatcagcagcggcggctccggcacctactactccgatagcgtgaagggccggttcaccatcagccgggacaacgccaagaacaccctgtacctccagatgcggagcctgcggagcgaggacagcgccatgtatttctgcaccagagtgaagctgggcacctattacttcgactcttggggccagggcaccaccctgaccgtgtcatctacgcgtatccagaaccctgatcctgccgtgtaccagctgcgggatagcaagagcagcgacaagagcgtgtgtctgttcaccgacttcgacagccagaccaacgtgtcccagagcaaggactccgacgtgtacatcaccgataagtgcgtgctggacatgcggagcatggacttcaagagcaactccgccgtggcctggtccaacaagtccgatttcgcctgcgccaacgccttcaacaacagcattatccccgaggacacattcttcccaagccccgagagcagctgcgacgtgaagctggtggaaaagagcttcgagacagacaccaacctgaacttccagaacctgagcgtgatcggcttcagaatcctgctgctgaaagtggccggctttaacctgctgatgaccctgcggctgtggtccagc

SEQ ID NO: 1904 - DNA, 2271 bp, Artificial Sequence
  Synthetic Polynucloetide
atggccttaccagtgaccgccttgctcctgccgctggccttgctgctccacgccgccaggccggaagtgcagctggttgaatctggcggaggactggttcagcctggcggatctctgagactgtcttgtgccgccagcggcttcagcttcagcgacttttggatgagctgggtccgacaggcccctggcaaaggacttgaatgggtcgccacaatcagccaggccggcagcgagaaggactacgtggactctgtgaagggcagattcaccatcagccgggacaacgccaagaagtccctgtacctccagatgaacagcctgagagccgaggacaccgccgtgtactattgtgcctctggcgtgtacagcttcgactacagaggccagggcaccctggtcacagtctcttctggtaccggcggaggcggatctggcggcggaggtagcggtggcggaggatctgaattccagttcgtgctgacccagagcccttctgcctctgctgccctgggagcctctgccaagctgacctgtacactgagcagcgcccacaagacctacaccatcgactggtatcagcagcagaagggaaaggcccccagatacctgatccaagtgaagtccgacggcacctacacaaaggccaccggcgtgcccgatagattcagcggcagtagcagcggagccgatagatacctgattatccccagcgtgcaggccgacgacgaggccgattactactgcggcaccgattacaccggcggctacgtgttcggcggaggcacacaactgaccgtgacactcgaggacctgaagaacgtgttcccacctgaggtggccgtgttcgagcctagcgaggccgagatcagccacacccagaaagccaccctcgtgtgcctggctaccggcttctaccccgaccatgtggaactgtcttggtgggtcaacggcaaagaggtgcacagcggcgtgtgtaccgacccccagccactgaaagaacagcccgccctgaacgacagccggtactgcctgagcagcagactgagagtgtccgccaccttctggcagaacccccggaaccacttcagatgccaggtgcagttctacggcctgagcgagaacgacgagtggacccaggacagagccaagcccgtgacccagatcgtgtctgccgaagcctggggcagagccgattgcggctttaccagcgagagctaccagcagggcgtgctgagcgccaccatcctgtacgagatcctgctgggcaaggccaccctgtacgccgtgctggtgtctgccctggtgctgatggctatggtcaagcggaaggacagccggggaagggccaagcgatctggatctggagcaacaaacttctcactactcaaacaagcaggtgacgtggaggagaatcccgggcctactagtatggactggatttggcgcatccttttccttgtcggcgctgctaccggcgcgcattccttcgaagagcaactgaaagagtctggcggcggactgttcaagcccaccgataccctgaccctgacctgcaccgtgtccggcttcagcctgagctactacggcgtgaactgggtgcgccaggcccctggcaatggcctggaatggatcggcacaatcggcggcagcggcgacacctactatgcctcttgggccaagtccagaagcaccatcatcagaaacaccaacgagaacaccgtgaccctgaagatgaccagcctgacagccgccgacaccgccacctacttttgcgtcagatacgccaacatcggctacgagtatttcaacgtgtggggacccggcaccctcgtgaccgtgtcatctacgcgtatccagaaccctgatcctgccgtgtaccagctgcgggatagcaagagcagcgacaagagcgtgtgtctgttcaccgacttcgacagccagaccaacgtgtcccagagcaaggactccgacgtgtacatcaccgataagtgcgtgctggacatgcggagcatggacttcaagagcaactccgccgtggcctggtccaacaagtccgatttcgcctgcgccaacgccttcaacaacagcattatccccgaggacacattcttcccaagccccgagagcagctgcgacgtgaagctggtggaaaagagcttcgagacagacaccaacctgaacttccagaacctgagcgtgatcggcttcagaatcctgctgctgaaagtggccggctttaacctgctgatgaccctgcggctgtggtccagc

SEQ ID NO: 1905 - DNA, 2286 bp, Artificial Sequence
  Synthetic Polynucloetide
atggccttaccagtgaccgccttgctcctgccgctggccttgctgctccacgccgccaggccggaagtgcagctggttgaatctggcggaggactggttcagcctggcggatctctgagactgtcttgtgccgccagcggcttcagcttcagcgacttttggatgagctgggtccgacaggcccctggcaaaggacttgaatgggtcgccacaatcagccaggccggcagcgagaaggactacgtggactctgtgaagggcagattcaccatcagccgggacaacgccaagaagtccctgtacctccagatgaacagcctgagagccgaggacaccgccgtgtactattgtgcctctggcgtgtacagcttcgactacagaggccagggcaccctggtcacagtctcttctggtaccggcggaggcggatctggcggcggaggtagcggtggcggaggatctgaattccagttcgtgctgacccagagcccttctgtgtctgccgccctgggagcctctgccaagctgacctgtacactgagcagcgcccacaagacctacaccatcgactggtatcagcagcagcagggcgaggcccccagatacctgatgcaagtgaagtccgacggcagctacaccaagggcaccggcgtgcccgatagattcagcggcagtagcagcggagccgatagatacctgattatccccagcgtgcaggccgacgacgaggccggatatgtgtgcggcgctgacgacaatggcggctacgtgttcggcggaggcacccaactgacagtgacactcgaggacctgaagaacgtgttcccacctgaggtggccgtgttcgagcctagcgaggccgagatcagccacacccagaaagccaccctcgtgtgcctggctaccggcttctaccccgaccatgtggaactgtcttggtgggtcaacggcaaagaggtgcacagcggcgtgtgtaccgacccccagccactgaaagaacagcccgccctgaacgacagccggtactgcctgagcagcagactgagagtgtccgccaccttctggcagaacccccggaaccacttcagatgccaggtgcagttctacggcctgagcgagaacgacgagtggacccaggacagagccaagcccgtgacccagatcgtgtctgccgaagcctggggcagagccgattgcggctttaccagcgagagctaccagcagggcgtgctgagcgccaccatcctgtacgagatcctgctgggcaaggccaccctgtacgccgtgctggtgtctgccctggtgctgatggctatggtcaagcggaaggacagccggggaagggccaagcgatctggatctggagcaacaaacttctcactactcaaacaagcaggtgacgtggaggagaatcccgggcctactagtatggactggatttggcgcatccttttccttgtcggcgctgctaccggcgcgcattccttcgaacagagcgtgaaagagtctgagggcggcctgttcaagcccaccgataccctgaccctgacctgcaccgtgtccggcttcagcctgagcagacacgccctgacatgggtgcgccaggcccctggaaatggcctggaatggatcggagccatcgacaacgccggcaccacctactatgcctcttgggccaagtccagaagcaccatcacccggaacaccgacctgcacaccgtgaccctgaagatgaccagcctgaccgccagcgacaccgccacctacttttgcgccagagtgttctacgacatcaacagcggctactacctggacggcatggacctgtggggacctggcacacttgtgaccgtgtccagcacgcgtatccagaaccctgatcctgccgtgtaccagctgcgggatagcaagagcagcgacaagagcgtgtgtctgttcaccgacttcgacagccagaccaacgtgtcccagagcaaggactccgacgtgtacatcaccgataagtgcgtgctggacatgcggagcatggacttcaagagcaactccgccgtggcctggtccaacaagtccgatttcgcctgcgccaacgccttcaacaacagcattatccccgaggacacattcttcccaagccccgagagcagctgcgacgtgaagctggtggaaaagagcttcgagacagacaccaacctgaacttccagaacctgagcgtgatcggcttcagaatcctgctgctgaaagtggccggctttaacctgctgatgaccctgcggctgtggtccagc

SEQ ID NO: 1906 - DNA, 2268 bp, Artificial Sequence
  Synthetic Polynucloetide
atggccttaccagtgaccgccttgctcctgccgctggccttgctgctccacgccgccaggccggaagtgcagctggttgaatctggcggaggactggttcagcctggcggatctctgagactgtcttgtgccgccagcggcttcagcttcagcgacttttggatgagctgggtccgacaggcccctggcaaaggacttgaatgggtcgccacaatcagccaggccggcagcgagaaggactacgtggactctgtgaagggcagattcaccatcagccgggacaacgccaagaagtccctgtacctccagatgaacagcctgagagccgaggacaccgccgtgtactattgtgcctctggcgtgtacagcttcgactacagaggccagggcaccctggtcacagtctcttctggtaccggcggaggcggatctggcggcggaggtagcggtggcggaggatctgaattcgacatccagatgacccagagccccagcagcctgtctgccagcgtgggcgacagagtgaccatcacctgtagagccagccagggcatcagctcttggctggcctggtatcagcagaagcccgagaaggcccccaagagcctgatctacgccgcctctagtctccagagcggcgtgcccagcagattttctggcagcggctccggcaccgacttcaccctgacaatcagctccctccagcccgaggacttcgccacctactactgccagcagtacaacagctacccccccacctttggcggaggcaccaaggtggaaatcaagctcgaggacctgaagaacgtgttcccacctgaggtggccgtgttcgagcctagcgaggccgagatcagccacacccagaaagccaccctcgtgtgcctggctaccggcttctaccccgaccatgtggaactgtcttggtgggtcaacggcaaagaggtgcacagcggcgtgtgtaccgacccccagccactgaaagaacagcccgccctgaacgacagccggtactgcctgagcagcagactgagagtgtccgccaccttctggcagaacccccggaaccacttcagatgccaggtgcagttctacggcctgagcgagaacgacgagtggacccaggacagagccaagcccgtgacccagatcgtgtctgccgaagcctggggcagagccgattgcggctttaccagcgagagctaccagcagggcgtgctgagcgccaccatcctgtacgagatcctgctgggcaaggccaccctgtacgccgtgctggtgtctgccctggtgctgatggctatggtcaagcggaaggacagccggggaagggccaagcgatctggatctggagcaacaaacttctcactactcaaacaagcaggtgacgtggaggagaatcccgggcctactagtatggactggatttggcgcatccttttccttgtcggcgctgctaccggcgcgcattccttcgaagaagtgcaactggtggaatcaggcggcggactggtgcagcctggcgagtctctgagactgagctgtgtggcctccggcttcaccttcagccggtacaagatgaactgggtgcgccaggcccctggcaagggactggaatgggtgtcctacatcagccgcagcggcagagacatctactacgccgacagcgtgaagggccggttcaccatcagcagagacaacgccaagaacagcctgtacctccagatgaactccctgcgggacgaggacaccgccgtgtactactgtgccggaaccgtgaccacctattactacttcggcatggacgtgtggggccacggcaccaccgtgacagtgtcatctacgcgtatccagaaccctgatcctgccgtgtaccagctgcgggatagcaagagcagcgacaagagcgtgtgtctgttcaccgacttcgacagccagaccaacgtgtcccagagcaaggactccgacgtgtacatcaccgataagtgcgtgctggacatgcggagcatggacttcaagagcaactccgccgtggcctggtccaacaagtccgatttcgcctgcgccaacgccttcaacaacagcattatccccgaggacacattcttcccaagccccgagagcagctgcgacgtgaagctggtggaaaagagcttcgagacagacaccaacctgaacttccagaacctgagcgtgatcggcttcagaatcctgctgctgaaagtggccggctttaacctgctgatgaccctgcggctgtggtccagc

SEQ ID NO: 1907 - DNA, 2271 bp, Artificial Sequence
  Synthetic Polynucloetide
atggccttaccagtgaccgccttgctcctgccgctggccttgctgctccacgccgccaggccggaagtgcagctggttgaatctggcggaggactggttcagcctggcggatctctgagactgtcttgtgccgccagcggcttcagcttcagcgacttttggatgagctgggtccgacaggcccctggcaaaggacttgaatgggtcgccacaatcagccaggccggcagcgagaaggactacgtggactctgtgaagggcagattcaccatcagccgggacaacgccaagaagtccctgtacctccagatgaacagcctgagagccgaggacaccgccgtgtactattgtgcctctggcgtgtacagcttcgactacagaggccagggcaccctggtcacagtctcttctggtaccggcggaggcggatctggcggcggaggtagcggtggcggaggatctgaattcgacatccagatgacccagagccccagcagcctgtctgccagcgtgggcgacagagtgaccatcacctgtagagccagccagggcatcagctcttggctggcctggtatcagcagaagcccgagaaggcccccaagagcctgatctacgccgcctctagtctccagagcggcgtgcccagcagattttctggcagcggctccggcaccgacttcaccctgacaatcagctccctccagcccgaggacttcgccacctactactgccagcagtacaacagctaccctcccacctttggcggaggcaccaaggtggaaatcaagctcgaggacctgaagaacgtgttcccacctgaggtggccgtgttcgagcctagcgaggccgagatcagccacacccagaaagccaccctcgtgtgcctggctaccggcttctaccccgaccatgtggaactgtcttggtgggtcaacggcaaagaggtgcacagcggcgtgtgtaccgacccccagccactgaaagaacagcccgccctgaacgacagccggtactgcctgagcagcagactgagagtgtccgccaccttctggcagaacccccggaaccacttcagatgccaggtgcagttctacggcctgagcgagaacgacgagtggacccaggacagagccaagcccgtgacccagatcgtgtctgccgaagcctggggcagagccgattgcggctttaccagcgagagctaccagcagggcgtgctgagcgccaccatcctgtacgagatcctgctgggcaaggccaccctgtacgccgtgctggtgtctgccctggtgctgatggctatggtcaagcggaaggacagccggggaagggccaagcgatctggatctggagcaacaaacttctcactactcaaacaagcaggtgacgtggaggagaatcccgggcctactagtatggactggatttggcgcatccttttccttgtcggcgctgctaccggcgcgcattccttcgaagaagtgcaactggtggaatccgggggaggctctgtgcagcctggcgagtctctgagactgagctgtgtggcctccggcttcaccttcagccggtacaagatgaactgggtgcgccaggcccctggcaagggactggaatgggtgtcctacatcagccgcagcggcagagacatctactacgccgacagcgtgaagggccggttcaccatcagcagagacaacgccaagaacagcctgtacctccagatgaactccctgcgggacgaggacaccgccgtgtactactgtgccggaaccgtgaccacctattactacgacttcggcatggacgtgtggggccagggcacaaccgtgacagtgtctagcacgcgtatccagaaccctgatcctgccgtgtaccagctgcgggatagcaagagcagcgacaagagcgtgtgtctgttcaccgacttcgacagccagaccaacgtgtcccagagcaaggactccgacgtgtacatcaccgataagtgcgtgctggacatgcggagcatggacttcaagagcaactccgccgtggcctggtccaacaagtccgatttcgcctgcgccaacgccttcaacaacagcattatccccgaggacacattcttcccaagccccgagagcagctgcgacgtgaagctggtggaaaagagcttcgagacagacaccaacctgaacttccagaacctgagcgtgatcggcttcagaatcctgctgctgaaagtggccggctttaacctgctgatgaccctgcggctgtggtccagc

SEQ ID NO: 1908 - DNA, 2265 bp, Artificial Sequence
  Synthetic Polynucloetide
atggccttaccagtgaccgccttgctcctgccgctggccttgctgctccacgccgccaggccggaagtgcagctggttgaatctggcggaggactggttcagcctggcggatctctgagactgtcttgtgccgccagcggcttcagcttcagcgacttttggatgagctgggtccgacaggcccctggcaaaggacttgaatgggtcgccacaatcagccaggccggcagcgagaaggactacgtggactctgtgaagggcagattcaccatcagccgggacaacgccaagaagtccctgtacctccagatgaacagcctgagagccgaggacaccgccgtgtactattgtgcctctggcgtgtacagcttcgactacagaggccagggcaccctggtcacagtctcttctggtaccggcggaggcggatctggcggcggaggtagcggtggcggaggatctgaattccagtctgtgctgacacagcctccatctgcctctggcacacctggacagagagtgaccatcagctgtagcggcagcagaagcaacgtcggcggcaactacgtgttctggtatcagcaggtcccaggcgctacccctaagctgctgatctacagaagcaatcagcggcctagcggcgtgcccgatagatttgccggaagcaagagcggcagctctgccagccttgccatctctggactgagaagcgaggacgaggccgactactactgtgccacctgggatgatagcctgagcggcttcgtgtttggcaccggcaccaaagtgacagtgcttggtctcgaggacctgaagaacgtgttcccacctgaggtggccgtgttcgagcctagcgaggccgagatcagccacacccagaaagccaccctcgtgtgcctggctaccggcttctaccccgaccatgtggaactgtcttggtgggtcaacggcaaagaggtgcacagcggcgtgtgtaccgacccccagccactgaaagaacagcccgccctgaacgacagccggtactgcctgagcagcagactgagagtgtccgccaccttctggcagaacccccggaaccacttcagatgccaggtgcagttctacggcctgagcgagaacgacgagtggacccaggacagagccaagcccgtgacccagatcgtgtctgccgaagcctggggcagagccgattgcggctttaccagcgagagctaccagcagggcgtgctgagcgccaccatcctgtacgagatcctgctgggcaaggccaccctgtacgccgtgctggtgtctgccctggtgctgatggctatggtcaagcggaaggacagccggggaagggccaagcgatctggatctggagcaacaaacttctcactactcaaacaagcaggtgacgtggaggagaatcccgggcctactagtatggactggatttggcgcatccttttccttgtcggcgctgctaccggcgcgcattccttcgaagttcagctggttgaatctggcggcggactggttaagcctggcggatctctgagactgtcttgtgccgccagcggcttcaccttcagcgattactacatgagctggatcagacaggcccctggcaaaggactggaatgggtgtcctacatcagcagcagcggctccaccatctactacgccgatagcgtgaagggcagattcaccatcagccgggacaacgccaagaacagcctgtacctccagatgaactccctgagagccgaggacaccgccgtgtactattgcgccagaggctacggcaaagcctacgatcaatggggccagggcacactggtcaccgtttcttctacgcgtatccagaaccctgatcctgccgtgtaccagctgcgggatagcaagagcagcgacaagagcgtgtgtctgttcaccgacttcgacagccagaccaacgtgtcccagagcaaggactccgacgtgtacatcaccgataagtgcgtgctggacatgcggagcatggacttcaagagcaactccgccgtggcctggtccaacaagtccgatttcgcctgcgccaacgccttcaacaacagcattatccccgaggacacattcttcccaagccccgagagcagctgcgacgtgaagctggtggaaaagagcttcgagacagacaccaacctgaacttccagaacctgagcgtgatcggcttcagaatcctgctgctgaaagtggccggctttaacctgctgatgaccctgcggctgtggtccagc

SEQ ID NO: 1909 - DNA, 2262 bp, Artificial Sequence
  Synthetic Polynucloetide
atggccttaccagtgaccgccttgctcctgccgctggccttgctgctccacgccgccaggccggaagtgcagctggttgaatctggcggaggactggttcagcctggcggatctctgagactgtcttgtgccgccagcggcttcagcttcagcgacttttggatgagctgggtccgacaggcccctggcaaaggacttgaatgggtcgccacaatcagccaggccggcagcgagaaggactacgtggactctgtgaagggcagattcaccatcagccgggacaacgccaagaagtccctgtacctccagatgaacagcctgagagccgaggacaccgccgtgtactattgtgcctctggcgtgtacagcttcgactacagaggccagggcaccctggtcacagtctcttctggtaccggcggaggcggatctggcggcggaggtagcggtggcggaggatctgaattccagtctgtggtcacacagccacctagcatgtctgccgctccaggccagcaagtgaccatctcttgtagcggcggcaacagcaacatcgagcggaactacgtgtcctggtatctgcaactgcctggcacagcccctaagctggtcatcttcgacaacgacagacggcccagcggcatccccgatagattttctggcagcaagagcggcaccagcgccacactgggaattaccggacttcagacaggcgacgaggccgactactactgtggcacatgggactctagcctgagaggctgggttttcggcggaggcacaaagctgacagtgcttggtctcgaggacctgaagaacgtgttcccacctgaggtggccgtgttcgagcctagcgaggccgagatcagccacacccagaaagccaccctcgtgtgcctggctaccggcttctaccccgaccatgtggaactgtcttggtgggtcaacggcaaagaggtgcacagcggcgtgtgtaccgacccccagccactgaaagaacagcccgccctgaacgacagccggtactgcctgagcagcagactgagagtgtccgccaccttctggcagaacccccggaaccacttcagatgccaggtgcagttctacggcctgagcgagaacgacgagtggacccaggacagagccaagcccgtgacccagatcgtgtctgccgaagcctggggcagagccgattgcggctttaccagcgagagctaccagcagggcgtgctgagcgccaccatcctgtacgagatcctgctgggcaaggccaccctgtacgccgtgctggtgtctgccctggtgctgatggctatggtcaagcggaaggacagccggggaagggccaagcgatctggatctggagcaacaaacttctcactactcaaacaagcaggtgacgtggaggagaatcccgggcctactagtatggactggatttggcgcatccttttccttgtcggcgctgctaccggcgcgcattccttcgaagtgcagctcgttgagtctggcggcggactgattcaacctggcggaagcctgagactgagctgtgccgcttccggcttcaccttcagcaactacgccatgaactgggttcgacaggcccctggcaaaggactggaatgggtgtccaccatcaacggcagaggcagcagcaccatctacgccgattctgtgaagggcagattcaccatcagccgggacaacagcaagaacaccctgtacctccagatgaactccctgagagccgaggacaccgccacctattactgtgcccggtacatcagcagaggactgggcgattcttggggccagggcacactggttacagtgacgcgtatccagaaccctgatcctgccgtgtaccagctgcgggatagcaagagcagcgacaagagcgtgtgtctgttcaccgacttcgacagccagaccaacgtgtcccagagcaaggactccgacgtgtacatcaccgataagtgcgtgctggacatgcggagcatggacttcaagagcaactccgccgtggcctggtccaacaagtccgatttcgcctgcgccaacgccttcaacaacagcattatccccgaggacacattcttcccaagccccgagagcagctgcgacgtgaagctggtggaaaagagcttcgagacagacaccaacctgaacttccagaacctgagcgtgatcggcttcagaatcctgctgctgaaagtggccggctttaacctgctgatgaccctgcggctgtggtccagc

SEQ ID NO: 1910 - DNA, 2265 bp, Artificial Sequence
  Synthetic Polynucloetide
atggccttaccagtgaccgccttgctcctgccgctggccttgctgctccacgccgccaggccggaagtgcagctggttgaatctggcggaggactggttcagcctggcggatctctgagactgtcttgtgccgccagcggcttcagcttcagcgacttttggatgagctgggtccgacaggcccctggcaaaggacttgaatgggtcgccacaatcagccaggccggcagcgagaaggactacgtggactctgtgaagggcagattcaccatcagccgggacaacgccaagaagtccctgtacctccagatgaacagcctgagagccgaggacaccgccgtgtactattgtgcctctggcgtgtacagcttcgactacagaggccagggcaccctggtcacagtctcttctggtaccggcggaggcggatctggcggcggaggtagcggtggcggaggatctgaattcgacgtcgtgatgacccagacccctctgagcctgcctgtgtccctgggcgatcaggccagcatcagctgtagaagcagccagagcctggtgcacagcaacggcaacacctacctgcactggtatctccagaagcccggccagagccccaagctgctgatctacaaggtgtccaacagattcagcggcgtgcccgacagattctccggcagcggctctggcaccgacttcaccctgaagatcagccgggtggaagccgaggacctgggcgtgtacttctgtagccagaacacccccgtgccccccaagtttggcagcggcaccaagctggaaatcaagctcgaggacctgaagaacgtgttcccacctgaggtggccgtgttcgagcctagcgaggccgagatcagccacacccagaaagccaccctcgtgtgcctggctaccggcttctaccccgaccatgtggaactgtcttggtgggtcaacggcaaagaggtgcacagcggcgtgtgtaccgacccccagccactgaaagaacagcccgccctgaacgacagccggtactgcctgagcagcagactgagagtgtccgccaccttctggcagaacccccggaaccacttcagatgccaggtgcagttctacggcctgagcgagaacgacgagtggacccaggacagagccaagcccgtgacccagatcgtgtctgccgaagcctggggcagagccgattgcggctttaccagcgagagctaccagcagggcgtgctgagcgccaccatcctgtacgagatcctgctgggcaaggccaccctgtacgccgtgctggtgtctgccctggtgctgatggctatggtcaagcggaaggacagccggggaagggccaagcgatctggatctggagcaacaaacttctcactactcaaacaagcaggtgacgtggaggagaatcccgggcctactagtatggactggatttggcgcatccttttccttgtcggcgctgctaccggcgcgcattccttcgaacaggtgcagctccagcagtctggcgctgaactcgtgcggcctggcgcttctgtgaagctgtcttgcaaggccagcggctacaccttcaacgactacgagatgcactgggtcaagcagacccctgtgcacggcctgaagtggatcggagccctggaacccaagaccggcgataccgcctacagccagaagttcaagggcaaggccaccctgaccgccgacaagagcagcagcacagcctacatggaactgcggagcctgaccagcgaggacagcgccgtgtactactgcaccagctgctactactacacctacagcggccagggcaccctcgtgacagtgtctgctacgcgtatccagaaccctgatcctgccgtgtaccagctgcgggatagcaagagcagcgacaagagcgtgtgtctgttcaccgacttcgacagccagaccaacgtgtcccagagcaaggactccgacgtgtacatcaccgataagtgcgtgctggacatgcggagcatggacttcaagagcaactccgccgtggcctggtccaacaagtccgatttcgcctgcgccaacgccttcaacaacagcattatccccgaggacacattcttcccaagccccgagagcagctgcgacgtgaagctggtggaaaagagcttcgagacagacaccaacctgaacttccagaacctgagcgtgatcggcttcagaatcctgctgctgaaagtggccggctttaacctgctgatgaccctgcggctgtggtccagc

SEQ ID NO: 1911 - DNA, 2262 bp, Artificial Sequence
  Synthetic Polynucloetide
atggccttaccagtgaccgccttgctcctgccgctggccttgctgctccacgccgccaggccggaagtgcagctggttgaatctggcggaggactggttcagcctggcggatctctgagactgtcttgtgccgccagcggcttcagcttcagcgacttttggatgagctgggtccgacaggcccctggcaaaggacttgaatgggtcgccacaatcagccaggccggcagcgagaaggactacgtggactctgtgaagggcagattcaccatcagccgggacaacgccaagaagtccctgtacctccagatgaacagcctgagagccgaggacaccgccgtgtactattgtgcctctggcgtgtacagcttcgactacagaggccagggcaccctggtcacagtctcttctggtaccggcggaggcggatctggcggcggaggtagcggtggcggaggatctgaattcgacatccaactgacccagagccccagcagcctgtctgcctctgtgggcgacagagtgaccatcacctgtagagccagccagggcatcagaaacgacctgggctggtatcagcagaagcccggcaaggcccccaagcggctgatctatgctgccagctccctccagaatggcgtgcccagcagattttccggcagcggctctggcaccgagttcaccctgaccatcagctccctccagcccgaggacttcgccacctactactgcctccagcacaacacctaccccgccttcggccagggcaccaaggtggaaatcaagagactcgaggacctgaagaacgtgttcccacctgaggtggccgtgttcgagcctagcgaggccgagatcagccacacccagaaagccaccctcgtgtgcctggctaccggcttctaccccgaccatgtggaactgtcttggtgggtcaacggcaaagaggtgcacagcggcgtgtgtaccgacccccagccactgaaagaacagcccgccctgaacgacagccggtactgcctgagcagcagactgagagtgtccgccaccttctggcagaacccccggaaccacttcagatgccaggtgcagttctacggcctgagcgagaacgacgagtggacccaggacagagccaagcccgtgacccagatcgtgtctgccgaagcctggggcagagccgattgcggctttaccagcgagagctaccagcagggcgtgctgagcgccaccatcctgtacgagatcctgctgggcaaggccaccctgtacgccgtgctggtgtctgccctggtgctgatggctatggtcaagcggaaggacagccggggaagggccaagcgatctggatctggagcaacaaacttctcactactcaaacaagcaggtgacgtggaggagaatcccgggcctactagtatggactggatttggcgcatccttttccttgtcggcgctgctaccggcgcgcattccttcgaacaggtgcaactccaggaatctggccctggcctcgtgaagcctagccagaccctgagcctgacctgtaccgtgtctggcggcagcatcagcagcttcaactactactggtcctggatcagacaccaccctggcaagggcctggaatggatcggctacatctactacagcggcagcacctacagcaaccccagcctgaagtcccgcgtgaccatctccgtggacaccagcaagaaccagtttagcctgaccctgtccagcgtgacagccgccgataccgccgtgtactactgcgccagaggctacaactggaactacttcgactactggggccagggaaccctcgtgaccgtgtctagtacgcgtatccagaaccctgatcctgccgtgtaccagctgcgggatagcaagagcagcgacaagagcgtgtgtctgttcaccgacttcgacagccagaccaacgtgtcccagagcaaggactccgacgtgtacatcaccgataagtgcgtgctggacatgcggagcatggacttcaagagcaactccgccgtggcctggtccaacaagtccgatttcgcctgcgccaacgccttcaacaacagcattatccccgaggacacattcttcccaagccccgagagcagctgcgacgtgaagctggtggaaaagagcttcgagacagacaccaacctgaacttccagaacctgagcgtgatcggcttcagaatcctgctgctgaaagtggccggctttaacctgctgatgaccctgcggctgtggtccagc

SEQ ID NO: 1912 - DNA, 2268 bp, Artificial Sequence
  Synthetic Polynucloetide
atggccttaccagtgaccgccttgctcctgccgctggccttgctgctccacgccgccaggccggaagtgcagctggttgaatctggcggaggactggttcagcctggcggatctctgagactgtcttgtgccgccagcggcttcagcttcagcgacttttggatgagctgggtccgacaggcccctggcaaaggacttgaatgggtcgccacaatcagccaggccggcagcgagaaggactacgtggactctgtgaagggcagattcaccatcagccgggacaacgccaagaagtccctgtacctccagatgaacagcctgagagccgaggacaccgccgtgtactattgtgcctctggcgtgtacagcttcgactacagaggccagggcaccctggtcacagtctcttctggtaccggcggaggcggatctggcggcggaggtagcggtggcggaggatctgaattcgacgacatcgtgctgacccagagccccgccagcctggccgtgagcctgggccagagcgtgaccatcagctgcagagccagcgagagcgtggagtactacggcaccagcctgatgcagtggtaccagcagaagcccggccagccccccaagctgctgatctacgccaccagcaacgtggagagcggcgtgcccgccagattcagcggcagcggcagcggcaccgacttcagcctgaacatccaccccgtggaggaggacgacatcgccatgtacttctgccagcagagcagaaagctgcccagcaccttcggcggcggcaccaagctggagatcaagctcgaggacctgaagaacgtgttcccacctgaggtggccgtgttcgagcctagcgaggccgagatcagccacacccagaaagccaccctcgtgtgcctggctaccggcttctaccccgaccatgtggaactgtcttggtgggtcaacggcaaagaggtgcacagcggcgtgtgtaccgacccccagccactgaaagaacagcccgccctgaacgacagccggtactgcctgagcagcagactgagagtgtccgccaccttctggcagaacccccggaaccacttcagatgccaggtgcagttctacggcctgagcgagaacgacgagtggacccaggacagagccaagcccgtgacccagatcgtgtctgccgaagcctggggcagagccgattgcggctttaccagcgagagctaccagcagggcgtgctgagcgccaccatcctgtacgagatcctgctgggcaaggccaccctgtacgccgtgctggtgtctgccctggtgctgatggctatggtcaagcggaaggacagccggggaagggccaagcgatctggatctggagcaacaaacttctcactactcaaacaagcaggtgacgtggaggagaatcccgggcctactagtatggactggatttggcgcatccttttccttgtcggcgctgctaccggcgcgcattccttcgaagacgtgagactgcaggagagcggccccggccaggtgaagcccagccagaccgtgagcctgacctgcagcgtgaccggctacagcatcaccaacggcaaccactggtggaactggatcagacaggtgagcggcagcaagctggagtggatcggctacatcagcagcagcggcagcaccgacagcaaccccagcctgaagagcagaatcagcatcaccagagacaccagcaagaaccagctgttcctgcagctgaacagcgtgaccaccgaggacatcgccacctactactgcgccagaggctactacttcgactactggggccagggcaccaccctgaccgtgagcagcacgcgtatccagaaccctgatcctgccgtgtaccagctgcgggatagcaagagcagcgacaagagcgtgtgtctgttcaccgacttcgacagccagaccaacgtgtcccagagcaaggactccgacgtgtacatcaccgataagtgcgtgctggacatgcggagcatggacttcaagagcaactccgccgtggcctggtccaacaagtccgatttcgcctgcgccaacgccttcaacaacagcattatccccgaggacacattcttcccaagccccgagagcagctgcgacgtgaagctggtggaaaagagcttcgagacagacaccaacctgaacttccagaacctgagcgtgatcggcttcagaatcctgctgctgaaagtggccggctttaacctgctgatgaccctgcggctgtggtccagc

SEQ ID NO: 1913 - DNA, 2265 bp, Artificial Sequence
  Synthetic Polynucloetide
atggccttaccagtgaccgccttgctcctgccgctggccttgctgctccacgccgccaggccggaagtgcagctggttgaatctggcggaggactggttcagcctggcggatctctgagactgtcttgtgccgccagcggcttcagcttcagcgacttttggatgagctgggtccgacaggcccctggcaaaggacttgaatgggtcgccacaatcagccaggccggcagcgagaaggactacgtggactctgtgaagggcagattcaccatcagccgggacaacgccaagaagtccctgtacctccagatgaacagcctgagagccgaggacaccgccgtgtactattgtgcctctggcgtgtacagcttcgactacagaggccagggcaccctggtcacagtctcttctggtaccggcggaggcggatctggcggcggaggtagcggtggcggaggatctgaattcgacatccagatgacccagagccccagcagcctgtctgccagcgtgggcgacagagtgaccatcacctgtagagccagccaggacgtgaacaccgccgtggcctggtatcagcagaagcctggcaaggcccccaagctgctgatctacagcgccagcttcctggaaagcggcgtgcccagcagattcagcggaagcagaagcggcaccgacttcaccctgaccatcagctccctccagcccgaggacttcgccacctactactgccagcagcactacaccacccctcccaccttcggccagaccaaggtggaaatcaagagactcgaggacctgaagaacgtgttcccacctgaggtggccgtgttcgagcctagcgaggccgagatcagccacacccagaaagccaccctcgtgtgcctggctaccggcttctaccccgaccatgtggaactgtcttggtgggtcaacggcaaagaggtgcacagcggcgtgtgtaccgacccccagccactgaaagaacagcccgccctgaacgacagccggtactgcctgagcagcagactgagagtgtccgccaccttctggcagaacccccggaaccacttcagatgccaggtgcagttctacggcctgagcgagaacgacgagtggacccaggacagagccaagcccgtgacccagatcgtgtctgccgaagcctggggcagagccgattgcggctttaccagcgagagctaccagcagggcgtgctgagcgccaccatcctgtacgagatcctgctgggcaaggccaccctgtacgccgtgctggtgtctgccctggtgctgatggctatggtcaagcggaaggacagccggggaagggccaagcgatctggatctggagcaacaaacttctcactactcaaacaagcaggtgacgtggaggagaatcccgggcctactagtatggactggatttggcgcatccttttccttgtcggcgctgctaccggcgcgcattccttcgaagaagtgcaactggtggaatctggcggcggactggtgcagcctggcggatctctgagactgagctgtgccgccagcggcttcaacatcaaggacacctacatccactgggtgcgccaggcccctggaaagggactggaatgggtggcccggatctaccccaccaacggctacaccagatacgccgacagcgtgaagggccggttcaccatcagcgccgacaccagcaagaataccgcctacctccagatgaacagcctgcgggccgaggataccgccgtgtactactgctcaagatggggaggcgacggcttctacgctatggacgtgtggggccagggcacccttgtgaccgtgtcatctacgcgtatccagaaccctgatcctgccgtgtaccagctgcgggatagcaagagcagcgacaagagcgtgtgtctgttcaccgacttcgacagccagaccaacgtgtcccagagcaaggactccgacgtgtacatcaccgataagtgcgtgctggacatgcggagcatggacttcaagagcaactccgccgtggcctggtccaacaagtccgatttcgcctgcgccaacgccttcaacaacagcattatccccgaggacacattcttcccaagccccgagagcagctgcgacgtgaagctggtggaaaagagcttcgagacagacaccaacctgaacttccagaacctgagcgtgatcggcttcagaatcctgctgctgaaagtggccggctttaacctgctgatgaccctgcggctgtggtccagc

SEQ ID NO: 1914 - DNA, 2262 bp, Artificial Sequence
  Synthetic Polynucloetide
atggccttaccagtgaccgccttgctcctgccgctggccttgctgctccacgccgccaggccggaagtgcagctggttgaatctggcggaggactggttcagcctggcggatctctgagactgtcttgtgccgccagcggcttcagcttcagcgacttttggatgagctgggtccgacaggcccctggcaaaggacttgaatgggtcgccacaatcagccaggccggcagcgagaaggactacgtggactctgtgaagggcagattcaccatcagccgggacaacgccaagaagtccctgtacctccagatgaacagcctgagagccgaggacaccgccgtgtactattgtgcctctggcgtgtacagcttcgactacagaggccagggcaccctggtcacagtctcttctggtaccggcggaggcggatctggcggcggaggtagcggtggcggaggatctgaattcgaccagagcgtgctgacacagcctcctagcgtgtcagtggcccctggcaagaccgccagaatcccctgcgagggcaactacatcggcagcagcaacgtgcactggtatcagcagaagcccggccaggctcccgtgctcgtgatccacttcgacagcgacagacccagcggcatccccgacagattcagcggcagcaacagcggcaacatggctaccctgaccatcagcagagtggaagccggggacgaggccgactactactgtcaagtgtgggagaaccacggctgggtgttcggcggaggcaccaagctgacagtgctgtctctcgaggacctgaagaacgtgttcccacctgaggtggccgtgttcgagcctagcgaggccgagatcagccacacccagaaagccaccctcgtgtgcctggctaccggcttctaccccgaccatgtggaactgtcttggtgggtcaacggcaaagaggtgcacagcggcgtgtgtaccgacccccagccactgaaagaacagcccgccctgaacgacagccggtactgcctgagcagcagactgagagtgtccgccaccttctggcagaacccccggaaccacttcagatgccaggtgcagttctacggcctgagcgagaacgacgagtggacccaggacagagccaagcccgtgacccagatcgtgtctgccgaagcctggggcagagccgattgcggctttaccagcgagagctaccagcagggcgtgctgagcgccaccatcctgtacgagatcctgctgggcaaggccaccctgtacgccgtgctggtgtctgccctggtgctgatggctatggtcaagcggaaggacagccggggaagggccaagcgatctggatctggagcaacaaacttctcactactcaaacaagcaggtgacgtggaggagaatcccgggcctactagtatggactggatttggcgcatccttttccttgtcggcgctgctaccggcgcgcattccttcgaagaggtgcaactggtggaaacaggcggcggactggtgcagcctggcgagtctctgagactgagctgtgccgccagcggcttcaccttcagcgactacgagatgaactgggtgcgccaggcccctggaaagggcctggaatgggtgtcctacatcagcagctccggcagcaccatctactacgccgacagcgtgaagggccggtttaccatctaccgggacaacgccaagaacagcctgtacctccagatgaactccctgcgggccgaggacaccgccctgtactattgtgccagagcctggggcgtgggaccccctgattattggggacagggcaccctcgtgaccgtgtcctctacgcgtatccagaaccctgatcctgccgtgtaccagctgcgggatagcaagagcagcgacaagagcgtgtgtctgttcaccgacttcgacagccagaccaacgtgtcccagagcaaggactccgacgtgtacatcaccgataagtgcgtgctggacatgcggagcatggacttcaagagcaactccgccgtggcctggtccaacaagtccgatttcgcctgcgccaacgccttcaacaacagcattatccccgaggacacattcttcccaagccccgagagcagctgcgacgtgaagctggtggaaaagagcttcgagacagacaccaacctgaacttccagaacctgagcgtgatcggcttcagaatcctgctgctgaaagtggccggctttaacctgctgatgaccctgcggctgtggtccagc

SEQ ID NO: 1915 - DNA, 2286 bp, Artificial Sequence
  Synthetic Polynucloetide
atggccttaccagtgaccgccttgctcctgccgctggccttgctgctccacgccgccaggccggaagtgcagctggttgaatctggcggaggactggttcagcctggcggatctctgagactgtcttgtgccgccagcggcttcagcttcagcgacttttggatgagctgggtccgacaggcccctggcaaaggacttgaatgggtcgccacaatcagccaggccggcagcgagaaggactacgtggactctgtgaagggcagattcaccatcagccgggacaacgccaagaagtccctgtacctccagatgaacagcctgagagccgaggacaccgccgtgtactattgtgcctctggcgtgtacagcttcgactacagaggccagggcaccctggtcacagtctcttctggtaccggcggaggcggatctggcggcggaggtagcggtggcggaggatctgaattcgacatccagatgacccagagccccagcagcctgtctgccagcgtgggcgataccgtgaccatcacctgtcaggccaacggctacctgaactggtatcagcagcggagaggcaaggcccccaagctgctgatctacgacggcagcaagctggaaagaggcgtgcccagcagattcagcggcagaagatggggccaggagtacaacctgaccatcaacaacctccagcccgaggatattgccacatacttttgccaggtgtacgagttcgtggtgcccggcacacggctggacctgaagagaacagtggctgctcctctcgaggacctgaagaacgtgttcccacctgaggtggccgtgttcgagcctagcgaggccgagatcagccacacccagaaagccaccctcgtgtgcctggctaccggcttctaccccgaccatgtggaactgtcttggtgggtcaacggcaaagaggtgcacagcggcgtgtgtaccgacccccagccactgaaagaacagcccgccctgaacgacagccggtactgcctgagcagcagactgagagtgtccgccaccttctggcagaacccccggaaccacttcagatgccaggtgcagttctacggcctgagcgagaacgacgagtggacccaggacagagccaagcccgtgacccagatcgtgtctgccgaagcctggggcagagccgattgcggctttaccagcgagagctaccagcagggcgtgctgagcgccaccatcctgtacgagatcctgctgggcaaggccaccctgtacgccgtgctggtgtctgccctggtgctgatggctatggtcaagcggaaggacagccggggaagggccaagcgatctggatctggagcaacaaacttctcactactcaaacaagcaggtgacgtggaggagaatcccgggcctactagtatggactggatttggcgcatccttttccttgtcggcgctgctaccggcgcgcattccttcgaacaggtgcagctgctccagtctggcgctgccgtgacaaagcctggcgcttctgtgcgggtgtcctgtgaagccagcggctacaacatccgggactacttcatccactggtggcggcaggctccaggccagggactccagtgggtgggatggatcaaccccaagaccggccagcccaacaaccccagacagttccagggcagagtgtccctgaccagacacgccagctgggacttcgacaccttcagcttctacatggatctgaaggccctgcggagcgacgataccgccgtgtacttctgcgccagacagagaagcgactactgggatttcgacgtgtggggcagcggcacccaagtgacagtgtctagcgccagcaccaagggacccacgcgtatccagaaccctgatcctgccgtgtaccagctgcgggatagcaagagcagcgacaagagcgtgtgtctgttcaccgacttcgacagccagaccaacgtgtcccagagcaaggactccgacgtgtacatcaccgataagtgcgtgctggacatgcggagcatggacttcaagagcaactccgccgtggcctggtccaacaagtccgatttcgcctgcgccaacgccttcaacaacagcattatccccgaggacacattcttcccaagccccgagagcagctgcgacgtgaagctggtggaaaagagcttcgagacagacaccaacctgaacttccagaacctgagcgtgatcggcttcagaatcctgctgctgaaagtggccggctttaacctgctgatgaccctgcggctgtggtccagc

SEQ ID NO: 1916 - DNA, 2304 bp, Artificial Sequence
  Synthetic Polynucloetide
atggccttaccagtgaccgccttgctcctgccgctggccttgctgctccacgccgccaggccggaagtgcagctggttgaatctggcggaggactggttcagcctggcggatctctgagactgtcttgtgccgccagcggcttcagcttcagcgacttttggatgagctgggtccgacaggcccctggcaaaggacttgaatgggtcgccacaatcagccaggccggcagcgagaaggactacgtggactctgtgaagggcagattcaccatcagccgggacaacgccaagaagtccctgtacctccagatgaacagcctgagagccgaggacaccgccgtgtactattgtgcctctggcgtgtacagcttcgactacagaggccagggcaccctggtcacagtctcttctggtaccggcggaggcggatctggcggcggaggtagcggtggcggaggatctgaattccagtctgccctgacacagcctcctagcgcctctggctctcccggccagagcatcaccatcagctgtaccggcaccagcaacaacttcgtgtcctggtatcagcagcacgccggcaaggcccccaagctcgtgatctacgacgtgaacaagcggcccagcggcgtgcccgatagattcagcggcagcaagagcggcaacaccgccagcctgacagtgtctggcctccagaccgatgacgaggccgtgtactactgcggcagcctcgtgggcaactgggacgtgatctttggcggaggcaccaagctgaccgtgctgctcgaggacctgaagaacgtgttcccacctgaggtggccgtgttcgagcctagcgaggccgagatcagccacacccagaaagccaccctcgtgtgcctggctaccggcttctaccccgaccatgtggaactgtcttggtgggtcaacggcaaagaggtgcacagcggcgtgtgtaccgacccccagccactgaaagaacagcccgccctgaacgacagccggtactgcctgagcagcagactgagagtgtccgccaccttctggcagaacccccggaaccacttcagatgccaggtgcagttctacggcctgagcgagaacgacgagtggacccaggacagagccaagcccgtgacccagatcgtgtctgccgaagcctggggcagagccgattgcggctttaccagcgagagctaccagcagggcgtgctgagcgccaccatcctgtacgagatcctgctgggcaaggccaccctgtacgccgtgctggtgtctgccctggtgctgatggctatggtcaagcggaaggacagccggggaagggccaagcgatctggatctggagcaacaaacttctcactactcaaacaagcaggtgacgtggaggagaatcccgggcctactagtatggactggatttggcgcatccttttccttgtcggcgctgctaccggcgcgcattccttcgaacagccccagctccaggaatctggccccacactggtggaagccagcgagacactgagcctgacctgtgccgtgtccggcgattctaccgccgcctgcaatagcttctggggctgggtgcgccagcctcctggaaagggactggaatgggtgggaagcctgagccactgcgccagctattggaaccggggctggacctaccacaaccccagcctgaagtccagactgaccctggccctggacacccccaagaacctggtgttcctgaagctgaacagcgtgacagccgccgacaccgccacctactactgtgccagatttggcggcgaggtgctgcggtacaccgactggcctaaacctgcctgggtggacctgtggggcagaggaacactcgtgaccgtgtccagcacgcgtatccagaaccctgatcctgccgtgtaccagctgcgggatagcaagagcagcgacaagagcgtgtgtctgttcaccgacttcgacagccagaccaacgtgtcccagagcaaggactccgacgtgtacatcaccgataagtgcgtgctggacatgcggagcatggacttcaagagcaactccgccgtggcctggtccaacaagtccgatttcgcctgcgccaacgccttcaacaacagcattatccccgaggacacattcttcccaagccccgagagcagctgcgacgtgaagctggtggaaaagagcttcgagacagacaccaacctgaacttccagaacctgagcgtgatcggcttcagaatcctgctgctgaaagtggccggctttaacctgctgatgaccctgcggctgtggtccagc

SEQ ID NO: 1917 - DNA, 2259 bp, Artificial Sequence
  Synthetic Polynucloetide
atggccttaccagtgaccgccttgctcctgccgctggccttgctgctccacgccgccaggccggaagtgcagctggttgaatctggcggaggactggttcagcctggcggatctctgagactgtcttgtgccgccagcggcttcagcttcagcgacttttggatgagctgggtccgacaggcccctggcaaaggacttgaatgggtcgccacaatcagccaggccggcagcgagaaggactacgtggactctgtgaagggcagattcaccatcagccgggacaacgccaagaagtccctgtacctccagatgaacagcctgagagccgaggacaccgccgtgtactattgtgcctctggcgtgtacagcttcgactacagaggccagggcaccctggtcacagtctcttctggtaccggcggaggcggatctggcggcggaggtagcggtggcggaggatctgaattcgagatcgtgctgacacagagccctggcaccctgagcctgtctccaggcgagacagccatcatcagctgccggacaagccagtacggcagcctggcctggtatcagcagaggccaggacaggcccccagactcgtgatctacagcggcagcacaagagccgccggaatccccgatagattcagcggctccagatggggacccgactacaacctgaccatcagcaacctggaaagcggcgacttcggcgtgtactactgccagcagtacgagttcttcggccagggcaccaaggtgcaggtggacatcaaaagactcgaggacctgaagaacgtgttcccacctgaggtggccgtgttcgagcctagcgaggccgagatcagccacacccagaaagccaccctcgtgtgcctggctaccggcttctaccccgaccatgtggaactgtcttggtgggtcaacggcaaagaggtgcacagcggcgtgtgtaccgacccccagccactgaaagaacagcccgccctgaacgacagccggtactgcctgagcagcagactgagagtgtccgccaccttctggcagaacccccggaaccacttcagatgccaggtgcagttctacggcctgagcgagaacgacgagtggacccaggacagagccaagcccgtgacccagatcgtgtctgccgaagcctggggcagagccgattgcggctttaccagcgagagctaccagcagggcgtgctgagcgccaccatcctgtacgagatcctgctgggcaaggccaccctgtacgccgtgctggtgtctgccctggtgctgatggctatggtcaagcggaaggacagccggggaagggccaagcgatctggatctggagcaacaaacttctcactactcaaacaagcaggtgacgtggaggagaatcccgggcctactagtatggactggatttggcgcatccttttccttgtcggcgctgctaccggcgcgcattccttcgaacaggtgcagctggtgcagtctggcggccagatgaagaaacccggcgagagcatgagaatcagctgtcgggcctccggctacgagttcatcgactgcaccctgaactggatcagactggcccctggcaagcggcctgagtggatgggatggctgaagcctagaggcggagccgtgaactacgccagacctctccagggcagagtgaccatgaccagggacgtgtacagcgataccgccttcctggaactgcggagcctgaccgtggatgataccgccgtgtacttctgcaccagaggcaagaactgcgattacaactgggacttcgagcactggggcagaggcacccctgtgatcgtgtctagcacgcgtatccagaaccctgatcctgccgtgtaccagctgcgggatagcaagagcagcgacaagagcgtgtgtctgttcaccgacttcgacagccagaccaacgtgtcccagagcaaggactccgacgtgtacatcaccgataagtgcgtgctggacatgcggagcatggacttcaagagcaactccgccgtggcctggtccaacaagtccgatttcgcctgcgccaacgccttcaacaacagcattatccccgaggacacattcttcccaagccccgagagcagctgcgacgtgaagctggtggaaaagagcttcgagacagacaccaacctgaacttccagaacctgagcgtgatcggcttcagaatcctgctgctgaaagtggccggctttaacctgctgatgaccctgcggctgtggtccagc

SEQ ID NO: 1918 - DNA, 2289 bp, Artificial Sequence
  Synthetic Polynucloetide
atggccttaccagtgaccgccttgctcctgccgctggccttgctgctccacgccgccaggccggaagtgcagctggttgaatctggcggaggactggttcagcctggcggatctctgagactgtcttgtgccgccagcggcttcagcttcagcgacttttggatgagctgggtccgacaggcccctggcaaaggacttgaatgggtcgccacaatcagccaggccggcagcgagaaggactacgtggactctgtgaagggcagattcaccatcagccgggacaacgccaagaagtccctgtacctccagatgaacagcctgagagccgaggacaccgccgtgtactattgtgcctctggcgtgtacagcttcgactacagaggccagggcaccctggtcacagtctcttctggtaccggcggaggcggatctggcggcggaggtagcggtggcggaggatctgaattcgagctggtgctgacacagagccctggcaccctgtctctgtctgccggcgaaagagccaccctgagctgtagagccagccagagcgtgtcctctggcagcctggcttggtatcagcagaagccaggccaggcccccagactgctgatctacggcgcttctaccagagccaccggcatccccgatagattcagcggctctggctccggcaccgacttcaccctgacaatcggcagactggaacccgaggacctggccgtgtactactgccagcagtacggcaccagcccctacacattcggccagggcaccaagctggaaatcctcgaggacctgaagaacgtgttcccacctgaggtggccgtgttcgagcctagcgaggccgagatcagccacacccagaaagccaccctcgtgtgcctggctaccggcttctaccccgaccatgtggaactgtcttggtgggtcaacggcaaagaggtgcacagcggcgtgtgtaccgacccccagccactgaaagaacagcccgccctgaacgacagccggtactgcctgagcagcagactgagagtgtccgccaccttctggcagaacccccggaaccacttcagatgccaggtgcagttctacggcctgagcgagaacgacgagtggacccaggacagagccaagcccgtgacccagatcgtgtctgccgaagcctggggcagagccgattgcggctttaccagcgagagctaccagcagggcgtgctgagcgccaccatcctgtacgagatcctgctgggcaaggccaccctgtacgccgtgctggtgtctgccctggtgctgatggctatggtcaagcggaaggacagccggggaagggccaagcgatctggatctggagcaacaaacttctcactactcaaacaagcaggtgacgtggaggagaatcccgggcctactagtatggactggatttggcgcatccttttccttgtcggcgctgctaccggcgcgcattccttcgaactggaacagagcggagccgaagtgaagaaacccggcagcagcgtgcaggtgtcctgcaaagcaagcggcggcaccttctctatgtacggcttcaactgggtgcgccaggctcctggacacggcctggaatggatgggcggcatcatccccatcttcggcacctccaactacgcccagaaattccggggcagagtgaccttcaccgccgaccaggccacaagcaccgcctacatggaactgaccaacctgcggagcgacgacaccgccgtgtattattgcgccagagacttcggccccgactgggaggatggcgacagctacgatggcagcggcagaggcttcttcgacttctggggccagggaacccttgtgaccgtgtcctcaacgcgtatccagaaccctgatcctgccgtgtaccagctgcgggatagcaagagcagcgacaagagcgtgtgtctgttcaccgacttcgacagccagaccaacgtgtcccagagcaaggactccgacgtgtacatcaccgataagtgcgtgctggacatgcggagcatggacttcaagagcaactccgccgtggcctggtccaacaagtccgatttcgcctgcgccaacgccttcaacaacagcattatccccgaggacacattcttcccaagccccgagagcagctgcgacgtgaagctggtggaaaagagcttcgagacagacaccaacctgaacttccagaacctgagcgtgatcggcttcagaatcctgctgctgaaagtggccggctttaacctgctgatgaccctgcggctgtggtccagc

SEQ ID NO: 1919 - DNA, 2229 bp, Artificial Sequence
  Synthetic Polynucloetide
atggccttaccagtgaccgccttgctcctgccgctggccttgctgctccacgccgccaggccggaagtgcagctggttgaatctggcggaggactggttcagcctggcggatctctgagactgtcttgtgccgccagcggcttcagcttcagcgacttttggatgagctgggtccgacaggcccctggcaaaggacttgaatgggtcgccacaatcagccaggccggcagcgagaaggactacgtggactctgtgaagggcagattcaccatcagccgggacaacgccaagaagtccctgtacctccagatgaacagcctgagagccgaggacaccgccgtgtactattgtgcctctggcgtgtacagcttcgactacagaggccagggcaccctggtcacagtctcttctggtaccggcggaggcggatctggcggcggaggtagcggtggcggaggatctgaattcgacatccagatgacccagagccccagcagcctgtctgccagcgtgggcgacagagtgaccatcacctgtcaggccagccaggacatcaacaactacctgaactggtatcagcagaagcccggcaaggcccccaagctgctgatctacgacgccagcaatctgcagaccggcgtgcccagcagattttccggctctggcagcggcaccgacttcaccttcaccatcgaggacattgccacctactactgccagcagtacaccttcggccctggcaccaaggtggacatcaaactcgaggacctgaagaacgtgttcccacctgaggtggccgtgttcgagcctagcgaggccgagatcagccacacccagaaagccaccctcgtgtgcctggctaccggcttctaccccgaccatgtggaactgtcttggtgggtcaacggcaaagaggtgcacagcggcgtgtgtaccgacccccagccactgaaagaacagcccgccctgaacgacagccggtactgcctgagcagcagactgagagtgtccgccaccttctggcagaacccccggaaccacttcagatgccaggtgcagttctacggcctgagcgagaacgacgagtggacccaggacagagccaagcccgtgacccagatcgtgtctgccgaagcctggggcagagccgattgcggctttaccagcgagagctaccagcagggcgtgctgagcgccaccatcctgtacgagatcctgctgggcaaggccaccctgtacgccgtgctggtgtctgccctggtgctgatggctatggtcaagcggaaggacagccggggaagggccaagcgatctggatctggagcaacaaacttctcactactcaaacaagcaggtgacgtggaggagaatcccgggcctactagtatggactggatttggcgcatccttttccttgtcggcgctgctaccggcgcgcattccttcgaagaagtgcaactgctggaatctggcggcggactggtgcagcctggcggatctctgagactgagctgtgccgccagcggcttcacctttagctggtacagcatgacctgggtgcgccaggcccctggcaaaggactggaatgggtgtccagcatcgtgccctggggcgatttcacccagtacgccgatagcgtgaagggccggttcaccatcagccgggacaacagcaagaacaccctgtacctgcagatgaacagcctgcgggccgaggacaccgccgtgtactattgtgccaagggacctggctggggcagcttcgatctgtggggcagaggaacccttgtgaccgtgtccagcacgcgtatccagaaccctgatcctgccgtgtaccagctgcgggatagcaagagcagcgacaagagcgtgtgtctgttcaccgacttcgacagccagaccaacgtgtcccagagcaaggactccgacgtgtacatcaccgataagtgcgtgctggacatgcggagcatggacttcaagagcaactccgccgtggcctggtccaacaagtccgatttcgcctgcgccaacgccttcaacaacagcattatccccgaggacacattcttcccaagccccgagagcagctgcgacgtgaagctggtggaaaagagcttcgagacagacaccaacctgaacttccagaacctgagcgtgatcggcttcagaatcctgctgctgaaagtggccggctttaacctgctgatgaccctgcggctgtggtccagc

SEQ ID NO: 1920 - DNA, 2259 bp, Artificial Sequence
  Synthetic Polynucloetide
atggccttaccagtgaccgccttgctcctgccgctggccttgctgctccacgccgccaggccggaagtgcagctggttgaatctggcggaggactggttcagcctggcggatctctgagactgtcttgtgccgccagcggcttcagcttcagcgacttttggatgagctgggtccgacaggcccctggcaaaggacttgaatgggtcgccacaatcagccaggccggcagcgagaaggactacgtggactctgtgaagggcagattcaccatcagccgggacaacgccaagaagtccctgtacctccagatgaacagcctgagagccgaggacaccgccgtgtactattgtgcctctggcgtgtacagcttcgactacagaggccagggcaccctggtcacagtctcttctggtaccggcggaggcggatctggcggcggaggtagcggtggcggaggatctgaattcgacatccagatgacccagagccccagcagcctgtctgccagcgtgggcgacagagtgaccatcacctgtaccgccagcctgagcgtgtccagcacctacctgcactggtatcagcagaagcccggcagcagccccaagctgtggatctacagcaccagcaacctggcctccggcgtgcccagcagattttctggcagcggctctggcaccagctacaccctgaccatcagctccctccagcccgaggacttcgccacctactactgccaccagtaccacagaagccccctgacctttggcggaggcaccaaggtggaaatcaagagactcgaggacctgaagaacgtgttcccacctgaggtggccgtgttcgagcctagcgaggccgagatcagccacacccagaaagccaccctcgtgtgcctggctaccggcttctaccccgaccatgtggaactgtcttggtgggtcaacggcaaagaggtgcacagcggcgtgtgtaccgacccccagccactgaaagaacagcccgccctgaacgacagccggtactgcctgagcagcagactgagagtgtccgccaccttctggcagaacccccggaaccacttcagatgccaggtgcagttctacggcctgagcgagaacgacgagtggacccaggacagagccaagcccgtgacccagatcgtgtctgccgaagcctggggcagagccgattgcggctttaccagcgagagctaccagcagggcgtgctgagcgccaccatcctgtacgagatcctgctgggcaaggccaccctgtacgccgtgctggtgtctgccctggtgctgatggctatggtcaagcggaaggacagccggggaagggccaagcgatctggatctggagcaacaaacttctcactactcaaacaagcaggtgacgtggaggagaatcccgggcctactagtatggactggatttggcgcatccttttccttgtcggcgctgctaccggcgcgcattccttcgaagaagtgcaactggtggaatctggcggcggactggtgcagcctggcggatctctgagactgagctgtgccgccagcggcttcagcctgaccaaatacggcgtgcactgggtgcgccaggcccctggaaaaggactggaatgggtgggagtgaagtgggctggcggctccaccgactacaacagcgccctgatgagccggttcaccatcagcaaggacaacgccaagaacagcctgtacctccagatgaactccctgcgggccgaggacaccgccgtgtactactgtgccagagatcaccgggacgctatggactactggggccagggaacactcgtgaccgtgtcctctacgcgtatccagaaccctgatcctgccgtgtaccagctgcgggatagcaagagcagcgacaagagcgtgtgtctgttcaccgacttcgacagccagaccaacgtgtcccagagcaaggactccgacgtgtacatcaccgataagtgcgtgctggacatgcggagcatggacttcaagagcaactccgccgtggcctggtccaacaagtccgatttcgcctgcgccaacgccttcaacaacagcattatccccgaggacacattcttcccaagccccgagagcagctgcgacgtgaagctggtggaaaagagcttcgagacagacaccaacctgaacttccagaacctgagcgtgatcggcttcagaatcctgctgctgaaagtggccggctttaacctgctgatgaccctgcggctgtggtccagc

SEQ ID NO: 1921 - DNA, 2271 bp, Artificial Sequence
  Synthetic Polynucloetide
atggccttaccagtgaccgccttgctcctgccgctggccttgctgctccacgccgccaggccggaagtgcagctggttgaatctggcggaggactggttcagcctggcggatctctgagactgtcttgtgccgccagcggcttcagcttcagcgacttttggatgagctgggtccgacaggcccctggcaaaggacttgaatgggtcgccacaatcagccaggccggcagcgagaaggactacgtggactctgtgaagggcagattcaccatcagccgggacaacgccaagaagtccctgtacctccagatgaacagcctgagagccgaggacaccgccgtgtactattgtgcctctggcgtgtacagcttcgactacagaggccagggcaccctggtcacagtctcttctggtaccggcggaggcggatctggcggcggaggtagcggtggcggaggatctgaattcgacatccagatgacccagagccccagcagcctgtctgccagcgtgggcgacagagtgaccatcacatgcaaggccagccaggacgtgggaacagccgtggcctggtatcagcagaagcctggcaaggcccccaagctgctgatctacagcgccagctacagatccaccggcgtgcccagcagattttccggctctggcagcggcaccgacttcaccctgaccatctctagcctccagcccgaggacttcgccacctactactgccagcaccactactccgccccctggacatttggcggaggcaccaaggtggaaatcaagctcgaggacctgaagaacgtgttcccacctgaggtggccgtgttcgagcctagcgaggccgagatcagccacacccagaaagccaccctcgtgtgcctggctaccggcttctaccccgaccatgtggaactgtcttggtgggtcaacggcaaagaggtgcacagcggcgtgtgtaccgacccccagccactgaaagaacagcccgccctgaacgacagccggtactgcctgagcagcagactgagagtgtccgccaccttctggcagaacccccggaaccacttcagatgccaggtgcagttctacggcctgagcgagaacgacgagtggacccaggacagagccaagcccgtgacccagatcgtgtctgccgaagcctggggcagagccgattgcggctttaccagcgagagctaccagcagggcgtgctgagcgccaccatcctgtacgagatcctgctgggcaaggccaccctgtacgccgtgctggtgtctgccctggtgctgatggctatggtcaagcggaaggacagccggggaagggccaagcgatctggatctggagcaacaaacttctcactactcaaacaagcaggtgacgtggaggagaatcccgggcctactagtatggactggatttggcgcatccttttccttgtcggcgctgctaccggcgcgcattccttcgaagaagtgcaactggtggaatcaggcggcggactggtgcagcctggcggatctctgagactgagctgtgccgccagcggcttcaccttcagcagaaacggcatgagctgggtgcgccaggcccctggaaaaggactggaatgggtggcaaccgtgtccagcggcggcagctacatctactacgccgacagcgtgaagggccggttcaccatctccagagacaacgccaagaacagcctgtacctccagatgaactccctgcgggccgaggacaccgccgtgtactattgtgccagacagggcaccaccgccctggctaccagattcttcgatgtgtggggccagggcaccctcgtgaccgtgtcatctacgcgtatccagaaccctgatcctgccgtgtaccagctgcgggatagcaagagcagcgacaagagcgtgtgtctgttcaccgacttcgacagccagaccaacgtgtcccagagcaaggactccgacgtgtacatcaccgataagtgcgtgctggacatgcggagcatggacttcaagagcaactccgccgtggcctggtccaacaagtccgatttcgcctgcgccaacgccttcaacaacagcattatccccgaggacacattcttcccaagccccgagagcagctgcgacgtgaagctggtggaaaagagcttcgagacagacaccaacctgaacttccagaacctgagcgtgatcggcttcagaatcctgctgctgaaagtggccggctttaacctgctgatgaccctgcggctgtggtccagc

SEQ ID NO: 1922 - DNA, 2259 bp, Artificial Sequence
  Synthetic Polynucloetide
atggccttaccagtgaccgccttgctcctgccgctggccttgctgctccacgccgccaggccggaagtgcagctggttgaatctggcggaggactggttcagcctggcggatctctgagactgtcttgtgccgccagcggcttcagcttcagcgacttttggatgagctgggtccgacaggcccctggcaaaggacttgaatgggtcgccacaatcagccaggccggcagcgagaaggactacgtggactctgtgaagggcagattcaccatcagccgggacaacgccaagaagtccctgtacctccagatgaacagcctgagagccgaggacaccgccgtgtactattgtgcctctggcgtgtacagcttcgactacagaggccagggcaccctggtcacagtctcttctggtaccggcggaggcggatctggcggcggaggtagcggtggcggaggatctgaattcgacatccagatgacccagagcccccctagcctgtctgcctctgtgggcggcaaagtgaccatcacatgcaaggccagccaggacatcgaccgctacatggcctggtatcaggacaagcccggcaagggacccaagctgctgatccacgataccagcaccctccagcccggcatccccagcagattttctggcagcggctccggcagagactacagcttcagcatcagcaacctggaacccgaggacattgccacctactactgcctccagtacgacaacctgtggaccttcggcggaggcaccaagctggaaatcaagagactcgaggacctgaagaacgtgttcccacctgaggtggccgtgttcgagcctagcgaggccgagatcagccacacccagaaagccaccctcgtgtgcctggctaccggcttctaccccgaccatgtggaactgtcttggtgggtcaacggcaaagaggtgcacagcggcgtgtgtaccgacccccagccactgaaagaacagcccgccctgaacgacagccggtactgcctgagcagcagactgagagtgtccgccaccttctggcagaacccccggaaccacttcagatgccaggtgcagttctacggcctgagcgagaacgacgagtggacccaggacagagccaagcccgtgacccagatcgtgtctgccgaagcctggggcagagccgattgcggctttaccagcgagagctaccagcagggcgtgctgagcgccaccatcctgtacgagatcctgctgggcaaggccaccctgtacgccgtgctggtgtctgccctggtgctgatggctatggtcaagcggaaggacagccggggaagggccaagcgatctggatctggagcaacaaacttctcactactcaaacaagcaggtgacgtggaggagaatcccgggcctactagtatggactggatttggcgcatccttttccttgtcggcgctgctaccggcgcgcattccttcgaacaggtgcaactggtgcagagcggagccgagcttgtgaagcctggcgcttccgtgaagatgagctgcaaagccagcggctacatcttcaccaactacaacatccactgggtcaagaagtccccaggccagggcctggaatggatcggagccatctaccccggaaacggcgacgccccttacagccagaagttccaggacagagccaccctgaccgccgacaccagcagcagcaccacctacatggaactgagcagcctgaccagcgaggacagcgccgtgtactattgcgtgcgggccaactgggatgtggccttcgcctattggggccagggcacactggtgtccgtgtcctctacgcgtatccagaaccctgatcctgccgtgtaccagctgcgggatagcaagagcagcgacaagagcgtgtgtctgttcaccgacttcgacagccagaccaacgtgtcccagagcaaggactccgacgtgtacatcaccgataagtgcgtgctggacatgcggagcatggacttcaagagcaactccgccgtggcctggtccaacaagtccgatttcgcctgcgccaacgccttcaacaacagcattatccccgaggacacattcttcccaagccccgagagcagctgcgacgtgaagctggtggaaaagagcttcgagacagacaccaacctgaacttccagaacctgagcgtgatcggcttcagaatcctgctgctgaaagtggccggctttaacctgctgatgaccctgcggctgtggtccagc

SEQ ID NO: 1923 - DNA, 2262 bp, Artificial Sequence
  Synthetic Polynucloetide
atggccttaccagtgaccgccttgctcctgccgctggccttgctgctccacgccgccaggccggaagtgcagctggttgaatctggcggaggactggttcagcctggcggatctctgagactgtcttgtgccgccagcggcttcagcttcagcgacttttggatgagctgggtccgacaggcccctggcaaaggacttgaatgggtcgccacaatcagccaggccggcagcgagaaggactacgtggactctgtgaagggcagattcaccatcagccgggacaacgccaagaagtccctgtacctccagatgaacagcctgagagccgaggacaccgccgtgtactattgtgcctctggcgtgtacagcttcgactacagaggccagggcaccctggtcacagtctcttctggtaccggcggaggcggatctggcggcggaggtagcggtggcggaggatctgaattcgacatccagatgacccagagccctgccagcctgtctgcctctgtgggcgagacagtgaccatcacctgtcgggtgtccggcaacatccacaactacctggcctggtatcagcagaagcagggcaagagcccccaactgctggtgtacaacgccaagaccctggccgatggcgtgcccagcagattttctggctctggcagcggcacccagtacagcctgaagatcaacagcctccagcccgaggacttcggcagctactactgccagcacttctggtccaacccctacaccttcggcggaggcaccaagctggaaatcaagctcgaggacctgaagaacgtgttcccacctgaggtggccgtgttcgagcctagcgaggccgagatcagccacacccagaaagccaccctcgtgtgcctggctaccggcttctaccccgaccatgtggaactgtcttggtgggtcaacggcaaagaggtgcacagcggcgtgtgtaccgacccccagccactgaaagaacagcccgccctgaacgacagccggtactgcctgagcagcagactgagagtgtccgccaccttctggcagaacccccggaaccacttcagatgccaggtgcagttctacggcctgagcgagaacgacgagtggacccaggacagagccaagcccgtgacccagatcgtgtctgccgaagcctggggcagagccgattgcggctttaccagcgagagctaccagcagggcgtgctgagcgccaccatcctgtacgagatcctgctgggcaaggccaccctgtacgccgtgctggtgtctgccctggtgctgatggctatggtcaagcggaaggacagccggggaagggccaagcgatctggatctggagcaacaaacttctcactactcaaacaagcaggtgacgtggaggagaatcccgggcctactagtatggactggatttggcgcatccttttccttgtcggcgctgctaccggcgcgcattccttcgaacaggtgcaactccagcagtctggcgcttccgtgaaggtgtcctgcaaggccagcgaactcgtgcggcctggcacaggctacgccttcaccaattacctgatcgagtgggtcaagcagaggcccggacagggcctggaatggatcggagtgattaacccaggcagcggcggcaccaactacaacgagaagttcaagggcaaggccaccctgaccgccgacaagagcagcagcacagcctacatgcaactgagcagcctgaccagcgacgacagcgccgtgtacttctgcgcccggtacagaagctacgactggtacttcgacgtgtggggagccggcaccaccgtgacagtgtcatctacgcgtatccagaaccctgatcctgccgtgtaccagctgcgggatagcaagagcagcgacaagagcgtgtgtctgttcaccgacttcgacagccagaccaacgtgtcccagagcaaggactccgacgtgtacatcaccgataagtgcgtgctggacatgcggagcatggacttcaagagcaactccgccgtggcctggtccaacaagtccgatttcgcctgcgccaacgccttcaacaacagcattatccccgaggacacattcttcccaagccccgagagcagctgcgacgtgaagctggtggaaaagagcttcgagacagacaccaacctgaacttccagaacctgagcgtgatcggcttcagaatcctgctgctgaaagtggccggctttaacctgctgatgaccctgcggctgtggtccagc

SEQ ID NO: 1924 - DNA, 2259 bp, Artificial Sequence
  Synthetic Polynucloetide
atggccttaccagtgaccgccttgctcctgccgctggccttgctgctccacgccgccaggccggaagtgcagctggttgaatctggcggaggactggttcagcctggcggatctctgagactgtcttgtgccgccagcggcttcagcttcagcgacttttggatgagctgggtccgacaggcccctggcaaaggacttgaatgggtcgccacaatcagccaggccggcagcgagaaggactacgtggactctgtgaagggcagattcaccatcagccgggacaacgccaagaagtccctgtacctccagatgaacagcctgagagccgaggacaccgccgtgtactattgtgcctctggcgtgtacagcttcgactacagaggccagggcaccctggtcacagtctcttctggtaccggcggaggcggatctggcggcggaggtagcggtggcggaggatctgaattcgacatccagatgacccagagcttcagcagcctgagcgccagcgtgggcgacagagtgaccatcacctgtagagccagccaggacatcagcaactacctgaactggtatcagcagaagcccggcaaggcccccaagctgctgatctactacaccagcagactgcacagcggcgtgcccagcagattttctggcagcggctccggcaccgactacaccctgacaatcagctccctgcagcccgaggacttcgctacctacttctgtcagcaaggcaacaccctgccctggacctttggcggaggcaccaagctggaaatcaagagactcgaggacctgaagaacgtgttcccacctgaggtggccgtgttcgagcctagcgaggccgagatcagccacacccagaaagccaccctcgtgtgcctggctaccggcttctaccccgaccatgtggaactgtcttggtgggtcaacggcaaagaggtgcacagcggcgtgtgtaccgacccccagccactgaaagaacagcccgccctgaacgacagccggtactgcctgagcagcagactgagagtgtccgccaccttctggcagaacccccggaaccacttcagatgccaggtgcagttctacggcctgagcgagaacgacgagtggacccaggacagagccaagcccgtgacccagatcgtgtctgccgaagcctggggcagagccgattgcggctttaccagcgagagctaccagcagggcgtgctgagcgccaccatcctgtacgagatcctgctgggcaaggccaccctgtacgccgtgctggtgtctgccctggtgctgatggctatggtcaagcggaaggacagccggggaagggccaagcgatctggatctggagcaacaaacttctcactactcaaacaagcaggtgacgtggaggagaatcccgggcctactagtatggactggatttggcgcatccttttccttgtcggcgctgctaccggcgcgcattccttcgaagaagtgcaactggtgcagtccggcggagggctggtgcagagcggaggatctctgagactgagctgcagagccagcggctacaccttcacccggtactggatgctgtgggtgcgccagaggccaggcaagggactggaatgggtggccgagatcaacccccggaacgaccggaccaactacaacgagaagttcaagacccggttcaccatcagcgtggacagaagcaagaacaccctgtacctgcagatggacagcctgcgggccgaggataccgccgtgtacttttgtgctctgggaggcggctacgctatggactactggggccagggaacccttgtgaccgtgtcctctacgcgtatccagaaccctgatcctgccgtgtaccagctgcgggatagcaagagcagcgacaagagcgtgtgtctgttcaccgacttcgacagccagaccaacgtgtcccagagcaaggactccgacgtgtacatcaccgataagtgcgtgctggacatgcggagcatggacttcaagagcaactccgccgtggcctggtccaacaagtccgatttcgcctgcgccaacgccttcaacaacagcattatccccgaggacacattcttcccaagccccgagagcagctgcgacgtgaagctggtggaaaagagcttcgagacagacaccaacctgaacttccagaacctgagcgtgatcggcttcagaatcctgctgctgaaagtggccggctttaacctgctgatgaccctgcggctgtggtccagc

SEQ ID NO: 1925 - DNA, 2262 bp, Artificial Sequence
  Synthetic Polynucloetide
atggccttaccagtgaccgccttgctcctgccgctggccttgctgctccacgccgccaggccggaagtgcagctggttgaatctggcggaggactggttcagcctggcggatctctgagactgtcttgtgccgccagcggcttcagcttcagcgacttttggatgagctgggtccgacaggcccctggcaaaggacttgaatgggtcgccacaatcagccaggccggcagcgagaaggactacgtggactctgtgaagggcagattcaccatcagccgggacaacgccaagaagtccctgtacctccagatgaacagcctgagagccgaggacaccgccgtgtactattgtgcctctggcgtgtacagcttcgactacagaggccagggcaccctggtcacagtctcttctggtaccggcggaggcggatctggcggcggaggtagcggtggcggaggatctgaattcgacatccagatgacacagtctccggcgtcactgtccgcctccgtgggggagactgtgactattatttgtagggcatcagttaacatctactcttatttggcctggtaccagcagaagcaaggcaagagtcctcagctgctggtgtataatgcgaagatcctggcagagggcgtgccgagccggttctccggcagcggctcaggtacccaattttccctcaagatcaattcactgcagccagaggactttggcagttactattgtcaacaccactacggcacattcactttcgggtccggtacaaaattggagattaagcgactcgaggacctgaagaacgtgttcccacctgaggtggccgtgttcgagcctagcgaggccgagatcagccacacccagaaagccaccctcgtgtgcctggctaccggcttctaccccgaccatgtggaactgtcttggtgggtcaacggcaaagaggtgcacagcggcgtgtgtaccgacccccagccactgaaagaacagcccgccctgaacgacagccggtactgcctgagcagcagactgagagtgtccgccaccttctggcagaacccccggaaccacttcagatgccaggtgcagttctacggcctgagcgagaacgacgagtggacccaggacagagccaagcccgtgacccagatcgtgtctgccgaagcctggggcagagccgattgcggctttaccagcgagagctaccagcagggcgtgctgagcgccaccatcctgtacgagatcctgctgggcaaggccaccctgtacgccgtgctggtgtctgccctggtgctgatggctatggtcaagcggaaggacagccggggaagggccaagcgatctggatctggagcaacaaacttctcactactcaaacaagcaggtgacgtggaggagaatcccgggcctactagtatggactggatttggcgcatccttttccttgtcggcgctgctaccggcgcgcattccttcgaacaggtacagttgaaagaaagcgggcctggactggtagcgccttcccaatctctctccatcacgtgcaccatctctggcttctccctgacttcctatggagttcactgggtgaggcagccccccggcaagggactggaatggctggtcgtcatctggtccgacgggtccacaacctacaactccgctctgaaaagtcggctctctatttctaaagataatagcaagagccaggtgtttctgaaaatgaactctctgcagaccgatgatacggccatttactactgcgcttcacactatggctcaaccttggcattcgcttcctggggccacggaacactggtgaccgtttccgcagccacgcgtatccagaaccctgatcctgccgtgtaccagctgcgggatagcaagagcagcgacaagagcgtgtgtctgttcaccgacttcgacagccagaccaacgtgtcccagagcaaggactccgacgtgtacatcaccgataagtgcgtgctggacatgcggagcatggacttcaagagcaactccgccgtggcctggtccaacaagtccgatttcgcctgcgccaacgccttcaacaacagcattatccccgaggacacattcttcccaagccccgagagcagctgcgacgtgaagctggtggaaaagagcttcgagacagacaccaacctgaacttccagaacctgagcgtgatcggcttcagaatcctgctgctgaaagtggccggctttaacctgctgatgaccctgcggctgtggtccagc

SEQ ID NO: 1926 - DNA, 2286 bp, Artificial Sequence
  Synthetic Polynucloetide
atggccttaccagtgaccgccttgctcctgccgctggccttgctgctccacgccgccaggccggaagtgcagctggttgaatctggcggaggactggttcagcctggcggatctctgagactgtcttgtgccgccagcggcttcagcttcagcgacttttggatgagctgggtccgacaggcccctggcaaaggacttgaatgggtcgccacaatcagccaggccggcagcgagaaggactacgtggactctgtgaagggcagattcaccatcagccgggacaacgccaagaagtccctgtacctccagatgaacagcctgagagccgaggacaccgccgtgtactattgtgcctctggcgtgtacagcttcgactacagaggccagggcaccctggtcacagtctcttctggtaccggcggaggcggatctggcggcggaggtagcggtggcggaggatctgaattcgacattgtgatgacccagtctcacaaattcatgtccacatcagtaggagacagggtcagcgtcacctgcaaggccagtcagaatgtgggtaataatgtagcctggtatcaacagaaaccagggcaatctcctaaagtactgatttactcggcatcctaccggtacagtggagtccctgatcgcttcacaggcagtggatctgggacagatttcactctcaccatcagtaatgtgcagtctgaagacttggcagagtatttctgtcagcaatataacacctatccattcacgttcggctcggggacaaagttggaaataaaactcgaggacctgaagaacgtgttcccacctgaggtggccgtgttcgagcctagcgaggccgagatcagccacacccagaaagccaccctcgtgtgcctggctaccggcttctaccccgaccatgtggaactgtcttggtgggtcaacggcaaagaggtgcacagcggcgtgtgtaccgacccccagccactgaaagaacagcccgccctgaacgacagccggtactgcctgagcagcagactgagagtgtccgccaccttctggcagaacccccggaaccacttcagatgccaggtgcagttctacggcctgagcgagaacgacgagtggacccaggacagagccaagcccgtgacccagatcgtgtctgccgaagcctggggcagagccgattgcggctttaccagcgagagctaccagcagggcgtgctgagcgccaccatcctgtacgagatcctgctgggcaaggccaccctgtacgccgtgctggtgtctgccctggtgctgatggctatggtcaagcggaaggacagccggggaagggccaagcgatctggatctggagcaacaaacttctcactactcaaacaagcaggtgacgtggaggagaatcccgggcctactagtatggactggatttggcgcatccttttccttgtcggcgctgctaccggcgcgcattccttcgaagaggtacagctggaggaaagcggtggaggactggtgcaacctggagggtctatgaagctctcttgcgtagcttctgggttcacgttctccaattactggatgaactgggtgcggcagtcccccgagaaaggcctggaatgggtagcagaaattcggttcaagtcccataactatgctacacactttgccgagtctgtcaaaggccggttcactattagtcgagacgacagcaagtcttcagtctacctgcagatgaataacttgcgggcagaggacacaggtatctactactgcaccaggagaatcggcaactccgactatgactggtggtactttgacgtctggggagcaggcaccagcgtgacggtgagttcagcctcaacgcgtatccagaaccctgatcctgccgtgtaccagctgcgggatagcaagagcagcgacaagagcgtgtgtctgttcaccgacttcgacagccagaccaacgtgtcccagagcaaggactccgacgtgtacatcaccgataagtgcgtgctggacatgcggagcatggacttcaagagcaactccgccgtggcctggtccaacaagtccgatttcgcctgcgccaacgccttcaacaacagcattatccccgaggacacattcttcccaagccccgagagcagctgcgacgtgaagctggtggaaaagagcttcgagacagacaccaacctgaacttccagaacctgagcgtgatcggcttcagaatcctgctgctgaaagtggccggctttaacctgctgatgaccctgcggctgtggtccagc

SEQ ID NO: 1927 - DNA, 2265 bp, Artificial Sequence
  Synthetic Polynucloetide
atggccttaccagtgaccgccttgctcctgccgctggccttgctgctccacgccgccaggccggaagtgcagctggttgaatctggcggaggactggttcagcctggcggatctctgagactgtcttgtgccgccagcggcttcagcttcagcgacttttggatgagctgggtccgacaggcccctggcaaaggacttgaatgggtcgccacaatcagccaggccggcagcgagaaggactacgtggactctgtgaagggcagattcaccatcagccgggacaacgccaagaagtccctgtacctccagatgaacagcctgagagccgaggacaccgccgtgtactattgtgcctctggcgtgtacagcttcgactacagaggccagggcaccctggtcacagtctcttctggtaccggcggaggcggatctggcggcggaggtagcggtggcggaggatctgaattcgaccagatcgtgctgacccagtcccccgctattatgtccgcatcaccgggcgaaaaagtgacgatctcctgtagcgcttcatctagcgtctcctacatgtattggtatcaacagaaacctgggtctagcccaaagccgtggatctacagaaccagtaaccttgccagtggggtgccagcccgcttcagcggtagtggcagtggaacttcctatagcctcacaataagcaacatggaggctgaagatgccgctgcctattactgccagcagtaccacagttacccaaccacgttcggcgggggaactaagctcgaagtaaaactcgaggacctgaagaacgtgttcccacctgaggtggccgtgttcgagcctagcgaggccgagatcagccacacccagaaagccaccctcgtgtgcctggctaccggcttctaccccgaccatgtggaactgtcttggtgggtcaacggcaaagaggtgcacagcggcgtgtgtaccgacccccagccactgaaagaacagcccgccctgaacgacagccggtactgcctgagcagcagactgagagtgtccgccaccttctggcagaacccccggaaccacttcagatgccaggtgcagttctacggcctgagcgagaacgacgagtggacccaggacagagccaagcccgtgacccagatcgtgtctgccgaagcctggggcagagccgattgcggctttaccagcgagagctaccagcagggcgtgctgagcgccaccatcctgtacgagatcctgctgggcaaggccaccctgtacgccgtgctggtgtctgccctggtgctgatggctatggtcaagcggaaggacagccggggaagggccaagcgatctggatctggagcaacaaacttctcactactcaaacaagcaggtgacgtggaggagaatcccgggcctactagtatggactggatttggcgcatccttttccttgtcggcgctgctaccggcgcgcattccttcgaagaggtgcagctggtggaatctgggggcggcctggtccaacctaagggatcactcaagctctcttgtgcggccagcggattctctttcaatacctatgctatgaattgggtgagacaggcgcccggaaagggcctcgaatggatagcccatatccggtcaaaatcaaacaatttcgcaacctactatgcggactccgtgaaggaccgattttccatctcccgagatgcctccgagaatattctgttcctgcagatgaataacctcaagacagaggacaccgccatgtactactgtgtgcgccagggcggtgactttcccatggattactgggggcaggggaccagcgtgaccgtgagctctacgcgtatccagaaccctgatcctgccgtgtaccagctgcgggatagcaagagcagcgacaagagcgtgtgtctgttcaccgacttcgacagccagaccaacgtgtcccagagcaaggactccgacgtgtacatcaccgataagtgcgtgctggacatgcggagcatggacttcaagagcaactccgccgtggcctggtccaacaagtccgatttcgcctgcgccaacgccttcaacaacagcattatccccgaggacacattcttcccaagccccgagagcagctgcgacgtgaagctggtggaaaagagcttcgagacagacaccaacctgaacttccagaacctgagcgtgatcggcttcagaatcctgctgctgaaagtggccggctttaacctgctgatgaccctgcggctgtggtccagc

SEQ ID NO: 1928 - DNA, 2262 bp, Artificial Sequence
  Synthetic Polynucloetide
atggccttaccagtgaccgccttgctcctgccgctggccttgctgctccacgccgccaggccggaagtgcagctggttgaatctggcggaggactggttcagcctggcggatctctgagactgtcttgtgccgccagcggcttcagcttcagcgacttttggatgagctgggtccgacaggcccctggcaaaggacttgaatgggtcgccacaatcagccaggccggcagcgagaaggactacgtggactctgtgaagggcagattcaccatcagccgggacaacgccaagaagtccctgtacctccagatgaacagcctgagagccgaggacaccgccgtgtactattgtgcctctggcgtgtacagcttcgactacagaggccagggcaccctggtcacagtctcttctggtaccggcggaggcggatctggcggcggaggtagcggtggcggaggatctgaattcgacgacatccagatgacccagagcagcagcagcttcagcgtgagcctgggcgacagagtgaccatcacctgcatggccagcgaggacatctacatcagactggcctggtaccagcagaagcccggcaacgcccccagactgctgatcagcgccgccaccagcctggagaccggcgtgcccagcagattcagcggcagcggcagcggcaaggactacaccctgagcatcaccagcctgcagaccgaggacgtgggcacctactactgccagcagtactggagcagcccctggaccttcggcggcggcaccaagctggagatcaacctcgaggacctgaagaacgtgttcccacctgaggtggccgtgttcgagcctagcgaggccgagatcagccacacccagaaagccaccctcgtgtgcctggctaccggcttctaccccgaccatgtggaactgtcttggtgggtcaacggcaaagaggtgcacagcggcgtgtgtaccgacccccagccactgaaagaacagcccgccctgaacgacagccggtactgcctgagcagcagactgagagtgtccgccaccttctggcagaacccccggaaccacttcagatgccaggtgcagttctacggcctgagcgagaacgacgagtggacccaggacagagccaagcccgtgacccagatcgtgtctgccgaagcctggggcagagccgattgcggctttaccagcgagagctaccagcagggcgtgctgagcgccaccatcctgtacgagatcctgctgggcaaggccaccctgtacgccgtgctggtgtctgccctggtgctgatggctatggtcaagcggaaggacagccggggaagggccaagcgatctggatctggagcaacaaacttctcactactcaaacaagcaggtgacgtggaggagaatcccgggcctactagtatggactggatttggcgcatccttttccttgtcggcgctgctaccggcgcgcattccttcgaagacgtgcagctgcaggagagcggccccggcctggtgaagcccagccagagcctgagcctgacctgcaccgtgaccggctacagcatcaccagcgactacacctggaactggatcagacagttccccggcaacaagctggagtggatgggctacatcacctacagcggcagcaccagctacaaccccagcctgaagagcagaaacagcatcaccagagacaccagcaagaaccagttcttcctgcagctgaacagcgtgaccaccgaggacaccgccacctactactgcgccagactgggcagaagatacacaatggactactggggccagggcaccagcgtgaccgtgagcagcacgcgtatccagaaccctgatcctgccgtgtaccagctgcgggatagcaagagcagcgacaagagcgtgtgtctgttcaccgacttcgacagccagaccaacgtgtcccagagcaaggactccgacgtgtacatcaccgataagtgcgtgctggacatgcggagcatggacttcaagagcaactccgccgtggcctggtccaacaagtccgatttcgcctgcgccaacgccttcaacaacagcattatccccgaggacacattcttcccaagccccgagagcagctgcgacgtgaagctggtggaaaagagcttcgagacagacaccaacctgaacttccagaacctgagcgtgatcggcttcagaatcctgctgctgaaagtggccggctttaacctgctgatgaccctgcggctgtggtccagc

SEQ ID NO: 1929 - DNA, 2271 bp, Artificial Sequence
  Synthetic Polynucloetide
atggccttaccagtgaccgccttgctcctgccgctggccttgctgctccacgccgccaggccggaagtgcagctggttgaatctggcggaggactggttcagcctggcggatctctgagactgtcttgtgccgccagcggcttcagcttcagcgacttttggatgagctgggtccgacaggcccctggcaaaggacttgaatgggtcgccacaatcagccaggccggcagcgagaaggactacgtggactctgtgaagggcagattcaccatcagccgggacaacgccaagaagtccctgtacctccagatgaacagcctgagagccgaggacaccgccgtgtactattgtgcctctggcgtgtacagcttcgactacagaggccagggcaccctggtcacagtctcttctggtaccggcggaggcggatctggcggcggaggtagcggtggcggaggatctgaattcgacgacatccagatgacccagagccccagcagcctgtctgccagcgtgggcgacagagtgaccatcacctgtagagccagccagagcatcagcagctacctgaactggtatcagcagaagcccggcaaggcccccaaactgctgatctacgacgccagcaacctggaaaccggcgtgcccagcagattttccggcagcggctctggcaccgacttcaccttcaccatcagctccctccagcccgaggacattgccacctactactgccagcagtacgacaacctgcccctgacctttggcggaggcaccaaggtggacatcaagagactcgaggacctgaagaacgtgttcccacctgaggtggccgtgttcgagcctagcgaggccgagatcagccacacccagaaagccaccctcgtgtgcctggctaccggcttctaccccgaccatgtggaactgtcttggtgggtcaacggcaaagaggtgcacagcggcgtgtgtaccgacccccagccactgaaagaacagcccgccctgaacgacagccggtactgcctgagcagcagactgagagtgtccgccaccttctggcagaacccccggaaccacttcagatgccaggtgcagttctacggcctgagcgagaacgacgagtggacccaggacagagccaagcccgtgacccagatcgtgtctgccgaagcctggggcagagccgattgcggctttaccagcgagagctaccagcagggcgtgctgagcgccaccatcctgtacgagatcctgctgggcaaggccaccctgtacgccgtgctggtgtctgccctggtgctgatggctatggtcaagcggaaggacagccggggaagggccaagcgatctggatctggagcaacaaacttctcactactcaaacaagcaggtgacgtggaggagaatcccgggcctactagtatggactggatttggcgcatccttttccttgtcggcgctgctaccggcgcgcattccttcgaacaggtgcaactggtggaatctggcggcggagtggtgcagcctggcagaagcctgagactgagctgtgccgccagcggcttcacctttagcagctacgccatgcactgggtgcgccaggcccctggaaaaggcctggaatgggtggccgtgatctcctacgacggctccaacaagtattacgccgacagcgtgaagggccggttcaccatctccagagacaacagcaagaacaccctgtacctccagatgaacagcctgcgggccgaggacaccgccgtgtactattgtgccagggctcacaacagcagctcttggagcttcgactactggggccagggcaccctcgtgaccgtgtcatctacgcgtatccagaaccctgatcctgccgtgtaccagctgcgggatagcaagagcagcgacaagagcgtgtgtctgttcaccgacttcgacagccagaccaacgtgtcccagagcaaggactccgacgtgtacatcaccgataagtgcgtgctggacatgcggagcatggacttcaagagcaactccgccgtggcctggtccaacaagtccgatttcgcctgcgccaacgccttcaacaacagcattatccccgaggacacattcttcccaagccccgagagcagctgcgacgtgaagctggtggaaaagagcttcgagacagacaccaacctgaacttccagaacctgagcgtgatcggcttcagaatcctgctgctgaaagtggccggctttaacctgctgatgaccctgcggctgtggtccagc

SEQ ID NO: 1930 - DNA, 2298 bp, Artificial Sequence
  Synthetic Polynucloetide
atggccttaccagtgaccgccttgctcctgccgctggccttgctgctccacgccgccaggccggaagtgcagctggttgaatctggcggaggactggttcagcctggcggatctctgagactgtcttgtgccgccagcggcttcagcttcagcgacttttggatgagctgggtccgacaggcccctggcaaaggacttgaatgggtcgccacaatcagccaggccggcagcgagaaggactacgtggactctgtgaagggcagattcaccatcagccgggacaacgccaagaagtccctgtacctccagatgaacagcctgagagccgaggacaccgccgtgtactattgtgcctctggcgtgtacagcttcgactacagaggccagggcaccctggtcacagtctcttctggtaccggcggaggcggatctggcggcggaggtagcggtggcggaggatctgaattcgacgacgtcgtgatgacccagagccctctgagcctgcctgtgtccctgggcgatcaggccagcatctcctgcagatccagccagagactggtgcacagcaacggcaacacctacctgcactggtatctgcagaagcccggccagagccccaagctgctgatctaccgggtgtccaacagattccccggcgtgcccgatagattcagcggctctggcagcggcaccgacttcaccctgaagatcagccgggtggaagccgaggacctgggcatctatttctgcagccagagcacccacgtgccctacacctttggcggaggcaccaagctggaaatcaagcggctcgaggacctgaagaacgtgttcccacctgaggtggccgtgttcgagcctagcgaggccgagatcagccacacccagaaagccaccctcgtgtgcctggctaccggcttctaccccgaccatgtggaactgtcttggtgggtcaacggcaaagaggtgcacagcggcgtgtgtaccgacccccagccactgaaagaacagcccgccctgaacgacagccggtactgcctgagcagcagactgagagtgtccgccaccttctggcagaacccccggaaccacttcagatgccaggtgcagttctacggcctgagcgagaacgacgagtggacccaggacagagccaagcccgtgacccagatcgtgtctgccgaagcctggggcagagccgattgcggctttaccagcgagagctaccagcagggcgtgctgagcgccaccatcctgtacgagatcctgctgggcaaggccaccctgtacgccgtgctggtgtctgccctggtgctgatggctatggtcaagcggaaggacagccggggaagggccaagcgatctggatctggagcaacaaacttctcactactcaaacaagcaggtgacgtggaggagaatcccgggcctactagtatggactggatttggcgcatccttttccttgtcggcgctgctaccggcgcgcattccttcgaagaagtgcggctgcagcagtctggccccgacctgattaagcctggggccagcgtgaagatgagctgcaaggccagcggctacaccttcaccggctacgtgatgcactgggtcaagcagaggccaggccagggcctggaatggatcggcttcatcaacccctacaacgacgacatccagagcaacgagcggttccggggcaaggccaccctgaccagcgataagagcagcaccaccgcctacatggaactgagcagcctgacctccgaggacagcgccgtgtactactgtgctaggggagccggctacaacttcgacggggcctacagattcttcgacttttggggccagggcaccacactgaccgtgtcctctacgcgtatccagaaccctgatcctgccgtgtaccagctgcgggatagcaagagcagcgacaagagcgtgtgtctgttcaccgacttcgacagccagaccaacgtgtcccagagcaaggactccgacgtgtacatcaccgataagtgcgtgctggacatgcggagcatggacttcaagagcaactccgccgtggcctggtccaacaagtccgatttcgcctgcgccaacgccttcaacaacagcattatccccgaggacacattcttcccaagccccgagagcagctgcgacgtgaagctggtggaaaagagcttcgagacagacaccaacctgaacttccagaacctgagcgtgatcggcttcagaatcctgctgctgaaagtggccggctttaacctgctgatgaccctgcggctgtggtccagc

SEQ ID NO: 1931 - DNA, 2271 bp, Artificial Sequence
  Synthetic Polynucloetide
atggccttaccagtgaccgccttgctcctgccgctggccttgctgctccacgccgccaggccggaagtgcagctggttgaatctggcggaggactggttcagcctggcggatctctgagactgtcttgtgccgccagcggcttcagcttcagcgacttttggatgagctgggtccgacaggcccctggcaaaggacttgaatgggtcgccacaatcagccaggccggcagcgagaaggactacgtggactctgtgaagggcagattcaccatcagccgggacaacgccaagaagtccctgtacctccagatgaacagcctgagagccgaggacaccgccgtgtactattgtgcctctggcgtgtacagcttcgactacagaggccagggcaccctggtcacagtctcttctggtaccggcggaggcggatctggcggcggaggtagcggtggcggaggatctgaattcgacagctacgagctgacccagcctcctagcgtgtccgtgtctcctggacagaccgccaccatctcttgcagcggcgatcaactgggcgggaagtacggccactggtatcagaagaagcccggccagagccccgtgctggtgctgtaccaggacagaaaacggcctgccggcatccccgagagattcagcggaagcagcagcggcaacaccatcaccctgaccatcagcggcacccaggccgtggatgaggccgactactactgccaggcttgggacaccaatctgggcggcgtgttcggcggaggcaccaaagtgacagtgctgggacagctcgaggacctgaagaacgtgttcccacctgaggtggccgtgttcgagcctagcgaggccgagatcagccacacccagaaagccaccctcgtgtgcctggctaccggcttctaccccgaccatgtggaactgtcttggtgggtcaacggcaaagaggtgcacagcggcgtgtgtaccgacccccagccactgaaagaacagcccgccctgaacgacagccggtactgcctgagcagcagactgagagtgtccgccaccttctggcagaacccccggaaccacttcagatgccaggtgcagttctacggcctgagcgagaacgacgagtggacccaggacagagccaagcccgtgacccagatcgtgtctgccgaagcctggggcagagccgattgcggctttaccagcgagagctaccagcagggcgtgctgagcgccaccatcctgtacgagatcctgctgggcaaggccaccctgtacgccgtgctggtgtctgccctggtgctgatggctatggtcaagcggaaggacagccggggaagggccaagcgatctggatctggagcaacaaacttctcactactcaaacaagcaggtgacgtggaggagaatcccgggcctactagtatggactggatttggcgcatccttttccttgtcggcgctgctaccggcgcgcattccttcgaacaggtgcaactggtggaaagcggagccgaagtgaagaaacctggggccagcgtgaaggtgtcctgcaaggccagcggctacacctttaccggctactacatgcactgggtgcgccaggctccaggccagggactggaatggatgggccggatcaaccccaatagcggcggcaccaactacgcccagaaattccagggcagagtgaccatgaccagagacaccagcatcagcaccgcctacatggaactgagccggctgagaagcgacgacaccgccgtgtactactgcgccagccctagaggcagaggcagcgccttcgatatttggggccagggcacactcgtgaccgtgtcctctacgcgtatccagaaccctgatcctgccgtgtaccagctgcgggatagcaagagcagcgacaagagcgtgtgtctgttcaccgacttcgacagccagaccaacgtgtcccagagcaaggactccgacgtgtacatcaccgataagtgcgtgctggacatgcggagcatggacttcaagagcaactccgccgtggcctggtccaacaagtccgatttcgcctgcgccaacgccttcaacaacagcattatccccgaggacacattcttcccaagccccgagagcagctgcgacgtgaagctggtggaaaagagcttcgagacagacaccaacctgaacttccagaacctgagcgtgatcggcttcagaatcctgctgctgaaagtggccggctttaacctgctgatgaccctgcggctgtggtccagc

SEQ ID NO: 1932 - DNA, 2280 bp, Artificial Sequence
  Synthetic Polynucloetide
atggccttaccagtgaccgccttgctcctgccgctggccttgctgctccacgccgccaggccggaagtgcagctggttgaatctggcggaggactggttcagcctggcggatctctgagactgtcttgtgccgccagcggcttcagcttcagcgacttttggatgagctgggtccgacaggcccctggcaaaggacttgaatgggtcgccacaatcagccaggccggcagcgagaaggactacgtggactctgtgaagggcagattcaccatcagccgggacaacgccaagaagtccctgtacctccagatgaacagcctgagagccgaggacaccgccgtgtactattgtgcctctggcgtgtacagcttcgactacagaggccagggcaccctggtcacagtctcttctggtaccggcggaggcggatctggcggcggaggtagcggtggcggaggatctgaattcgacaacttcatgctgacccagccccacagcgtgtccgagagccctggcaagaccgtgaccatctcctgcaccagaagcagcggctctatcgccagcaaatacgtgcagtggtatcagcagaggcccggcagcagccctaccaccgtgatctacgaggacaaccagaggcctagcggcgtgcccgatagattcagcggcagcatcgacaccagcagcaacagcgccagcctgaccatcagcggcctgagaacagaggacgaggccgactactactgccacagctacgacagcaacaaccactccgtgttcggcggaggcaccaaagtgacagtgctgggacagctcgaggacctgaagaacgtgttcccacctgaggtggccgtgttcgagcctagcgaggccgagatcagccacacccagaaagccaccctcgtgtgcctggctaccggcttctaccccgaccatgtggaactgtcttggtgggtcaacggcaaagaggtgcacagcggcgtgtgtaccgacccccagccactgaaagaacagcccgccctgaacgacagccggtactgcctgagcagcagactgagagtgtccgccaccttctggcagaacccccggaaccacttcagatgccaggtgcagttctacggcctgagcgagaacgacgagtggacccaggacagagccaagcccgtgacccagatcgtgtctgccgaagcctggggcagagccgattgcggctttaccagcgagagctaccagcagggcgtgctgagcgccaccatcctgtacgagatcctgctgggcaaggccaccctgtacgccgtgctggtgtctgccctggtgctgatggctatggtcaagcggaaggacagccggggaagggccaagcgatctggatctggagcaacaaacttctcactactcaaacaagcaggtgacgtggaggagaatcccgggcctactagtatggactggatttggcgcatccttttccttgtcggcgctgctaccggcgcgcattccttcgaagaagtgcaactggtggaaagcgggggaggcgtggtgcagccaggcggatctctgagactgagctgtgccgccagcggcttcaccttcagcagctacgccatgagctgggtgcgccaggcccctggaaaaggcctggaatgggtgtccgccatctctggctctggcggcagcacctactacgccgatagcgtgaagggccggttcagcatcagccgggacaacagcaagaacaccctgtacctccagatgaacagcctgcgggccgaggacaccgccgtgtactactgtgccagaaccagaagctccggggccttcgacatctggggccagggaacactcgtgaccgtgtcctctacgcgtatccagaaccctgatcctgccgtgtaccagctgcgggatagcaagagcagcgacaagagcgtgtgtctgttcaccgacttcgacagccagaccaacgtgtcccagagcaaggactccgacgtgtacatcaccgataagtgcgtgctggacatgcggagcatggacttcaagagcaactccgccgtggcctggtccaacaagtccgatttcgcctgcgccaacgccttcaacaacagcattatccccgaggacacattcttcccaagccccgagagcagctgcgacgtgaagctggtggaaaagagcttcgagacagacaccaacctgaacttccagaacctgagcgtgatcggcttcagaatcctgctgctgaaagtggccggctttaacctgctgatgaccctgcggctgtggtccagc

SEQ ID NO: 1933 - DNA, 2265 bp, Artificial Sequence
  Synthetic Polynucloetide
atggccttaccagtgaccgccttgctcctgccgctggccttgctgctccacgccgccaggccggaagtgcagctggttgaatctggcggaggactggttcagcctggcggatctctgagactgtcttgtgccgccagcggcttcagcttcagcgacttttggatgagctgggtccgacaggcccctggcaaaggacttgaatgggtcgccacaatcagccaggccggcagcgagaaggactacgtggactctgtgaagggcagattcaccatcagccgggacaacgccaagaagtccctgtacctccagatgaacagcctgagagccgaggacaccgccgtgtactattgtgcctctggcgtgtacagcttcgactacagaggccagggcaccctggtcacagtctcttctggtaccggcggaggcggatctggcggcggaggtagcggtggcggaggatctgaattcgacatccagatgaaccagagccccagcagcctgagcgccagcctgggcgataccatcaccatcacctgtcacgccagccagaacatcaacgtgtggctgagctggtatcagcagaagcccggcaacatccccaagctgctgatctacaaggccagcaacctgcacaccggcgtgcccagcagattttctggcagcggctctggcaccggcttcaccattaccatcagctccctccagcccgaggacattgccacctactactgccagcagggccagagctacccctggacatttggcggaggcaccaagctggaaatcaagagactcgaggacctgaagaacgtgttcccacctgaggtggccgtgttcgagcctagcgaggccgagatcagccacacccagaaagccaccctcgtgtgcctggctaccggcttctaccccgaccatgtggaactgtcttggtgggtcaacggcaaagaggtgcacagcggcgtgtgtaccgacccccagccactgaaagaacagcccgccctgaacgacagccggtactgcctgagcagcagactgagagtgtccgccaccttctggcagaacccccggaaccacttcagatgccaggtgcagttctacggcctgagcgagaacgacgagtggacccaggacagagccaagcccgtgacccagatcgtgtctgccgaagcctggggcagagccgattgcggctttaccagcgagagctaccagcagggcgtgctgagcgccaccatcctgtacgagatcctgctgggcaaggccaccctgtacgccgtgctggtgtctgccctggtgctgatggctatggtcaagcggaaggacagccggggaagggccaagcgatctggatctggagcaacaaacttctcactactcaaacaagcaggtgacgtggaggagaatcccgggcctactagtatggactggatttggcgcatccttttccttgtcggcgctgctaccggcgcgcattccttcgaagaagtgcaactccagcagagcggcccagagcttgtgaagcctggcgcttccgtgaagattagctgcaaagccagcggctacagcttcaccggctacttcatgaactgggtcaagcagagccacggcaagagcctggagtacatcggcagattcaacccctacaacggcgagacactgtacaaccagaagttcaagggcaaggccaccctgaccgtggacaagagcagcagcaccgtgcacatggaactgctgagcgtgaccagcgaggacagcgccgtgtactactgtggcagaagcggcaacgacgacgctatggactattggggccagggcaccagcgtgaccgtgtctagtgctacgcgtatccagaaccctgatcctgccgtgtaccagctgcgggatagcaagagcagcgacaagagcgtgtgtctgttcaccgacttcgacagccagaccaacgtgtcccagagcaaggactccgacgtgtacatcaccgataagtgcgtgctggacatgcggagcatggacttcaagagcaactccgccgtggcctggtccaacaagtccgatttcgcctgcgccaacgccttcaacaacagcattatccccgaggacacattcttcccaagccccgagagcagctgcgacgtgaagctggtggaaaagagcttcgagacagacaccaacctgaacttccagaacctgagcgtgatcggcttcagaatcctgctgctgaaagtggccggctttaacctgctgatgaccctgcggctgtggtccagc

SEQ ID NO: 1934 - DNA, 2268 bp, Artificial Sequence
  Synthetic Polynucloetide
atggccttaccagtgaccgccttgctcctgccgctggccttgctgctccacgccgccaggccggaagtgcagctggttgaatctggcggaggactggttcagcctggcggatctctgagactgtcttgtgccgccagcggcttcagcttcagcgacttttggatgagctgggtccgacaggcccctggcaaaggacttgaatgggtcgccacaatcagccaggccggcagcgagaaggactacgtggactctgtgaagggcagattcaccatcagccgggacaacgccaagaagtccctgtacctccagatgaacagcctgagagccgaggacaccgccgtgtactattgtgcctctggcgtgtacagcttcgactacagaggccagggcaccctggtcacagtctcttctggtaccggcggaggcggatctggcggcggaggtagcggtggcggaggatctgaattcgagatcgtgctgacacagagccctgccaccctgtctctgagccctggcgaaagagccaccctgagctgtagagccagccagagcgtgcggagctacctggcctggtatcagcagaagcctggacaggcccccagactgctgatctacgacgccagcaatcgggccacaggcatccccgccagattttctggctctggcagcggcaccgacttcaccctgacaatcagcagcctggaacccgaggacttcgccgtgtactactgccagcagcggagcaactggccccctacctttggacagggcaccaaggtggaaatcaagctcgaggacctgaagaacgtgttcccacctgaggtggccgtgttcgagcctagcgaggccgagatcagccacacccagaaagccaccctcgtgtgcctggctaccggcttctaccccgaccatgtggaactgtcttggtgggtcaacggcaaagaggtgcacagcggcgtgtgtaccgacccccagccactgaaagaacagcccgccctgaacgacagccggtactgcctgagcagcagactgagagtgtccgccaccttctggcagaacccccggaaccacttcagatgccaggtgcagttctacggcctgagcgagaacgacgagtggacccaggacagagccaagcccgtgacccagatcgtgtctgccgaagcctggggcagagccgattgcggctttaccagcgagagctaccagcagggcgtgctgagcgccaccatcctgtacgagatcctgctgggcaaggccaccctgtacgccgtgctggtgtctgccctggtgctgatggctatggtcaagcggaaggacagccggggaagggccaagcgatctggatctggagcaacaaacttctcactactcaaacaagcaggtgacgtggaggagaatcccgggcctactagtatggactggatttggcgcatccttttccttgtcggcgctgctaccggcgcgcattccttcgaacaactccaggtgcaggaatctggccccggactcgtgaagcccagcgagacactgagcctgacctgtaccgtgtccggcggcagcatcagcaacagctacttctcctggggctggatcagacagccccctggcaagggcctggaatggatcggcagcttctactacggcgagaaaacctactacaaccccagcctgaagtccagagccaccatcagcatcgacaccagcaagagccagttctccctgaagctgagcagcgtgacagccgccgacaccgccgtgtattattgccccagaggccccaccatgatccggggcgtgatcgactcttggggccagggaacactcgtgaccgtgtcctctacgcgtatccagaaccctgatcctgccgtgtaccagctgcgggatagcaagagcagcgacaagagcgtgtgtctgttcaccgacttcgacagccagaccaacgtgtcccagagcaaggactccgacgtgtacatcaccgataagtgcgtgctggacatgcggagcatggacttcaagagcaactccgccgtggcctggtccaacaagtccgatttcgcctgcgccaacgccttcaacaacagcattatccccgaggacacattcttcccaagccccgagagcagctgcgacgtgaagctggtggaaaagagcttcgagacagacaccaacctgaacttccagaacctgagcgtgatcggcttcagaatcctgctgctgaaagtggccggctttaacctgctgatgaccctgcggctgtggtccagc

SEQ ID NO: 1935 - DNA, 2295 bp, Artificial Sequence
  Synthetic Polynucloetide
atggccttaccagtgaccgccttgctcctgccgctggccttgctgctccacgccgccaggccggaagtgcagctggttgaatctggcggaggactggttcagcctggcggatctctgagactgtcttgtgccgccagcggcttcagcttcagcgacttttggatgagctgggtccgacaggcccctggcaaaggacttgaatgggtcgccacaatcagccaggccggcagcgagaaggactacgtggactctgtgaagggcagattcaccatcagccgggacaacgccaagaagtccctgtacctccagatgaacagcctgagagccgaggacaccgccgtgtactattgtgcctctggcgtgtacagcttcgactacagaggccagggcaccctggtcacagtctcttctggtaccggcggaggcggatctggcggcggaggtagcggtggcggaggatctgaattcgacatcgtgatgacccagacccccctgagcctgcctgtgacacctggcgagcctgccagcatctcctgcagaagcagcagaagcctgctggacagcgacgacggcaacacctacctggactggtatctgcagaaacccggccagagcccccaactgctgatctacaccctgagctacagagccagcggcgtgcccgatagattttccggctctggcagcggcaccgacttcaccctgaagatcagccgggtggaagccgaggacgtgggcgtgtactactgtatgcagcgggtggaatttcccatcaccttcggccagggcaccagactggaaatcaagagactcgaggacctgaagaacgtgttcccacctgaggtggccgtgttcgagcctagcgaggccgagatcagccacacccagaaagccaccctcgtgtgcctggctaccggcttctaccccgaccatgtggaactgtcttggtgggtcaacggcaaagaggtgcacagcggcgtgtgtaccgacccccagccactgaaagaacagcccgccctgaacgacagccggtactgcctgagcagcagactgagagtgtccgccaccttctggcagaacccccggaaccacttcagatgccaggtgcagttctacggcctgagcgagaacgacgagtggacccaggacagagccaagcccgtgacccagatcgtgtctgccgaagcctggggcagagccgattgcggctttaccagcgagagctaccagcagggcgtgctgagcgccaccatcctgtacgagatcctgctgggcaaggccaccctgtacgccgtgctggtgtctgccctggtgctgatggctatggtcaagcggaaggacagccggggaagggccaagcgatctggatctggagcaacaaacttctcactactcaaacaagcaggtgacgtggaggagaatcccgggcctactagtatggactggatttggcgcatccttttccttgtcggcgctgctaccggcgcgcattccttcgaacaggtgcaactggtggaatctggcgggggagtggtgcagcctggcagatccctgagactgagctgtgccgccagcggcttcatcttcagcagatacggaatgcactgggtgcgccaggcccctggcaagggactgaaatgggtggccgtgatttggtacgacggcagcaacaagctgtacgccgacagcgtgaagggccggttcaccatcagcagagacaacagcaagaacaccctgtacctgcagatgaacagcctgcgggccgaggacaccgccgtgtactattgcgccagagactactacgacaacagccggcaccactggggcttcgactattggggccagggaacccttgtgaccgtgtcctctacgcgtatccagaaccctgatcctgccgtgtaccagctgcgggatagcaagagcagcgacaagagcgtgtgtctgttcaccgacttcgacagccagaccaacgtgtcccagagcaaggactccgacgtgtacatcaccgataagtgcgtgctggacatgcggagcatggacttcaagagcaactccgccgtggcctggtccaacaagtccgatttcgcctgcgccaacgccttcaacaacagcattatccccgaggacacattcttcccaagccccgagagcagctgcgacgtgaagctggtggaaaagagcttcgagacagacaccaacctgaacttccagaacctgagcgtgatcggcttcagaatcctgctgctgaaagtggccggctttaacctgctgatgaccctgcggctgtggtccagc

SEQ ID NO: 1936 - DNA, 2265 bp, Artificial Sequence
  Synthetic Polynucloetide
atggccttaccagtgaccgccttgctcctgccgctggccttgctgctccacgccgccaggccggaagtgcagctggttgaatctggcggaggactggttcagcctggcggatctctgagactgtcttgtgccgccagcggcttcagcttcagcgacttttggatgagctgggtccgacaggcccctggcaaaggacttgaatgggtcgccacaatcagccaggccggcagcgagaaggactacgtggactctgtgaagggcagattcaccatcagccgggacaacgccaagaagtccctgtacctccagatgaacagcctgagagccgaggacaccgccgtgtactattgtgcctctggcgtgtacagcttcgactacagaggccagggcaccctggtcacagtctcttctggtaccggcggaggcggatctggcggcggaggtagcggtggcggaggatctgaattcgagatccagatgacccagagccccagcagcatgtctgccagcctgggcgacaccatcaccatcacatgccaggccacccaggacatcttcaagaacctgaactggtatcagcagaagcccggcaagccccccagcctgctgatctactatgccaccgaactggccgagggcgtgcccagcagattttctggcagcggcagcggctccgactacagcctgaccatcagcaacctggaaagcgaggacttcgccgcctactactgcctccagttcttcgagttcccattcaccttcggctccggcaccaagctggaaatgaagctcgaggacctgaagaacgtgttcccacctgaggtggccgtgttcgagcctagcgaggccgagatcagccacacccagaaagccaccctcgtgtgcctggctaccggcttctaccccgaccatgtggaactgtcttggtgggtcaacggcaaagaggtgcacagcggcgtgtgtaccgacccccagccactgaaagaacagcccgccctgaacgacagccggtactgcctgagcagcagactgagagtgtccgccaccttctggcagaacccccggaaccacttcagatgccaggtgcagttctacggcctgagcgagaacgacgagtggacccaggacagagccaagcccgtgacccagatcgtgtctgccgaagcctggggcagagccgattgcggctttaccagcgagagctaccagcagggcgtgctgagcgccaccatcctgtacgagatcctgctgggcaaggccaccctgtacgccgtgctggtgtctgccctggtgctgatggctatggtcaagcggaaggacagccggggaagggccaagcgatctggatctggagcaacaaacttctcactactcaaacaagcaggtgacgtggaggagaatcccgggcctactagtatggactggatttggcgcatccttttccttgtcggcgctgctaccggcgcgcattccttcgaacaggtgcaactccagcagtctggcgctgagcttgtgcggcctggcacctctgtgaaggtgtcctgtaaagccagcggctacgtgttcaccaactactggatcgagtggatcaagcagcggccaggccagggcctggaatggatcggcgtgatgaatccaggcagcggcgagacaacctacaacgagaagttcaagggcaaggccaccctgaccgccgacaagagcagcagcacagcctacatgcaactgtcctccctgaccagcgtggacagcgccgtgtacttctgcgccagggaccacgaccgggactactacgctatggactactggggccagggcaccagcgtgaccgtgtcatctacgcgtatccagaaccctgatcctgccgtgtaccagctgcgggatagcaagagcagcgacaagagcgtgtgtctgttcaccgacttcgacagccagaccaacgtgtcccagagcaaggactccgacgtgtacatcaccgataagtgcgtgctggacatgcggagcatggacttcaagagcaactccgccgtggcctggtccaacaagtccgatttcgcctgcgccaacgccttcaacaacagcattatccccgaggacacattcttcccaagccccgagagcagctgcgacgtgaagctggtggaaaagagcttcgagacagacaccaacctgaacttccagaacctgagcgtgatcggcttcagaatcctgctgctgaaagtggccggctttaacctgctgatgaccctgcggctgtggtccagc

SEQ ID NO: 1937 - DNA, 2256 bp, Artificial Sequence
  Synthetic Polynucloetide
atggccttaccagtgaccgccttgctcctgccgctggccttgctgctccacgccgccaggccggaagtgcagctggttgaatctggcggaggactggttcagcctggcggatctctgagactgtcttgtgccgccagcggcttcagcttcagcgacttttggatgagctgggtccgacaggcccctggcaaaggacttgaatgggtcgccacaatcagccaggccggcagcgagaaggactacgtggactctgtgaagggcagattcaccatcagccgggacaacgccaagaagtccctgtacctccagatgaacagcctgagagccgaggacaccgccgtgtactattgtgcctctggcgtgtacagcttcgactacagaggccagggcaccctggtcacagtctcttctggtaccggcggaggcggatctggcggcggaggtagcggtggcggaggatctgaattcgacatcctgctgacacagagccccgccatcctgtccgtgtctccaggcgagagagtgtcctttagctgccgggccagccagaacatcggcaccagcatccactggtatcagcagcggaccaacggcagccccagactgctgattaagtacgccagcgagtccgtgtccggcatccccagcagattttctggcagcggctccggcaccgacttcaccctgagcatcaacagcgtggaaagcgaggacattgccgactactactgccagcacaccaatagctggcccaccacctttggcggaggcaccaagctggaaatcaagagactcgaggacctgaagaacgtgttcccacctgaggtggccgtgttcgagcctagcgaggccgagatcagccacacccagaaagccaccctcgtgtgcctggctaccggcttctaccccgaccatgtggaactgtcttggtgggtcaacggcaaagaggtgcacagcggcgtgtgtaccgacccccagccactgaaagaacagcccgccctgaacgacagccggtactgcctgagcagcagactgagagtgtccgccaccttctggcagaacccccggaaccacttcagatgccaggtgcagttctacggcctgagcgagaacgacgagtggacccaggacagagccaagcccgtgacccagatcgtgtctgccgaagcctggggcagagccgattgcggctttaccagcgagagctaccagcagggcgtgctgagcgccaccatcctgtacgagatcctgctgggcaaggccaccctgtacgccgtgctggtgtctgccctggtgctgatggctatggtcaagcggaaggacagccggggaagggccaagcgatctggatctggagcaacaaacttctcactactcaaacaagcaggtgacgtggaggagaatcccgggcctactagtatggactggatttggcgcatccttttccttgtcggcgctgctaccggcgcgcattccttcgaacaggtgcaactccagcagtccgacgccgagcttgtgaagcctggcgcttccgtgaagattagctgcaaggccagcggctacaccttcaccgaccacgccattcactgggtcaagcagaagcccgagcagggcctggaatggatcggctacttcagccccggcaacggcgacatcaagtacaacgagaagttcaagggcaaggccaccctgaccgccgacaagagcagcagcacagcctacatgcaactgaacagcctgaccagcgaggactccgccgtgtacttctgcaagcggagctacggcaactacgactactggggccagggcaccacactgaccgtgtctagtacgcgtatccagaaccctgatcctgccgtgtaccagctgcgggatagcaagagcagcgacaagagcgtgtgtctgttcaccgacttcgacagccagaccaacgtgtcccagagcaaggactccgacgtgtacatcaccgataagtgcgtgctggacatgcggagcatggacttcaagagcaactccgccgtggcctggtccaacaagtccgatttcgcctgcgccaacgccttcaacaacagcattatccccgaggacacattcttcccaagccccgagagcagctgcgacgtgaagctggtggaaaagagcttcgagacagacaccaacctgaacttccagaacctgagcgtgatcggcttcagaatcctgctgctgaaagtggccggctttaacctgctgatgaccctgcggctgtggtccagc

SEQ ID NO: 1938 - DNA, 2271 bp, Artificial Sequence
  Synthetic Polynucloetide
atggccttaccagtgaccgccttgctcctgccgctggccttgctgctccacgccgccaggccggaagtgcagctggttgaatctggcggaggactggttcagcctggcggatctctgagactgtcttgtgccgccagcggcttcagcttcagcgacttttggatgagctgggtccgacaggcccctggcaaaggacttgaatgggtcgccacaatcagccaggccggcagcgagaaggactacgtggactctgtgaagggcagattcaccatcagccgggacaacgccaagaagtccctgtacctccagatgaacagcctgagagccgaggacaccgccgtgtactattgtgcctctggcgtgtacagcttcgactacagaggccagggcaccctggtcacagtctcttctggtaccggcggaggcggatctggcggcggaggtagcggtggcggaggatctgaattcgacatcgtgatgacccagagccccgatagcctggccgtgtctctgggagagagagccaccatcaactgcaagagcagccagagcctgctgaacagcggcgaccagaagaactacctgacctggtatcagcagaagcccggccagccccccaagctgctgatctactgggccagcaccagagaaagcggcgtgcccgatagattcagcggcagcggaagtggcaccgacttcaccctgaccatcagttctcttcaggccgaggacgtggccgtgtactactgccagaacgactacagctaccccctgaccttcggccagggcaccaaggtggaaatcaagctcgaggacctgaagaacgtgttcccacctgaggtggccgtgttcgagcctagcgaggccgagatcagccacacccagaaagccaccctcgtgtgcctggctaccggcttctaccccgaccatgtggaactgtcttggtgggtcaacggcaaagaggtgcacagcggcgtgtgtaccgacccccagccactgaaagaacagcccgccctgaacgacagccggtactgcctgagcagcagactgagagtgtccgccaccttctggcagaacccccggaaccacttcagatgccaggtgcagttctacggcctgagcgagaacgacgagtggacccaggacagagccaagcccgtgacccagatcgtgtctgccgaagcctggggcagagccgattgcggctttaccagcgagagctaccagcagggcgtgctgagcgccaccatcctgtacgagatcctgctgggcaaggccaccctgtacgccgtgctggtgtctgccctggtgctgatggctatggtcaagcggaaggacagccggggaagggccaagcgatctggatctggagcaacaaacttctcactactcaaacaagcaggtgacgtggaggagaatcccgggcctactagtatggactggatttggcgcatccttttccttgtcggcgctgctaccggcgcgcattccttcgaacaggtgcagctggtgcagtctggggccgaagtgaagaaaaccggcagcagcgtgaaggtgtcctgcaaggccagcggctacacctttaccgaccacgccattcacgtgtggcggcaggctccaggacaggccctggaatggatgggccacttcagccccggcaacaccgacatcaagtacaacgacaagttcaagggcagagtgaccctgaccgtggaccgcagcatgagcaccgcctacatggaactgagcagcctgcggagcgaggacaccgccatgtactattgcaagaccagcaccttctttttcgactactggggccagggaacaatggtcaccgtgtccagcacgcgtatccagaaccctgatcctgccgtgtaccagctgcgggatagcaagagcagcgacaagagcgtgtgtctgttcaccgacttcgacagccagaccaacgtgtcccagagcaaggactccgacgtgtacatcaccgataagtgcgtgctggacatgcggagcatggacttcaagagcaactccgccgtggcctggtccaacaagtccgatttcgcctgcgccaacgccttcaacaacagcattatccccgaggacacattcttcccaagccccgagagcagctgcgacgtgaagctggtggaaaagagcttcgagacagacaccaacctgaacttccagaacctgagcgtgatcggcttcagaatcctgctgctgaaagtggccggctttaacctgctgatgaccctgcggctgtggtccagc

SEQ ID NO: 1939 - DNA, 2268 bp, Artificial Sequence
  Synthetic Polynucloetide
atggccttaccagtgaccgccttgctcctgccgctggccttgctgctccacgccgccaggccggaagtgcagctggttgaatctggcggaggactggttcagcctggcggatctctgagactgtcttgtgccgccagcggcttcagcttcagcgacttttggatgagctgggtccgacaggcccctggcaaaggacttgaatgggtcgccacaatcagccaggccggcagcgagaaggactacgtggactctgtgaagggcagattcaccatcagccgggacaacgccaagaagtccctgtacctccagatgaacagcctgagagccgaggacaccgccgtgtactattgtgcctctggcgtgtacagcttcgactacagaggccagggcaccctggtcacagtctcttctggtaccggcggaggcggatctggcggcggaggtagcggtggcggaggatctgaattcgacatccagatgacccagagccccagcagcctgtctgccagcgtgggcgacagagtgaccatcacatgcaaggccagccaggacgtgtccattgccgtggcctggtatcagcagaagcccggcaaggcccccaaggtgctgatctacagcgccagctacagatacaccggcgtgcccgacagattcagcggctctggcagcggcaccgacttcaccttcaccatcagctccctccagcccgaggatattgccgtgtactactgccagcagcactacatcacccccctgacctttggcggaggcaccaaggtggaaatcaagctcgaggacctgaagaacgtgttcccacctgaggtggccgtgttcgagcctagcgaggccgagatcagccacacccagaaagccaccctcgtgtgcctggctaccggcttctaccccgaccatgtggaactgtcttggtgggtcaacggcaaagaggtgcacagcggcgtgtgtaccgacccccagccactgaaagaacagcccgccctgaacgacagccggtactgcctgagcagcagactgagagtgtccgccaccttctggcagaacccccggaaccacttcagatgccaggtgcagttctacggcctgagcgagaacgacgagtggacccaggacagagccaagcccgtgacccagatcgtgtctgccgaagcctggggcagagccgattgcggctttaccagcgagagctaccagcagggcgtgctgagcgccaccatcctgtacgagatcctgctgggcaaggccaccctgtacgccgtgctggtgtctgccctggtgctgatggctatggtcaagcggaaggacagccggggaagggccaagcgatctggatctggagcaacaaacttctcactactcaaacaagcaggtgacgtggaggagaatcccgggcctactagtatggactggatttggcgcatccttttccttgtcggcgctgctaccggcgcgcattccttcgaacagatccaactggtgcagagcggccacgaagtgaagaaacctggggccagcgtgaaggtgtcctgcaaagccagcggctacacctttaccaactacggcatgaactgggtgcgccaggcccctggacagggcctggaatggatgggctggatcaacaccaagaccggcgagcccacctacgccgaagagttcaagggcagattcgtgttcagcctggaaaccagcgcctccaccgcctacctccagatcagctctctgaaggccgaggacaccgccatgtacttttgcggcagaggcggctacggcagcagctactggtacttcgatgtgtggggccagggcaccaccgtgaccgtgtcatctacgcgtatccagaaccctgatcctgccgtgtaccagctgcgggatagcaagagcagcgacaagagcgtgtgtctgttcaccgacttcgacagccagaccaacgtgtcccagagcaaggactccgacgtgtacatcaccgataagtgcgtgctggacatgcggagcatggacttcaagagcaactccgccgtggcctggtccaacaagtccgatttcgcctgcgccaacgccttcaacaacagcattatccccgaggacacattcttcccaagccccgagagcagctgcgacgtgaagctggtggaaaagagcttcgagacagacaccaacctgaacttccagaacctgagcgtgatcggcttcagaatcctgctgctgaaagtggccggctttaacctgctgatgaccctgcggctgtggtccagc

SEQ ID NO: 1940 - DNA, 2274 bp, Artificial Sequence
  Synthetic Polynucloetide
atggccttaccagtgaccgccttgctcctgccgctggccttgctgctccacgccgccaggccggaagtgcagctggttgaatctggcggaggactggttcagcctggcggatctctgagactgtcttgtgccgccagcggcttcagcttcagcgacttttggatgagctgggtccgacaggcccctggcaaaggacttgaatgggtcgccacaatcagccaggccggcagcgagaaggactacgtggactctgtgaagggcagattcaccatcagccgggacaacgccaagaagtccctgtacctccagatgaacagcctgagagccgaggacaccgccgtgtactattgtgcctctggcgtgtacagcttcgactacagaggccagggcaccctggtcacagtctcttctggtaccggcggaggcggatctggcggcggaggtagcggtggcggaggatctgaattcgacatcgtgatgacccagagccccgatagcctggccgtgtctctgggagagagagccaccatcaactgccgggccagcaagagcgtgtccaccagcggctacagctacatgcactggtatcagcagaagcccggccagccccccaagctgctgatctacctggcctccaacctggaaagcggcgtgcccgatagattcagcggcagcggctctggcaccgacttcaccctgaccatcagttctcttcaggccgaggacgtggccgtgtactactgccagcacagcagagagctgccctacaccttcggccagggcaccaagctggaaatcaagctcgaggacctgaagaacgtgttcccacctgaggtggccgtgttcgagcctagcgaggccgagatcagccacacccagaaagccaccctcgtgtgcctggctaccggcttctaccccgaccatgtggaactgtcttggtgggtcaacggcaaagaggtgcacagcggcgtgtgtaccgacccccagccactgaaagaacagcccgccctgaacgacagccggtactgcctgagcagcagactgagagtgtccgccaccttctggcagaacccccggaaccacttcagatgccaggtgcagttctacggcctgagcgagaacgacgagtggacccaggacagagccaagcccgtgacccagatcgtgtctgccgaagcctggggcagagccgattgcggctttaccagcgagagctaccagcagggcgtgctgagcgccaccatcctgtacgagatcctgctgggcaaggccaccctgtacgccgtgctggtgtctgccctggtgctgatggctatggtcaagcggaaggacagccggggaagggccaagcgatctggatctggagcaacaaacttctcactactcaaacaagcaggtgacgtggaggagaatcccgggcctactagtatggactggatttggcgcatccttttccttgtcggcgctgctaccggcgcgcattccttcgaacaggtgcaactccaggaatctggccctggccttgtgaagcccagcgagacactgagcctgacctgtaccgtgtccggcggcagcatcagctcttacggcgtgcactggattcggcagcctccaggcaagggcctggaatggatcggcgtgatctggacctccggcgtgaccgactacaacagcgccctgatgggcagagtgaccatctccgtggacaccagcaagaaccagttcagcctgaagctgagcagcgtgacagccgccgataccgccgtgtattattgcgccagagatggcgactacgaccgctacacaatggactactggggccagggaacccttgtgaccgtgtcctctacgcgtatccagaaccctgatcctgccgtgtaccagctgcgggatagcaagagcagcgacaagagcgtgtgtctgttcaccgacttcgacagccagaccaacgtgtcccagagcaaggactccgacgtgtacatcaccgataagtgcgtgctggacatgcggagcatggacttcaagagcaactccgccgtggcctggtccaacaagtccgatttcgcctgcgccaacgccttcaacaacagcattatccccgaggacacattcttcccaagccccgagagcagctgcgacgtgaagctggtggaaaagagcttcgagacagacaccaacctgaacttccagaacctgagcgtgatcggcttcagaatcctgctgctgaaagtggccggctttaacctgctgatgaccctgcggctgtggtccagc

SEQ ID NO: 1941 - DNA, 2274 bp, Artificial Sequence
  Synthetic Polynucloetide
atggccttaccagtgaccgccttgctcctgccgctggccttgctgctccacgccgccaggccggaagtgcagctggttgaatctggcggaggactggttcagcctggcggatctctgagactgtcttgtgccgccagcggcttcagcttcagcgacttttggatgagctgggtccgacaggcccctggcaaaggacttgaatgggtcgccacaatcagccaggccggcagcgagaaggactacgtggactctgtgaagggcagattcaccatcagccgggacaacgccaagaagtccctgtacctccagatgaacagcctgagagccgaggacaccgccgtgtactattgtgcctctggcgtgtacagcttcgactacagaggccagggcaccctggtcacagtctcttctggtaccggcggaggcggatctggcggcggaggtagcggtggcggaggatctgaattcgacatccagatgacccagagccccagcagcctgtctgccagcgtgggcgacagagtgaccatcacctgtagagccagccagagcatcggcaccagcctgcactggtatcagcagaagcctggcaaggcccccaagctgctgattaagttcgccagcagactgcagagcggcgtgcccagcagattttctggcagcggctccggcaccgacttcaccctgacaatcagctccctgcagcccgaggacttcgccacctactactgccagcagagccccggcttccctccaacctttggacagggcaccaagctggaaatcaagcggctcgaggacctgaagaacgtgttcccacctgaggtggccgtgttcgagcctagcgaggccgagatcagccacacccagaaagccaccctcgtgtgcctggctaccggcttctaccccgaccatgtggaactgtcttggtgggtcaacggcaaagaggtgcacagcggcgtgtgtaccgacccccagccactgaaagaacagcccgccctgaacgacagccggtactgcctgagcagcagactgagagtgtccgccaccttctggcagaacccccggaaccacttcagatgccaggtgcagttctacggcctgagcgagaacgacgagtggacccaggacagagccaagcccgtgacccagatcgtgtctgccgaagcctggggcagagccgattgcggctttaccagcgagagctaccagcagggcgtgctgagcgccaccatcctgtacgagatcctgctgggcaaggccaccctgtacgccgtgctggtgtctgccctggtgctgatggctatggtcaagcggaaggacagccggggaagggccaagcgatctggatctggagcaacaaacttctcactactcaaacaagcaggtgacgtggaggagaatcccgggcctactagtatggactggatttggcgcatccttttccttgtcggcgctgctaccggcgcgcattccttcgaacaggtgcaactggtggaatctggcggcggacttgtgaagccaggcggcagcctgagactgagctgtgccgccagcggcttcagcatcaccaccagcggctactactggacctggatcagacagttccccggcaagggcctggaatggatgggctacatcggctacaacagcaagacctactacaaccccgccctgaagtcccggatcaccatcagcagagacaacgccaagaacagcctgtacctgcagatgaactccctgagagccgaggataccgccgtgtactactgcgccagatccctgtacggcggctacaaggacgccttcgatagctggggccagggaacccttgtgaccgtgtctagcacgcgtatccagaaccctgatcctgccgtgtaccagctgcgggatagcaagagcagcgacaagagcgtgtgtctgttcaccgacttcgacagccagaccaacgtgtcccagagcaaggactccgacgtgtacatcaccgataagtgcgtgctggacatgcggagcatggacttcaagagcaactccgccgtggcctggtccaacaagtccgatttcgcctgcgccaacgccttcaacaacagcattatccccgaggacacattcttcccaagccccgagagcagctgcgacgtgaagctggtggaaaagagcttcgagacagacaccaacctgaacttccagaacctgagcgtgatcggcttcagaatcctgctgctgaaagtggccggctttaacctgctgatgaccctgcggctgtggtccagc

SEQ ID NO: 1942 - DNA, 2289 bp, Artificial Sequence
  Synthetic Polynucloetide
atggccttaccagtgaccgccttgctcctgccgctggccttgctgctccacgccgccaggccggaagtgcagctggttgaatctggcggaggactggttcagcctggcggatctctgagactgtcttgtgccgccagcggcttcagcttcagcgacttttggatgagctgggtccgacaggcccctggcaaaggacttgaatgggtcgccacaatcagccaggccggcagcgagaaggactacgtggactctgtgaagggcagattcaccatcagccgggacaacgccaagaagtccctgtacctccagatgaacagcctgagagccgaggacaccgccgtgtactattgtgcctctggcgtgtacagcttcgactacagaggccagggcaccctggtcacagtctcttctggtaccggcggaggcggatctggcggcggaggtagcggtggcggaggatctgaattcgacgagatcgtgctgacccagagccctctgagcctgcctgtgacacctggcgagcctgccagcatctcctgtagaagcagccagagcctgctgcacagcatcggctacaactacctggactggtatctccagaagcccggccagagcccccaactgctgatctacctgggcagcaacagagccagcggcgtgcccgatagattttccggcagcggctccggcaccgacttcaccctgaagatcagccgggtggaagccgaggacgtgggcgtgtactactgtatgcaggccctccagacccccctgacctttggcggaggcaccaaggtggaaatcaagcggctcgaggacctgaagaacgtgttcccacctgaggtggccgtgttcgagcctagcgaggccgagatcagccacacccagaaagccaccctcgtgtgcctggctaccggcttctaccccgaccatgtggaactgtcttggtgggtcaacggcaaagaggtgcacagcggcgtgtgtaccgacccccagccactgaaagaacagcccgccctgaacgacagccggtactgcctgagcagcagactgagagtgtccgccaccttctggcagaacccccggaaccacttcagatgccaggtgcagttctacggcctgagcgagaacgacgagtggacccaggacagagccaagcccgtgacccagatcgtgtctgccgaagcctggggcagagccgattgcggctttaccagcgagagctaccagcagggcgtgctgagcgccaccatcctgtacgagatcctgctgggcaaggccaccctgtacgccgtgctggtgtctgccctggtgctgatggctatggtcaagcggaaggacagccggggaagggccaagcgatctggatctggagcaacaaacttctcactactcaaacaagcaggtgacgtggaggagaatcccgggcctactagtatggactggatttggcgcatccttttccttgtcggcgctgctaccggcgcgcattccttcgaagaagtgcaactggtggaaagcggaggcggcgtggtgcagcctggaagaagcctgagactgagctgtgccgccagcggcttcaccttccggtcctacggaatgcactgggtgcgccaggcccctggcaaaggactggaatgggtggccgtgatctcctacgacggctccaacaagtactacaccgacagcgtgaacggcagattcaccatcagcagagacaacagcaagaacaccctgtacctccagatgaacagcctgcgggccgaggacaccgccgtgtactattgtgctagaggcggaggctactacgagacaagcggccctgattactggggccagggcacactcgtgaccgtgtctagtacgcgtatccagaaccctgatcctgccgtgtaccagctgcgggatagcaagagcagcgacaagagcgtgtgtctgttcaccgacttcgacagccagaccaacgtgtcccagagcaaggactccgacgtgtacatcaccgataagtgcgtgctggacatgcggagcatggacttcaagagcaactccgccgtggcctggtccaacaagtccgatttcgcctgcgccaacgccttcaacaacagcattatccccgaggacacattcttcccaagccccgagagcagctgcgacgtgaagctggtggaaaagagcttcgagacagacaccaacctgaacttccagaacctgagcgtgatcggcttcagaatcctgctgctgaaagtggccggctttaacctgctgatgaccctgcggctgtggtccagc

SEQ ID NO: 1943 - DNA, 2283 bp, Artificial Sequence
  Synthetic Polynucloetide
atggccttaccagtgaccgccttgctcctgccgctggccttgctgctccacgccgccaggccggaagtgcagctggttgaatctggcggaggactggttcagcctggcggatctctgagactgtcttgtgccgccagcggcttcagcttcagcgacttttggatgagctgggtccgacaggcccctggcaaaggacttgaatgggtcgccacaatcagccaggccggcagcgagaaggactacgtggactctgtgaagggcagattcaccatcagccgggacaacgccaagaagtccctgtacctccagatgaacagcctgagagccgaggacaccgccgtgtactattgtgcctctggcgtgtacagcttcgactacagaggccagggcaccctggtcacagtctcttctggtaccggcggaggcggatctggcggcggaggtagcggtggcggaggatctgaattcgacgacgtcgtgatgacccagagccctctgagcctgcctgtgacacctggcgagcctgccagcatctcctgtagaagcagccagagcctgctgcacagcatcggctacaactacctgcactggtttctccagaagcccggccagagcccccaactgctgatctacctgggcagcaacagagccagcggcgtgcccgatagattttccggcagcggctccggcaccgacttcaccctgaagatcagccgggtggaagccgaggacgtgggcgtgtactactgtatgcaggccctccagacccctcccacctttggacagggcaccagactggaaatcaagcggctcgaggacctgaagaacgtgttcccacctgaggtggccgtgttcgagcctagcgaggccgagatcagccacacccagaaagccaccctcgtgtgcctggctaccggcttctaccccgaccatgtggaactgtcttggtgggtcaacggcaaagaggtgcacagcggcgtgtgtaccgacccccagccactgaaagaacagcccgccctgaacgacagccggtactgcctgagcagcagactgagagtgtccgccaccttctggcagaacccccggaaccacttcagatgccaggtgcagttctacggcctgagcgagaacgacgagtggacccaggacagagccaagcccgtgacccagatcgtgtctgccgaagcctggggcagagccgattgcggctttaccagcgagagctaccagcagggcgtgctgagcgccaccatcctgtacgagatcctgctgggcaaggccaccctgtacgccgtgctggtgtctgccctggtgctgatggctatggtcaagcggaaggacagccggggaagggccaagcgatctggatctggagcaacaaacttctcactactcaaacaagcaggtgacgtggaggagaatcccgggcctactagtatggactggatttggcgcatccttttccttgtcggcgctgctaccggcgcgcattccttcgaacaactccaactccaggaaagcggccctggcctcgtgaagcctagcggcacactgagcctgacatgtgccgtgtctggcggcagcatcagcagcagcaactggtggtcttgggtgcgccagcctcctggcaagggcctggaatggatcggcgaaatctaccacagcggcagcaccaactacaaccccagcctgaagtccagagtgaccatcagcgtggacaagagcaagaaccagttctccctgaagctgagcagcgtgacagccgccgataccgccgtgtactattgcgtgggcagcccctacggcgactacgtgctggattattggggccagggcaccctcgtgaccgtgtctagtacgcgtatccagaaccctgatcctgccgtgtaccagctgcgggatagcaagagcagcgacaagagcgtgtgtctgttcaccgacttcgacagccagaccaacgtgtcccagagcaaggactccgacgtgtacatcaccgataagtgcgtgctggacatgcggagcatggacttcaagagcaactccgccgtggcctggtccaacaagtccgatttcgcctgcgccaacgccttcaacaacagcattatccccgaggacacattcttcccaagccccgagagcagctgcgacgtgaagctggtggaaaagagcttcgagacagacaccaacctgaacttccagaacctgagcgtgatcggcttcagaatcctgctgctgaaagtggccggctttaacctgctgatgaccctgcggctgtggtccagc

SEQ ID NO: 1944 - DNA, 2277 bp, Artificial Sequence
  Synthetic Polynucloetide
atggccttaccagtgaccgccttgctcctgccgctggccttgctgctccacgccgccaggccggaagtgcagctggttgaatctggcggaggactggttcagcctggcggatctctgagactgtcttgtgccgccagcggcttcagcttcagcgacttttggatgagctgggtccgacaggcccctggcaaaggacttgaatgggtcgccacaatcagccaggccggcagcgagaaggactacgtggactctgtgaagggcagattcaccatcagccgggacaacgccaagaagtccctgtacctccagatgaacagcctgagagccgaggacaccgccgtgtactattgtgcctctggcgtgtacagcttcgactacagaggccagggcaccctggtcacagtctcttctggtaccggcggaggcggatctggcggcggaggtagcggtggcggaggatctgaattcgacgagatcgtgctgacacagagccctggcaccctgagcctgtctctgggagagagagccacactgagctgtcgggccagccagtctatcagcagcagcttcctggcctggtatcagcagaagcccggccaggcccctaagctgctgatctacgccgccagcacaagagccaccggcatccccgatagattcagcggctctggcagcggcaccgacttcaccctgaccatcagcagactggaacccgaggacttcgccgtgtactactgccagcagtacggcagaagcctgagcttcggcggaggcaccaaggtggaagtgaagctcgaggacctgaagaacgtgttcccacctgaggtggccgtgttcgagcctagcgaggccgagatcagccacacccagaaagccaccctcgtgtgcctggctaccggcttctaccccgaccatgtggaactgtcttggtgggtcaacggcaaagaggtgcacagcggcgtgtgtaccgacccccagccactgaaagaacagcccgccctgaacgacagccggtactgcctgagcagcagactgagagtgtccgccaccttctggcagaacccccggaaccacttcagatgccaggtgcagttctacggcctgagcgagaacgacgagtggacccaggacagagccaagcccgtgacccagatcgtgtctgccgaagcctggggcagagccgattgcggctttaccagcgagagctaccagcagggcgtgctgagcgccaccatcctgtacgagatcctgctgggcaaggccaccctgtacgccgtgctggtgtctgccctggtgctgatggctatggtcaagcggaaggacagccggggaagggccaagcgatctggatctggagcaacaaacttctcactactcaaacaagcaggtgacgtggaggagaatcccgggcctactagtatggactggatttggcgcatccttttccttgtcggcgctgctaccggcgcgcattccttcgaacaggtgcaactccagcagtctggccccggactcgtgaagcctagccagacactgagcctgacctgcgccatcagcggcgatagcgtgtccggcaatagcgccacctggaactggatcagacagagcccatctcggggcctggaatggctgggccggacctactaccgcagcaagtggaaccacgactacgccgagagcgtgaagtcccggatcaccatcaaccccgacaccagcaagaaccagttctccttgcaactgaacagcgtgacccccgaggacacagccgtgtattattgcgccagaggcgacagcagctcttggtacgccttcgactattggggccagggcaccctcgtgaccgtgtctagtacgcgtatccagaaccctgatcctgccgtgtaccagctgcgggatagcaagagcagcgacaagagcgtgtgtctgttcaccgacttcgacagccagaccaacgtgtcccagagcaaggactccgacgtgtacatcaccgataagtgcgtgctggacatgcggagcatggacttcaagagcaactccgccgtggcctggtccaacaagtccgatttcgcctgcgccaacgccttcaacaacagcattatccccgaggacacattcttcccaagccccgagagcagctgcgacgtgaagctggtggaaaagagcttcgagacagacaccaacctgaacttccagaacctgagcgtgatcggcttcagaatcctgctgctgaaagtggccggctttaacctgctgatgaccctgcggctgtggtccagc

SEQ ID NO: 1945 - DNA, 2274 bp, Artificial Sequence
  Synthetic Polynucloetide
atggccttaccagtgaccgccttgctcctgccgctggccttgctgctccacgccgccaggccggaagtgcagctggttgaatctggcggaggactggttcagcctggcggatctctgagactgtcttgtgccgccagcggcttcagcttcagcgacttttggatgagctgggtccgacaggcccctggcaaaggacttgaatgggtcgccacaatcagccaggccggcagcgagaaggactacgtggactctgtgaagggcagattcaccatcagccgggacaacgccaagaagtccctgtacctccagatgaacagcctgagagccgaggacaccgccgtgtactattgtgcctctggcgtgtacagcttcgactacagaggccagggcaccctggtcacagtctcttctggtaccggcggaggcggatctggcggcggaggtagcggtggcggaggatctgaattcgaccagagcgtcgtgacacagcctcctagcgtgtcagtggcccctggcaagaccgccagaatcacctgtggccggaacaacatcggcagcaagagcgtgcactggtatcagcagaagcccggccaggctcctgtgctggtggtgtacgacgacagcgacagacccagcggcatccccgagagattcagcggcagcaactccggcaataccgccaccctgaccatcagcagagtggaagccggcgacgaggccgactactactgccaagtgtgggacagcagcagcgatcacgtggtgtttggcggaggcaccaagctgacagtgctgggtctcgaggacctgaagaacgtgttcccacctgaggtggccgtgttcgagcctagcgaggccgagatcagccacacccagaaagccaccctcgtgtgcctggctaccggcttctaccccgaccatgtggaactgtcttggtgggtcaacggcaaagaggtgcacagcggcgtgtgtaccgacccccagccactgaaagaacagcccgccctgaacgacagccggtactgcctgagcagcagactgagagtgtccgccaccttctggcagaacccccggaaccacttcagatgccaggtgcagttctacggcctgagcgagaacgacgagtggacccaggacagagccaagcccgtgacccagatcgtgtctgccgaagcctggggcagagccgattgcggctttaccagcgagagctaccagcagggcgtgctgagcgccaccatcctgtacgagatcctgctgggcaaggccaccctgtacgccgtgctggtgtctgccctggtgctgatggctatggtcaagcggaaggacagccggggaagggccaagcgatctggatctggagcaacaaacttctcactactcaaacaagcaggtgacgtggaggagaatcccgggcctactagtatggactggatttggcgcatccttttccttgtcggcgctgctaccggcgcgcattccttcgaagtgcaactggtgcagtctggcggaggggtcatgcggcctggcggatctctgagactgtcttgtgccgccagcggcttcaccttcgacgactacggcatgagctgggtgcgccaggcccctggaaaaggcctggaatgggtgtccggcatcaactggaatggcggcagcaccggctacgccgattctgtgcggggcagattcaccatcagccgggacaacgccaagaacagcctgtacctgcagatgaactccctgcgggccgaggacaccgccctgtactattgcgccagagagcggggctacggctaccacgaccctcacgattattggggccagggcacccttgttaccgtgtcctctacgcgtatccagaaccctgatcctgccgtgtaccagctgcgggatagcaagagcagcgacaagagcgtgtgtctgttcaccgacttcgacagccagaccaacgtgtcccagagcaaggactccgacgtgtacatcaccgataagtgcgtgctggacatgcggagcatggacttcaagagcaactccgccgtggcctggtccaacaagtccgatttcgcctgcgccaacgccttcaacaacagcattatccccgaggacacattcttcccaagccccgagagcagctgcgacgtgaagctggtggaaaagagcttcgagacagacaccaacctgaacttccagaacctgagcgtgatcggcttcagaatcctgctgctgaaagtggccggctttaacctgctgatgaccctgcggctgtggtccagc

SEQ ID NO: 1946 - DNA, 2313 bp, Artificial Sequence
  Synthetic Polynucloetide
atggccttaccagtgaccgccttgctcctgccgctggccttgctgctccacgccgccaggccggaagtgcagctggttgaatctggcggaggactggttcagcctggcggatctctgagactgtcttgtgccgccagcggcttcagcttcagcgacttttggatgagctgggtccgacaggcccctggcaaaggacttgaatgggtcgccacaatcagccaggccggcagcgagaaggactacgtggactctgtgaagggcagattcaccatcagccgggacaacgccaagaagtccctgtacctccagatgaacagcctgagagccgaggacaccgccgtgtactattgtgcctctggcgtgtacagcttcgactacagaggccagggcaccctggtcacagtctcttctggtaccggcggaggcggatctggcggcggaggtagcggtggcggaggatctgaattcgaacagaaactcatcagtgaagaagacctggaattccaggctgtcgtgacacagcctcctagcgcctctggcacaccaggccagagagtgaccatctcctgtagcggcagcagcagcaacatcggcagcaacaccgtgaactggtatcagcaggtgcccggcaccgctcccaagctgctgatctacagcaacaaccagcggcccagcggcgtgcccgatagattttctggcagcaagagcggcaccagcgccagcctggctatctctggactccagtccgaggacgaggccgactactattgcgccgcctgggacgatagcctgaacggctgggtgttcggcggaggcaccaagctgacagtgctgctcgaggacctgaagaacgtgttcccacctgaggtggccgtgttcgagcctagcgaggccgagatcagccacacccagaaagccaccctcgtgtgcctggctaccggcttctaccccgaccatgtggaactgtcttggtgggtcaacggcaaagaggtgcacagcggcgtgtgtaccgacccccagccactgaaagaacagcccgccctgaacgacagccggtactgcctgagcagcagactgagagtgtccgccaccttctggcagaacccccggaaccacttcagatgccaggtgcagttctacggcctgagcgagaacgacgagtggacccaggacagagccaagcccgtgacccagatcgtgtctgccgaagcctggggcagagccgattgcggctttaccagcgagagctaccagcagggcgtgctgagcgccaccatcctgtacgagatcctgctgggcaaggccaccctgtacgccgtgctggtgtctgccctggtgctgatggctatggtcaagcggaaggacagccggggaagggccaagcgatctggatctggagcaacaaacttctcactactcaaacaagcaggtgacgtggaggagaatcccgggcctactagtatggactggatttggcgcatccttttccttgtcggcgctgctaccggcgcgcattccttcgaacagatgcaactggtgcagagcggagccgaagtgaaagagcctggcgagagcctgcggatctcctgcaagggcagcggctacagcttcaccaatttctggatctcttgggtgcgccagatgcccggcaagggcctggaatggatgggcagagtggaccccggctactcctacagcacctacagccctagcttccagggccacgtgaccatcagcgccgacaagagcaccagcaccgcctacctccagtggaacagcctgaaggccagcgacaccgccatgtactactgcgccagagtgcagtacagcggctattacgattggttcgacccctggggccagggcacactcgtgacagtgtcaagcacgcgtatccagaaccctgatcctgccgtgtaccagctgcgggatagcaagagcagcgacaagagcgtgtgtctgttcaccgacttcgacagccagaccaacgtgtcccagagcaaggactccgacgtgtacatcaccgataagtgcgtgctggacatgcggagcatggacttcaagagcaactccgccgtggcctggtccaacaagtccgatttcgcctgcgccaacgccttcaacaacagcattatccccgaggacacattcttcccaagccccgagagcagctgcgacgtgaagctggtggaaaagagcttcgagacagacaccaacctgaacttccagaacctgagcgtgatcggcttcagaatcctgctgctgaaagtggccggctttaacctgctgatgaccctgcggctgtggtccagc

SEQ ID NO: 1947 - DNA, 2295 bp, Artificial Sequence
  Synthetic Polynucloetide
atggccttaccagtgaccgccttgctcctgccgctggccttgctgctccacgccgccaggccggaagtgcagctggttgaatctggcggaggactggttcagcctggcggatctctgagactgtcttgtgccgccagcggcttcagcttcagcgacttttggatgagctgggtccgacaggcccctggcaaaggacttgaatgggtcgccacaatcagccaggccggcagcgagaaggactacgtggactctgtgaagggcagattcaccatcagccgggacaacgccaagaagtccctgtacctccagatgaacagcctgagagccgaggacaccgccgtgtactattgtgcctctggcgtgtacagcttcgactacagaggccagggcaccctggtcacagtctcttctggtaccggcggaggcggatctggcggcggaggtagcggtggcggaggatctgaattcgaacagaaactcatcagtgaagaagacctggaattcgacatccagatgacccagagccccagcacactgagcgccagcgtgggcgacagagtgaccatcacctgtcgggccagccagaacatcaacaagtggctggcctggtatcagcagaggcccggaaaagccccccagctgctgatctacaaggccagcagcctggaaagcggcgtgcccagcagattttctggcagcggctctggcaccgagtacaccctgaccatcagctccctccagcccgacgacttcgccacctactactgccagcagtacaacagctacgccaccttcggccagggcaccaaggtggaaatcaagagactcgaggacctgaagaacgtgttcccacctgaggtggccgtgttcgagcctagcgaggccgagatcagccacacccagaaagccaccctcgtgtgcctggctaccggcttctaccccgaccatgtggaactgtcttggtgggtcaacggcaaagaggtgcacagcggcgtgtgtaccgacccccagccactgaaagaacagcccgccctgaacgacagccggtactgcctgagcagcagactgagagtgtccgccaccttctggcagaacccccggaaccacttcagatgccaggtgcagttctacggcctgagcgagaacgacgagtggacccaggacagagccaagcccgtgacccagatcgtgtctgccgaagcctggggcagagccgattgcggctttaccagcgagagctaccagcagggcgtgctgagcgccaccatcctgtacgagatcctgctgggcaaggccaccctgtacgccgtgctggtgtctgccctggtgctgatggctatggtcaagcggaaggacagccggggaagggccaagcgatctggatctggagcaacaaacttctcactactcaaacaagcaggtgacgtggaggagaatcccgggcctactagtatggactggatttggcgcatccttttccttgtcggcgctgctaccggcgcgcattccttcgaacaggtgcagctggtgcagtctggggccgaagtgaagaagcctggcgagagcctgaagatcagctgcaagggctccggctacaacttctctaacaagtggatcggctgggtgcgccagctgcctggcagaggactggaatggatcgccatcatctaccccggctacagcgacatcacctacagccccagcttccagggccgcgtgacaatcagcgccgacaccagcatcaacaccgcctacctgcactggcacagcctgaaggccagcgacaccgccatgtactactgcgtgcggcatacagccctggctggcttcgattattggggcctgggcaccctcgtgaccgtgtctagtacgcgtatccagaaccctgatcctgccgtgtaccagctgcgggatagcaagagcagcgacaagagcgtgtgtctgttcaccgacttcgacagccagaccaacgtgtcccagagcaaggactccgacgtgtacatcaccgataagtgcgtgctggacatgcggagcatggacttcaagagcaactccgccgtggcctggtccaacaagtccgatttcgcctgcgccaacgccttcaacaacagcattatccccgaggacacattcttcccaagccccgagagcagctgcgacgtgaagctggtggaaaagagcttcgagacagacaccaacctgaacttccagaacctgagcgtgatcggcttcagaatcctgctgctgaaagtggccggctttaacctgctgatgaccctgcggctgtggtccagc

SEQ ID NO: 1948 - DNA, 2268 bp, Artificial Sequence
  Synthetic Polynucloetide
atggccttaccagtgaccgccttgctcctgccgctggccttgctgctccacgccgccaggccggaagtgcagctggttgaatctggcggaggactggttcagcctggcggatctctgagactgtcttgtgccgccagcggcttcagcttcagcgacttttggatgagctgggtccgacaggcccctggcaaaggacttgaatgggtcgccacaatcagccaggccggcagcgagaaggactacgtggactctgtgaagggcagattcaccatcagccgggacaacgccaagaagtccctgtacctccagatgaacagcctgagagccgaggacaccgccgtgtactattgtgcctctggcgtgtacagcttcgactacagaggccagggcaccctggtcacagtctcttctggtaccggcggaggcggatctggcggcggaggtagcggtggcggaggatctgaattcatcgtgctgacacagagccctgcttctctggccgtgtctctgggacagagagccaccatcagctgtagagccagcgagagcgtggacaactacggcaacaccttcatgcactggtatcagcagaagcccggccagcctcctaagctgctgatctacagagccagcaacctggaaagcggcatccccgccagattttctggcagcggcagcagaaccgacttcaccctgaccatcaatcccgtggaagccgacgacgtggcaacctactactgccagcagagcaacgaggaccctcctacatttggagccggcaccaagctggaactgaaactcgaggacctgaagaacgtgttcccacctgaggtggccgtgttcgagcctagcgaggccgagatcagccacacccagaaagccaccctcgtgtgcctggctaccggcttctaccccgaccatgtggaactgtcttggtgggtcaacggcaaagaggtgcacagcggcgtgtgtaccgacccccagccactgaaagaacagcccgccctgaacgacagccggtactgcctgagcagcagactgagagtgtccgccaccttctggcagaacccccggaaccacttcagatgccaggtgcagttctacggcctgagcgagaacgacgagtggacccaggacagagccaagcccgtgacccagatcgtgtctgccgaagcctggggcagagccgattgcggctttaccagcgagagctaccagcagggcgtgctgagcgccaccatcctgtacgagatcctgctgggcaaggccaccctgtacgccgtgctggtgtctgccctggtgctgatggctatggtcaagcggaaggacagccggggaagggccaagcgatctggatctggagcaacaaacttctcactactcaaacaagcaggtgacgtggaggagaatcccgggcctactagtatggactggatttggcgcatccttttccttgtcggcgctgctaccggcgcgcattccttcgaacagattcagctggtgcagtctggccccgagctgaagaaacctggcgagacagtgaagatcagctgcaaggccagcggctacatcttcaccaattacggcatgaactgggtcaagcaggcccctggcaagagcttcaagtggatgggctggatcaacacctacaccggcgagagcacatacagcgccgacttcaagggcagattcgccttcagcctggaaaccagcgccagcacagcctacctgcacatcaacgacctgaagaacgaggacaccgccacctacttttgcgccagaagcggcggctacgaccctatggattattggggccagggcaccagcgtgaccgtttcttctacgcgtatccagaaccctgatcctgccgtgtaccagctgcgggatagcaagagcagcgacaagagcgtgtgtctgttcaccgacttcgacagccagaccaacgtgtcccagagcaaggactccgacgtgtacatcaccgataagtgcgtgctggacatgcggagcatggacttcaagagcaactccgccgtggcctggtccaacaagtccgatttcgcctgcgccaacgccttcaacaacagcattatccccgaggacacattcttcccaagccccgagagcagctgcgacgtgaagctggtggaaaagagcttcgagacagacaccaacctgaacttccagaacctgagcgtgatcggcttcagaatcctgctgctgaaagtggccggctttaacctgctgatgaccctgcggctgtggtccagc

SEQ ID NO: 1949 - DNA, 2265 bp, Artificial Sequence
  Synthetic Polynucloetide
atggccttaccagtgaccgccttgctcctgccgctggccttgctgctccacgccgccaggccggaagtgcagctggttgaatctggcggaggactggttcagcctggcggatctctgagactgtcttgtgccgccagcggcttcagcttcagcgacttttggatgagctgggtccgacaggcccctggcaaaggacttgaatgggtcgccacaatcagccaggccggcagcgagaaggactacgtggactctgtgaagggcagattcaccatcagccgggacaacgccaagaagtccctgtacctccagatgaacagcctgagagccgaggacaccgccgtgtactattgtgcctctggcgtgtacagcttcgactacagaggccagggcaccctggtcacagtctcttctggtaccggcggaggcggatctggcggcggaggtagcggtggcggaggatctgaattcgagatcgtgctgacacagagccctggcaccctgagcctgtctccaggcgaaagagccacactgagctgtcgggccagccagagcgtgtccaatacctacctggcctggtatcaccagaggcccggacaggctccccggctgctgatctatggcgcttctagcagagccaccggcatccccgatagattcagcggctctggcagcggcaccgacttcgccctgacaatcagctccctggaacccgaggacttcgccgtgtactactgccagcagtacagcaactcctggaccttcggccagggcaccaaggtggaaatcaagagactcgaggacctgaagaacgtgttcccacctgaggtggccgtgttcgagcctagcgaggccgagatcagccacacccagaaagccaccctcgtgtgcctggctaccggcttctaccccgaccatgtggaactgtcttggtgggtcaacggcaaagaggtgcacagcggcgtgtgtaccgacccccagccactgaaagaacagcccgccctgaacgacagccggtactgcctgagcagcagactgagagtgtccgccaccttctggcagaacccccggaaccacttcagatgccaggtgcagttctacggcctgagcgagaacgacgagtggacccaggacagagccaagcccgtgacccagatcgtgtctgccgaagcctggggcagagccgattgcggctttaccagcgagagctaccagcagggcgtgctgagcgccaccatcctgtacgagatcctgctgggcaaggccaccctgtacgccgtgctggtgtctgccctggtgctgatggctatggtcaagcggaaggacagccggggaagggccaagcgatctggatctggagcaacaaacttctcactactcaaacaagcaggtgacgtggaggagaatcccgggcctactagtatggactggatttggcgcatccttttccttgtcggcgctgctaccggcgcgcattccttcgaacaggtgcaactggtggaatctggcgggggagtggtgcagcctggcagaagcctgagactgtcttgtgccgccagcggcttcaccttcagcagctacgacatgcactgggtgcgccaggcccctggcaaaggactggaatgggtggccgtgatctcctacgacggcaccaacgagtattacgccgacagcgtgaagggccggttcaccatctccagagacaccagcaagaacaccctgtacctccagatgaacagcctgcgggccgaggacacagccgtgtattattgcgccagagagcggtacttcgactggtccttcgactactggggccagggaaccctggtgtccgtgtctagtacgcgtatccagaaccctgatcctgccgtgtaccagctgcgggatagcaagagcagcgacaagagcgtgtgtctgttcaccgacttcgacagccagaccaacgtgtcccagagcaaggactccgacgtgtacatcaccgataagtgcgtgctggacatgcggagcatggacttcaagagcaactccgccgtggcctggtccaacaagtccgatttcgcctgcgccaacgccttcaacaacagcattatccccgaggacacattcttcccaagccccgagagcagctgcgacgtgaagctggtggaaaagagcttcgagacagacaccaacctgaacttccagaacctgagcgtgatcggcttcagaatcctgctgctgaaagtggccggctttaacctgctgatgaccctgcggctgtggtccagc

SEQ ID NO: 1950 - DNA, 2262 bp, Artificial Sequence
  Synthetic Polynucloetide
atggccttaccagtgaccgccttgctcctgccgctggccttgctgctccacgccgccaggccggaagtgcagctggttgaatctggcggaggactggttcagcctggcggatctctgagactgtcttgtgccgccagcggcttcagcttcagcgacttttggatgagctgggtccgacaggcccctggcaaaggacttgaatgggtcgccacaatcagccaggccggcagcgagaaggactacgtggactctgtgaagggcagattcaccatcagccgggacaacgccaagaagtccctgtacctccagatgaacagcctgagagccgaggacaccgccgtgtactattgtgcctctggcgtgtacagcttcgactacagaggccagggcaccctggtcacagtctcttctggtaccggcggaggcggatctggcggcggaggtagcggtggcggaggatctgaattcgagctgacacaggaccctgctgtgtctgttgccctgggccagacagtgcggattacctgtcaaggcgacagcctgagaagcaactacgccaactggtatcagcagaagcccggacaggctcccgtgctggttatctacggccagaacaacagacccagcggcatccccgatagattcagcggctctagctctggcaataccgccagcctgacaatcactggcgctcaggctgccgatgaggccgactactactgcgatagcagagtgtccaccggcaatcacgtggtgtttggcggcggaacaaagctgacagtgctcggacaactcgaggacctgaagaacgtgttcccacctgaggtggccgtgttcgagcctagcgaggccgagatcagccacacccagaaagccaccctcgtgtgcctggctaccggcttctaccccgaccatgtggaactgtcttggtgggtcaacggcaaagaggtgcacagcggcgtgtgtaccgacccccagccactgaaagaacagcccgccctgaacgacagccggtactgcctgagcagcagactgagagtgtccgccaccttctggcagaacccccggaaccacttcagatgccaggtgcagttctacggcctgagcgagaacgacgagtggacccaggacagagccaagcccgtgacccagatcgtgtctgccgaagcctggggcagagccgattgcggctttaccagcgagagctaccagcagggcgtgctgagcgccaccatcctgtacgagatcctgctgggcaaggccaccctgtacgccgtgctggtgtctgccctggtgctgatggctatggtcaagcggaaggacagccggggaagggccaagcgatctggatctggagcaacaaacttctcactactcaaacaagcaggtgacgtggaggagaatcccgggcctactagtatggactggatttggcgcatccttttccttgtcggcgctgctaccggcgcgcattccttcgaagaagttcagctggtgcagagcggagccgaagtgaagaaacctggggcctctgtgaaggtgtcctgcaaggcttccggctacacctttaccagctacgccatgcactgggtccgacaggcacctggacaacggcttgaatggatgggctggatcaacgccggcaacggcaacaccaagtacagccagaaattccagggccgcgtgaccatcaccagagatacaagcgccagcaccgcctacatggaactgtctagcctgagatccgaggacaccgccgtgtactactgtgccagagacatcagctacggcagcttcgactattggggccagggcacactggtcaccgttagctctacgcgtatccagaaccctgatcctgccgtgtaccagctgcgggatagcaagagcagcgacaagagcgtgtgtctgttcaccgacttcgacagccagaccaacgtgtcccagagcaaggactccgacgtgtacatcaccgataagtgcgtgctggacatgcggagcatggacttcaagagcaactccgccgtggcctggtccaacaagtccgatttcgcctgcgccaacgccttcaacaacagcattatccccgaggacacattcttcccaagccccgagagcagctgcgacgtgaagctggtggaaaagagcttcgagacagacaccaacctgaacttccagaacctgagcgtgatcggcttcagaatcctgctgctgaaagtggccggctttaacctgctgatgaccctgcggctgtggtccagc

SEQ ID NO: 1951 - DNA, 2268 bp, Artificial Sequence
  Synthetic Polynucloetide
atggccttaccagtgaccgccttgctcctgccgctggccttgctgctccacgccgccaggccggaagtgcagctggttgaatctggcggaggactggttcagcctggcggatctctgagactgtcttgtgccgccagcggcttcagcttcagcgacttttggatgagctgggtccgacaggcccctggcaaaggacttgaatgggtcgccacaatcagccaggccggcagcgagaaggactacgtggactctgtgaagggcagattcaccatcagccgggacaacgccaagaagtccctgtacctccagatgaacagcctgagagccgaggacaccgccgtgtactattgtgcctctggcgtgtacagcttcgactacagaggccagggcaccctggtcacagtctcttctggtaccggcggaggcggatctggcggcggaggtagcggtggcggaggatctgaattcgacatcgtgctgacacagacaccagccacactgagcgtgacacctggcgattctgtgtccctgagctgtagagccagccagagcatcagcaacaacctgcactggtatcagcagaagtcccacgagagccccagactgctgattaagaacgccagccagtctatcagcggcatccccagcaagtttagcggctctggcagcggcaccgacttcaccctgagaatcaacagcgtggaaaccgaggacttcgggatgtacttctgccagcagagcaatagctggccctacacatttggctccggcaccaagctggaaatcaaactcgaggacctgaagaacgtgttcccacctgaggtggccgtgttcgagcctagcgaggccgagatcagccacacccagaaagccaccctcgtgtgcctggctaccggcttctaccccgaccatgtggaactgtcttggtgggtcaacggcaaagaggtgcacagcggcgtgtgtaccgacccccagccactgaaagaacagcccgccctgaacgacagccggtactgcctgagcagcagactgagagtgtccgccaccttctggcagaacccccggaaccacttcagatgccaggtgcagttctacggcctgagcgagaacgacgagtggacccaggacagagccaagcccgtgacccagatcgtgtctgccgaagcctggggcagagccgattgcggctttaccagcgagagctaccagcagggcgtgctgagcgccaccatcctgtacgagatcctgctgggcaaggccaccctgtacgccgtgctggtgtctgccctggtgctgatggctatggtcaagcggaaggacagccggggaagggccaagcgatctggatctggagcaacaaacttctcactactcaaacaagcaggtgacgtggaggagaatcccgggcctactagtatggactggatttggcgcatccttttccttgtcggcgctgctaccggcgcgcattccttcgaacaagtgaagctgcaacagagcggacccgagctggttaagccaggcgcttccgtgaagattagctgcaaggccagcggctacagcttcaccggctactacatgcactgggtcaagcagagccacggcaacatcctggactggatcggctacatctacccctacaacggcgtgtccagctacaaccagaagttcaagggcaaagccactctgaccgtggacaagagcagcagcaccgcctacatggaactgagaagcctgaccagcgaggacagcgccgtgtactattgtgccagagagcggggcctgtaccagctcagagcaatggattattggggccagggcaccagcgtgaccgtttcttctacgcgtatccagaaccctgatcctgccgtgtaccagctgcgggatagcaagagcagcgacaagagcgtgtgtctgttcaccgacttcgacagccagaccaacgtgtcccagagcaaggactccgacgtgtacatcaccgataagtgcgtgctggacatgcggagcatggacttcaagagcaactccgccgtggcctggtccaacaagtccgatttcgcctgcgccaacgccttcaacaacagcattatccccgaggacacattcttcccaagccccgagagcagctgcgacgtgaagctggtggaaaagagcttcgagacagacaccaacctgaacttccagaacctgagcgtgatcggcttcagaatcctgctgctgaaagtggccggctttaacctgctgatgaccctgcggctgtggtccagc

SEQ ID NO: 1952 - DNA, 2241 bp, Artificial Sequence
  Synthetic Polynucloetide
atggccttaccagtgaccgccttgctcctgccgctggccttgctgctccacgccgccaggccggaagtgcagctggttgaatctggcggaggactggttcagcctggcggatctctgagactgtcttgtgccgccagcggcttcagcttcagcgacttttggatgagctgggtccgacaggcccctggcaaaggacttgaatgggtcgccacaatcagccaggccggcagcgagaaggactacgtggactctgtgaagggcagattcaccatcagccgggacaacgccaagaagtccctgtacctccagatgaacagcctgagagccgaggacaccgccgtgtactattgtgcctctggcgtgtacagcttcgactacagaggccagggcaccctggtcacagtctcttctggtaccggcggaggcggatctggcggcggaggtagcggtggcggaggatctgaattcgacatcgtgatgacacagacccctgccatcatgagcgcctctccaggccagaaagtgaccatcacatgtagcgccagcagcagcgtgaactacatgcactggtatcagcagaagctgggcagcagccccaagctgtggatctacgataccagcaaactggcccctggcgtgccagccagattttctggttctggcagcggcaccagctacagcctgacaatcagcagcatggaagccgaggatgccgccagctacttctgccatcagtggtctagctacccctacacctttggctccggcaccaagctggaaatcaaactcgaggacctgaagaacgtgttcccacctgaggtggccgtgttcgagcctagcgaggccgagatcagccacacccagaaagccaccctcgtgtgcctggctaccggcttctaccccgaccatgtggaactgtcttggtgggtcaacggcaaagaggtgcacagcggcgtgtgtaccgacccccagccactgaaagaacagcccgccctgaacgacagccggtactgcctgagcagcagactgagagtgtccgccaccttctggcagaacccccggaaccacttcagatgccaggtgcagttctacggcctgagcgagaacgacgagtggacccaggacagagccaagcccgtgacccagatcgtgtctgccgaagcctggggcagagccgattgcggctttaccagcgagagctaccagcagggcgtgctgagcgccaccatcctgtacgagatcctgctgggcaaggccaccctgtacgccgtgctggtgtctgccctggtgctgatggctatggtcaagcggaaggacagccggggaagggccaagcgatctggatctggagcaacaaacttctcactactcaaacaagcaggtgacgtggaggagaatcccgggcctactagtatggactggatttggcgcatccttttccttgtcggcgctgctaccggcgcgcattccttcgaagaagttcagctccaagagtctggccccgacctggtcaagcctagccaaagcctgagcctgacctgtaccgtgaccggctacagcatcacaagcggctatggatggcactggatcagacagttccccggcaacaaactggaatggatgggctacatccactacagcggcagcaccacctacaatcccagcctgaagtcccggatcagcatcagcagagacaccagcaagaaccagttcttcctgcaactgaacagcgtgaccaccgaggacaccgccacctactattgtgctcggagcctgagatattggggccagggcacaaccctgaccgtgtcatctacgcgtatccagaaccctgatcctgccgtgtaccagctgcgggatagcaagagcagcgacaagagcgtgtgtctgttcaccgacttcgacagccagaccaacgtgtcccagagcaaggactccgacgtgtacatcaccgataagtgcgtgctggacatgcggagcatggacttcaagagcaactccgccgtggcctggtccaacaagtccgatttcgcctgcgccaacgccttcaacaacagcattatccccgaggacacattcttcccaagccccgagagcagctgcgacgtgaagctggtggaaaagagcttcgagacagacaccaacctgaacttccagaacctgagcgtgatcggcttcagaatcctgctgctgaaagtggccggctttaacctgctgatgaccctgcggctgtggtccagc

SEQ ID NO: 1953 - DNA, 2250 bp, Artificial Sequence
  Synthetic Polynucloetide
atggccttaccagtgaccgccttgctcctgccgctggccttgctgctccacgccgccaggccggaagtgcagctggttgaatctggcggaggactggttcagcctggcggatctctgagactgtcttgtgccgccagcggcttcagcttcagcgacttttggatgagctgggtccgacaggcccctggcaaaggacttgaatgggtcgccacaatcagccaggccggcagcgagaaggactacgtggactctgtgaagggcagattcaccatcagccgggacaacgccaagaagtccctgtacctccagatgaacagcctgagagccgaggacaccgccgtgtactattgtgcctctggcgtgtacagcttcgactacagaggccagggcaccctggtcacagtctcttctggtaccggcggaggcggatctggcggcggaggtagcggtggcggaggatctgaattcgacatccagatgacacagagccctagcagcctgtctgccagcgtgggagacagagtgaccatcacctgtagcgccaccagcagcatcagctacatgcactggtatcagcagaagcccggcaaggcccctaaaggctggatctacgataccagcaaactggcccacggcgtgcccagcagattttctggttctggcagcggcaccgacttcaccctgacaatatctagcctccagcctgaggacttcgccacctactactgccaccagagaagaagctaccccttcaccttcggccagggcaccaaggtggaaatcaaactcgaggacctgaagaacgtgttcccacctgaggtggccgtgttcgagcctagcgaggccgagatcagccacacccagaaagccaccctcgtgtgcctggctaccggcttctaccccgaccatgtggaactgtcttggtgggtcaacggcaaagaggtgcacagcggcgtgtgtaccgacccccagccactgaaagaacagcccgccctgaacgacagccggtactgcctgagcagcagactgagagtgtccgccaccttctggcagaacccccggaaccacttcagatgccaggtgcagttctacggcctgagcgagaacgacgagtggacccaggacagagccaagcccgtgacccagatcgtgtctgccgaagcctggggcagagccgattgcggctttaccagcgagagctaccagcagggcgtgctgagcgccaccatcctgtacgagatcctgctgggcaaggccaccctgtacgccgtgctggtgtctgccctggtgctgatggctatggtcaagcggaaggacagccggggaagggccaagcgatctggatctggagcaacaaacttctcactactcaaacaagcaggtgacgtggaggagaatcccgggcctactagtatggactggatttggcgcatccttttccttgtcggcgctgctaccggcgcgcattccttcgaagaagtgcaactggttcagagcggagccgaagtgaagaaacctggggcctctgtgaaggtgtcctgcaaggcttccggctacacctttaccaatttctggattcactgggtccgacaggctccaggccaaggactggaatggatcggagagatcgaccccagcgacagctacaccaactacaaccagaaattcaaaggccgggtcaccatcaccagagacaccagcacaagcaccgcctacctggaactgagcagcctgagaagcgaggacaccgccgtgtactactgcgccagggaaatcaccaccgtggattattggggccagggaaccctggtcaccgtgtcatctacgcgtatccagaaccctgatcctgccgtgtaccagctgcgggatagcaagagcagcgacaagagcgtgtgtctgttcaccgacttcgacagccagaccaacgtgtcccagagcaaggactccgacgtgtacatcaccgataagtgcgtgctggacatgcggagcatggacttcaagagcaactccgccgtggcctggtccaacaagtccgatttcgcctgcgccaacgccttcaacaacagcattatccccgaggacacattcttcccaagccccgagagcagctgcgacgtgaagctggtggaaaagagcttcgagacagacaccaacctgaacttccagaacctgagcgtgatcggcttcagaatcctgctgctgaaagtggccggctttaacctgctgatgaccctgcggctgtggtccagc

SEQ ID NO: 1954 - DNA, 2271 bp, Artificial Sequence
  Synthetic Polynucloetide
atggccttaccagtgaccgccttgctcctgccgctggccttgctgctccacgccgccaggccggaagtgcagctggttgaatctggcggaggactggttcagcctggcggatctctgagactgtcttgtgccgccagcggcttcagcttcagcgacttttggatgagctgggtccgacaggcccctggcaaaggacttgaatgggtcgccacaatcagccaggccggcagcgagaaggactacgtggactctgtgaagggcagattcaccatcagccgggacaacgccaagaagtccctgtacctccagatgaacagcctgagagccgaggacaccgccgtgtactattgtgcctctggcgtgtacagcttcgactacagaggccagggcaccctggtcacagtctcttctggtaccggcggaggcggatctggcggcggaggtagcggtggcggaggatctgaattcgacatccagatgacacagagccctagcagcctgtctgccagcgtgggagacagagtgaccatcacatgcaaggccagccagggcttcaacaaatacgtggcctggtatcagcagaagcccggcaaggctcctaagctgctgatctactacaccagcacactccagcctggcgtgcccagcagattttctggctctggcagcggcagagactacaccctgacaatatccagcctccagccagaggacttcgccacctactactgtctccagtacggcaacctgctgtacgcctttggacagggcaccaaggtggaaatcaagagactcgaggacctgaagaacgtgttcccacctgaggtggccgtgttcgagcctagcgaggccgagatcagccacacccagaaagccaccctcgtgtgcctggctaccggcttctaccccgaccatgtggaactgtcttggtgggtcaacggcaaagaggtgcacagcggcgtgtgtaccgacccccagccactgaaagaacagcccgccctgaacgacagccggtactgcctgagcagcagactgagagtgtccgccaccttctggcagaacccccggaaccacttcagatgccaggtgcagttctacggcctgagcgagaacgacgagtggacccaggacagagccaagcccgtgacccagatcgtgtctgccgaagcctggggcagagccgattgcggctttaccagcgagagctaccagcagggcgtgctgagcgccaccatcctgtacgagatcctgctgggcaaggccaccctgtacgccgtgctggtgtctgccctggtgctgatggctatggtcaagcggaaggacagccggggaagggccaagcgatctggatctggagcaacaaacttctcactactcaaacaagcaggtgacgtggaggagaatcccgggcctactagtatggactggatttggcgcatccttttccttgtcggcgctgctaccggcgcgcattccttcgaagaagttcagcttgtgcagagcggagccgaagtgaagaaacctggggcctctgtgaaggtgtcctgcaaagccagcggctacacctttaccagctactggatcggctgggtccgacaggctcctggacaaggactggaatggatcggcgacatctatcccggcggaggctacaccaactacaacgagaagttcaagggccgcgtgacaatcaccagagacacctctacaagcaccgcctacctggaactgagcagcctgagaagcgaggacaccgccgtgtactactgcgccagactggatggcagcagctacagaggcgctatggattcttggggccagggcacactggtcaccgtttcttctacgcgtatccagaaccctgatcctgccgtgtaccagctgcgggatagcaagagcagcgacaagagcgtgtgtctgttcaccgacttcgacagccagaccaacgtgtcccagagcaaggactccgacgtgtacatcaccgataagtgcgtgctggacatgcggagcatggacttcaagagcaactccgccgtggcctggtccaacaagtccgatttcgcctgcgccaacgccttcaacaacagcattatccccgaggacacattcttcccaagccccgagagcagctgcgacgtgaagctggtggaaaagagcttcgagacagacaccaacctgaacttccagaacctgagcgtgatcggcttcagaatcctgctgctgaaagtggccggctttaacctgctgatgaccctgcggctgtggtccagc

SEQ ID NO: 1955 - DNA, 2259 bp, Artificial Sequence
  Synthetic Polynucloetide
atggccttaccagtgaccgccttgctcctgccgctggccttgctgctccacgccgccaggccggaagtgcagctggttgaatctggcggaggactggttcagcctggcggatctctgagactgtcttgtgccgccagcggcttcagcttcagcgacttttggatgagctgggtccgacaggcccctggcaaaggacttgaatgggtcgccacaatcagccaggccggcagcgagaaggactacgtggactctgtgaagggcagattcaccatcagccgggacaacgccaagaagtccctgtacctccagatgaacagcctgagagccgaggacaccgccgtgtactattgtgcctctggcgtgtacagcttcgactacagaggccagggcaccctggtcacagtctcttctggtaccggcggaggcggatctggcggcggaggtagcggtggcggaggatctgaattcgacatccagatgacacagagccctagcagcctgtctgccagcgtgggagacagagtgaccatcacctgtagagccagccaggacatccggtactacctgaactggtatcagcagaagcccggcaaggcccctaagctgctgatctatgtggcctccagcctccagagcggagtgccttctagattttctggcagcggctccggcaccgagtttaccctgacagtgtctagcttgcagcccgaggacttcgccacctactactgcctgcaagtgtacagcacccctcggacctttggacagggcaccaaggtggaaatcaaactcgaggacctgaagaacgtgttcccacctgaggtggccgtgttcgagcctagcgaggccgagatcagccacacccagaaagccaccctcgtgtgcctggctaccggcttctaccccgaccatgtggaactgtcttggtgggtcaacggcaaagaggtgcacagcggcgtgtgtaccgacccccagccactgaaagaacagcccgccctgaacgacagccggtactgcctgagcagcagactgagagtgtccgccaccttctggcagaacccccggaaccacttcagatgccaggtgcagttctacggcctgagcgagaacgacgagtggacccaggacagagccaagcccgtgacccagatcgtgtctgccgaagcctggggcagagccgattgcggctttaccagcgagagctaccagcagggcgtgctgagcgccaccatcctgtacgagatcctgctgggcaaggccaccctgtacgccgtgctggtgtctgccctggtgctgatggctatggtcaagcggaaggacagccggggaagggccaagcgatctggatctggagcaacaaacttctcactactcaaacaagcaggtgacgtggaggagaatcccgggcctactagtatggactggatttggcgcatccttttccttgtcggcgctgctaccggcgcgcattccttcgaagaagtgcagcttgttgaatctggcggcggactggctaagcctggcggatctctgagactgtcttgtgccgccagcggcttccggttcaccttcaacaactactacatggactgggtccgacaggcccctggacaaggacttgaatgggtgtccagaatcagcagcagcggcgaccctacttggtacgccgattctgtgaagggcagattcaccatcagcagagagaacgccaagaacaccctgttcctccagatgaactccctgagagccgaggacaccgccgtgtactattgtgcctctctgaccaccggcagcgattcttggggacagggcgtgctggttaccgtgtcatctacgcgtatccagaaccctgatcctgccgtgtaccagctgcgggatagcaagagcagcgacaagagcgtgtgtctgttcaccgacttcgacagccagaccaacgtgtcccagagcaaggactccgacgtgtacatcaccgataagtgcgtgctggacatgcggagcatggacttcaagagcaactccgccgtggcctggtccaacaagtccgatttcgcctgcgccaacgccttcaacaacagcattatccccgaggacacattcttcccaagccccgagagcagctgcgacgtgaagctggtggaaaagagcttcgagacagacaccaacctgaacttccagaacctgagcgtgatcggcttcagaatcctgctgctgaaagtggccggctttaacctgctgatgaccctgcggctgtggtccagc

SEQ ID NO: 1956 - DNA, 2262 bp, Artificial Sequence
  Synthetic Polynucloetide
atggccttaccagtgaccgccttgctcctgccgctggccttgctgctccacgccgccaggccggaagtgcagctggttgaatctggcggaggactggttcagcctggcggatctctgagactgtcttgtgccgccagcggcttcagcttcagcgacttttggatgagctgggtccgacaggcccctggcaaaggacttgaatgggtcgccacaatcagccaggccggcagcgagaaggactacgtggactctgtgaagggcagattcaccatcagccgggacaacgccaagaagtccctgtacctccagatgaacagcctgagagccgaggacaccgccgtgtactattgtgcctctggcgtgtacagcttcgactacagaggccagggcaccctggtcacagtctcttctggtaccggcggaggcggatctggcggcggaggtagcggtggcggaggatctgaattcgagatcgtgatgacacagagccccgccacactgagtgtgtctccaggcgaaagagccacactgtcctgtagagccagccagagcgtgtccagaaacctggcctggtatcagcagaagcctggacaggctccccggctgttgatctacggcgcttctacaagagccaccggcattcccgccagattttctggctctggcagcggcaccgagttcaccctgacaatcggaagcctccagagcgaggacttcgccgtgtactactgccagcagtacaagacctggcctcggacctttggacagggcaccaacgtggaaatcaaactcgaggacctgaagaacgtgttcccacctgaggtggccgtgttcgagcctagcgaggccgagatcagccacacccagaaagccaccctcgtgtgcctggctaccggcttctaccccgaccatgtggaactgtcttggtgggtcaacggcaaagaggtgcacagcggcgtgtgtaccgacccccagccactgaaagaacagcccgccctgaacgacagccggtactgcctgagcagcagactgagagtgtccgccaccttctggcagaacccccggaaccacttcagatgccaggtgcagttctacggcctgagcgagaacgacgagtggacccaggacagagccaagcccgtgacccagatcgtgtctgccgaagcctggggcagagccgattgcggctttaccagcgagagctaccagcagggcgtgctgagcgccaccatcctgtacgagatcctgctgggcaaggccaccctgtacgccgtgctggtgtctgccctggtgctgatggctatggtcaagcggaaggacagccggggaagggccaagcgatctggatctggagcaacaaacttctcactactcaaacaagcaggtgacgtggaggagaatcccgggcctactagtatggactggatttggcgcatccttttccttgtcggcgctgctaccggcgcgcattccttcgaacaagttcagctgcaacaatggggagccggcctgctgaagcctagcgaaacactgtctctgacctgcgccgtgttcggcggctctttcagcggctactactggtcctggatcagacagcctcctggcaaaggactggaatggatcggcgagatcaaccaccggggcaacaccaacgacaaccccagcctgaaaagcagagtgaccatcagcgtggacaccagcaagaaccagttcgccctgaagctgagcagcgtgacagccgctgataccgccgtgtattattgcgccagagagcggggctacacctacggcaatttcgatcactggggccagggcaccctggtcacagtttcttctacgcgtatccagaaccctgatcctgccgtgtaccagctgcgggatagcaagagcagcgacaagagcgtgtgtctgttcaccgacttcgacagccagaccaacgtgtcccagagcaaggactccgacgtgtacatcaccgataagtgcgtgctggacatgcggagcatggacttcaagagcaactccgccgtggcctggtccaacaagtccgatttcgcctgcgccaacgccttcaacaacagcattatccccgaggacacattcttcccaagccccgagagcagctgcgacgtgaagctggtggaaaagagcttcgagacagacaccaacctgaacttccagaacctgagcgtgatcggcttcagaatcctgctgctgaaagtggccggctttaacctgctgatgaccctgcggctgtggtccagc

SEQ ID NO: 1957 - DNA, 2265 bp, Artificial Sequence
  Synthetic Polynucloetide
atggccttaccagtgaccgccttgctcctgccgctggccttgctgctccacgccgccaggccggaagtgcagctggttgaatctggcggaggactggttcagcctggcggatctctgagactgtcttgtgccgccagcggcttcagcttcagcgacttttggatgagctgggtccgacaggcccctggcaaaggacttgaatgggtcgccacaatcagccaggccggcagcgagaaggactacgtggactctgtgaagggcagattcaccatcagccgggacaacgccaagaagtccctgtacctccagatgaacagcctgagagccgaggacaccgccgtgtactattgtgcctctggcgtgtacagcttcgactacagaggccagggcaccctggtcacagtctcttctggtaccggcggaggcggatctggcggcggaggtagcggtggcggaggatctgaattcgagatcgtgatgacccctagcagcgccacactgagtgtgtctccaggcgaaagagccacactgtcctgtagagccagccagagcgtgtccagaaacctggcctggtatcagcagaagcctggacaggctccccggctgttgatctacggcgcttctacaagagccaccggcattcccgccagattttctggctctggcagcggcaccgagttcaccctgacaatctctagcctccagagcgaggacttcgccgtgtactactgccaccagtacagcaactggatgtgcagcttcggccagggcaccaagctggaaatcaaactcgaggacctgaagaacgtgttcccacctgaggtggccgtgttcgagcctagcgaggccgagatcagccacacccagaaagccaccctcgtgtgcctggctaccggcttctaccccgaccatgtggaactgtcttggtgggtcaacggcaaagaggtgcacagcggcgtgtgtaccgacccccagccactgaaagaacagcccgccctgaacgacagccggtactgcctgagcagcagactgagagtgtccgccaccttctggcagaacccccggaaccacttcagatgccaggtgcagttctacggcctgagcgagaacgacgagtggacccaggacagagccaagcccgtgacccagatcgtgtctgccgaagcctggggcagagccgattgcggctttaccagcgagagctaccagcagggcgtgctgagcgccaccatcctgtacgagatcctgctgggcaaggccaccctgtacgccgtgctggtgtctgccctggtgctgatggctatggtcaagcggaaggacagccggggaagggccaagcgatctggatctggagcaacaaacttctcactactcaaacaagcaggtgacgtggaggagaatcccgggcctactagtatggactggatttggcgcatccttttccttgtcggcgctgctaccggcgcgcattccttcgaagaagttcagctccttgagtcaggtggcggcctggttcaacctggcggatctctgagactgagctgtgccgccagcggcttcacctttagcagatacgccatgaactgggtccgacaggcccctggcaaaggactggaatgggtgtccggcatctctggaagcggcggcagaacctactacgccgattctgtgaagggcagattcaccatcagccgggacaacagcaagaacaccctgtacctccagatgaacagcctgagagccgaggacacagccgtgtattattgcgccaaggaccgggacttttggagcggcccttttgactattggggccagggaaccctggtcaccgttagctctacgcgtatccagaaccctgatcctgccgtgtaccagctgcgggatagcaagagcagcgacaagagcgtgtgtctgttcaccgacttcgacagccagaccaacgtgtcccagagcaaggactccgacgtgtacatcaccgataagtgcgtgctggacatgcggagcatggacttcaagagcaactccgccgtggcctggtccaacaagtccgatttcgcctgcgccaacgccttcaacaacagcattatccccgaggacacattcttcccaagccccgagagcagctgcgacgtgaagctggtggaaaagagcttcgagacagacaccaacctgaacttccagaacctgagcgtgatcggcttcagaatcctgctgctgaaagtggccggctttaacctgctgatgaccctgcggctgtggtccagc

SEQ ID NO: 1958 - DNA, 2280 bp, Artificial Sequence
  Synthetic Polynucloetide
atggccttaccagtgaccgccttgctcctgccgctggccttgctgctccacgccgccaggccggaagtgcagctggttgaatctggcggaggactggttcagcctggcggatctctgagactgtcttgtgccgccagcggcttcagcttcagcgacttttggatgagctgggtccgacaggcccctggcaaaggacttgaatgggtcgccacaatcagccaggccggcagcgagaaggactacgtggactctgtgaagggcagattcaccatcagccgggacaacgccaagaagtccctgtacctccagatgaacagcctgagagccgaggacaccgccgtgtactattgtgcctctggcgtgtacagcttcgactacagaggccagggcaccctggtcacagtctcttctggtaccggcggaggcggatctggcggcggaggtagcggtggcggaggatctgaattcgacatccagatgacccagagccccagcagcctgtctgccagcgtgggcgacagagtgaccatcacatgcaaggccagcaagaacatcagaagctacctggcctggtatcagcagaagcccggcaaggcccccaagctgctgatctacagcggcagcacactgcacagcggcgtgcccagcagattttccggctctggcagcggcaccgacttcaccctgaccatctctagcctccagcccgaggacttcgccacctactactgccagcagcaccacgagtaccccctgacattcggccagggcaccaaggtggaaatcaagagactcgaggacctgaagaacgtgttcccacctgaggtggccgtgttcgagcctagcgaggccgagatcagccacacccagaaagccaccctcgtgtgcctggctaccggcttctaccccgaccatgtggaactgtcttggtgggtcaacggcaaagaggtgcacagcggcgtgtgtaccgacccccagccactgaaagaacagcccgccctgaacgacagccggtactgcctgagcagcagactgagagtgtccgccaccttctggcagaacccccggaaccacttcagatgccaggtgcagttctacggcctgagcgagaacgacgagtggacccaggacagagccaagcccgtgacccagatcgtgtctgccgaagcctggggcagagccgattgcggctttaccagcgagagctaccagcagggcgtgctgagcgccaccatcctgtacgagatcctgctgggcaaggccaccctgtacgccgtgctggtgtctgccctggtgctgatggctatggtcaagcggaaggacagccggggaagggccaagcgatctggatctggagcaacaaacttctcactactcaaacaagcaggtgacgtggaggagaatcccgggcctactagtatggactggatttggcgcatccttttccttgtcggcgctgctaccggcgcgcattccttcgaacaggtgcaactccaggaatctggccccggactcgtgaagcccagcgagacactgagcctgacctgtaccgtgtccggctacaccatcaccagcggctacgactggtcctggatcagacagcctcctggcaagggcctggaatggatcggctacatcaactacggcggctccaccaactacaagcccagcctgggaagccgcgtgacaatcagcgtggacacctccaagaaccagttcagcctgaagctgagcagcgtgacagccgccgataccgccgtgtactactgcgcccggtacaacgagtacaagagctacatctacgattggtacttcgacttctggggccagggaaccctcgtgaccgtgtctagtacgcgtatccagaaccctgatcctgccgtgtaccagctgcgggatagcaagagcagcgacaagagcgtgtgtctgttcaccgacttcgacagccagaccaacgtgtcccagagcaaggactccgacgtgtacatcaccgataagtgcgtgctggacatgcggagcatggacttcaagagcaactccgccgtggcctggtccaacaagtccgatttcgcctgcgccaacgccttcaacaacagcattatccccgaggacacattcttcccaagccccgagagcagctgcgacgtgaagctggtggaaaagagcttcgagacagacaccaacctgaacttccagaacctgagcgtgatcggcttcagaatcctgctgctgaaagtggccggctttaacctgctgatgaccctgcggctgtggtccagc

SEQ ID NO: 1959 - DNA, 2286 bp, Artificial Sequence
  Synthetic Polynucloetide
atggccttaccagtgaccgccttgctcctgccgctggccttgctgctccacgccgccaggccggaagtgcagctggttgaatctggcggaggactggttcagcctggcggatctctgagactgtcttgtgccgccagcggcttcagcttcagcgacttttggatgagctgggtccgacaggcccctggcaaaggacttgaatgggtcgccacaatcagccaggccggcagcgagaaggactacgtggactctgtgaagggcagattcaccatcagccgggacaacgccaagaagtccctgtacctccagatgaacagcctgagagccgaggacaccgccgtgtactattgtgcctctggcgtgtacagcttcgactacagaggccagggcaccctggtcacagtctcttctggtaccggcggaggcggatctggcggcggaggtagcggtggcggaggatctgaattccagtctgtggtcacacagcctccatccgtgtctgctgcccctggacagaaagtgaccatctcctgtagcggcagcagcagcaacatcggcaacaactacgtgtcctggtatcagcagctccccggcacagctcccaaactgctgatctacgacaacaacaagcggcccagcggcatccccgatagattttctggcagcaagagcggcaccagcgccacactgggaattaccggacttcagacaggcgacgaggccgactactactgtggcacatgggatggcagcctgtacaccatgcttttcggcggaggcaccaagctgacagtgcttctcgaggacctgaagaacgtgttcccacctgaggtggccgtgttcgagcctagcgaggccgagatcagccacacccagaaagccaccctcgtgtgcctggctaccggcttctaccccgaccatgtggaactgtcttggtgggtcaacggcaaagaggtgcacagcggcgtgtgtaccgacccccagccactgaaagaacagcccgccctgaacgacagccggtactgcctgagcagcagactgagagtgtccgccaccttctggcagaacccccggaaccacttcagatgccaggtgcagttctacggcctgagcgagaacgacgagtggacccaggacagagccaagcccgtgacccagatcgtgtctgccgaagcctggggcagagccgattgcggctttaccagcgagagctaccagcagggcgtgctgagcgccaccatcctgtacgagatcctgctgggcaaggccaccctgtacgccgtgctggtgtctgccctggtgctgatggctatggtcaagcggaaggacagccggggaagggccaagcgatctggatctggagcaacaaacttctcactactcaaacaagcaggtgacgtggaggagaatcccgggcctactagtatggactggatttggcgcatccttttccttgtcggcgctgctaccggcgcgcattccttcgaagaagtgcaactggtggaatctggcggcggactggttaagcctggcggatctctgagactgtcttgtgccgccagcggcttcaccttcagcaatgcctggatgagctgggttcgacaggcccctggaaaaggactggaatgggtcggattcatccggtccaaagcctacggcggcaccacagaatatgccgcctctgtgaagggcagattcaccatcagccgggacgacagcaagtctatcgcctacctccagatgaacaacctgaaaaccgaggacaccgccgtgtactactgcgccagagatggcctgtacagcagctcttggtacgacagcgattactggggccagggcacactggtcacagtgtcatctacgcgtatccagaaccctgatcctgccgtgtaccagctgcgggatagcaagagcagcgacaagagcgtgtgtctgttcaccgacttcgacagccagaccaacgtgtcccagagcaaggactccgacgtgtacatcaccgataagtgcgtgctggacatgcggagcatggacttcaagagcaactccgccgtggcctggtccaacaagtccgatttcgcctgcgccaacgccttcaacaacagcattatccccgaggacacattcttcccaagccccgagagcagctgcgacgtgaagctggtggaaaagagcttcgagacagacaccaacctgaacttccagaacctgagcgtgatcggcttcagaatcctgctgctgaaagtggccggctttaacctgctgatgaccctgcggctgtggtccagc

SEQ ID NO: 1960 - DNA, 2301 bp, Artificial Sequence
  Synthetic Polynucloetide
atggccttaccagtgaccgccttgctcctgccgctggccttgctgctccacgccgccaggccggaagtgcagctggttgaatctggcggaggactggttcagcctggcggatctctgagactgtcttgtgccgccagcggcttcagcttcagcgacttttggatgagctgggtccgacaggcccctggcaaaggacttgaatgggtcgccacaatcagccaggccggcagcgagaaggactacgtggactctgtgaagggcagattcaccatcagccgggacaacgccaagaagtccctgtacctccagatgaacagcctgagagccgaggacaccgccgtgtactattgtgcctctggcgtgtacagcttcgactacagaggccagggcaccctggtcacagtctcttctggtaccggcggaggcggatctggcggcggaggtagcggtggcggaggatctgaattccagtctgtgctgacacagcctcctagtgtgtctggcgctcctggacagagagtgaccatctcttgtaccggcagcagcagcaatatcggagccggctatgacgtgcactggtatcagcagctccctggcacagcccctaaactgctgatcttcggcaacagcaacagacccagcggcgtgcccgatagattcagcggctttaagagcggcacaagcgccagcctggctatcactggactgcaagccgaggacgaggccgactacttctgccagagctacgatagcagcctgagcggcagcggagtgtttggcacaggcaccaaagtgacagtgcttggcctcgaggacctgaagaacgtgttcccacctgaggtggccgtgttcgagcctagcgaggccgagatcagccacacccagaaagccaccctcgtgtgcctggctaccggcttctaccccgaccatgtggaactgtcttggtgggtcaacggcaaagaggtgcacagcggcgtgtgtaccgacccccagccactgaaagaacagcccgccctgaacgacagccggtactgcctgagcagcagactgagagtgtccgccaccttctggcagaacccccggaaccacttcagatgccaggtgcagttctacggcctgagcgagaacgacgagtggacccaggacagagccaagcccgtgacccagatcgtgtctgccgaagcctggggcagagccgattgcggctttaccagcgagagctaccagcagggcgtgctgagcgccaccatcctgtacgagatcctgctgggcaaggccaccctgtacgccgtgctggtgtctgccctggtgctgatggctatggtcaagcggaaggacagccggggaagggccaagcgatctggatctggagcaacaaacttctcactactcaaacaagcaggtgacgtggaggagaatcccgggcctactagtatggactggatttggcgcatccttttccttgtcggcgctgctaccggcgcgcattccttcgaacaaatgcaactggttcaaagcggcggtggcctggtgcaacctggaagaagtctgagactgagctgtgccgccagcggcttcaccttcgatgattacgccatgcactgggtccgacaggcccctggaaaaggactggaatgggtgtccggcatctcctggaatagcggctctatcggctacgccgacagcgtgaagggcagattcaccatcagccgggacaacgccaagaacagcctgtacctccagatgaactccctgagagccgaggatacagccctgtactactgcgccaaggacatccacagcggcagctactacggcctgctgtactacgctatggacgtgtggggccagggcacaaccgtgacagtttcttctacgcgtatccagaaccctgatcctgccgtgtaccagctgcgggatagcaagagcagcgacaagagcgtgtgtctgttcaccgacttcgacagccagaccaacgtgtcccagagcaaggactccgacgtgtacatcaccgataagtgcgtgctggacatgcggagcatggacttcaagagcaactccgccgtggcctggtccaacaagtccgatttcgcctgcgccaacgccttcaacaacagcattatccccgaggacacattcttcccaagccccgagagcagctgcgacgtgaagctggtggaaaagagcttcgagacagacaccaacctgaacttccagaacctgagcgtgatcggcttcagaatcctgctgctgaaagtggccggctttaacctgctgatgaccctgcggctgtggtccagc

SEQ ID NO: 1961 - DNA, 2301 bp, Artificial Sequence
  Synthetic Polynucloetide
atggccttaccagtgaccgccttgctcctgccgctggccttgctgctccacgccgccaggccggaagtgcagctggttgaatctggcggaggactggttcagcctggcggatctctgagactgtcttgtgccgccagcggcttcagcttcagcgacttttggatgagctgggtccgacaggcccctggcaaaggacttgaatgggtcgccacaatcagccaggccggcagcgagaaggactacgtggactctgtgaagggcagattcaccatcagccgggacaacgccaagaagtccctgtacctccagatgaacagcctgagagccgaggacaccgccgtgtactattgtgcctctggcgtgtacagcttcgactacagaggccagggcaccctggtcacagtctcttctggtaccggcggaggcggatctggcggcggaggtagcggtggcggaggatctgaattcctgcctgttctgacacagcctccatctgcctctggcacacctggacagagagtgaccatcagctgtagcggcagaagcagcaacatcggcagcaacagcgtgaactggtacagacagcttcctggcgctgcccctaagctgctgatctacagcaacaaccagcggcctcctggcgtgccagtcagattttctggcagcaagagcggcacaagcgccagcctggctatttctggactccagtctgaggacgaggccacctactactgtgccacctgggacgacaacctgaacgtgcactacgtgttcggcaccggcaccaaagtgacagtgcttggaagtagactcgaggacctgaagaacgtgttcccacctgaggtggccgtgttcgagcctagcgaggccgagatcagccacacccagaaagccaccctcgtgtgcctggctaccggcttctaccccgaccatgtggaactgtcttggtgggtcaacggcaaagaggtgcacagcggcgtgtgtaccgacccccagccactgaaagaacagcccgccctgaacgacagccggtactgcctgagcagcagactgagagtgtccgccaccttctggcagaacccccggaaccacttcagatgccaggtgcagttctacggcctgagcgagaacgacgagtggacccaggacagagccaagcccgtgacccagatcgtgtctgccgaagcctggggcagagccgattgcggctttaccagcgagagctaccagcagggcgtgctgagcgccaccatcctgtacgagatcctgctgggcaaggccaccctgtacgccgtgctggtgtctgccctggtgctgatggctatggtcaagcggaaggacagccggggaagggccaagcgatctggatctggagcaacaaacttctcactactcaaacaagcaggtgacgtggaggagaatcccgggcctactagtatggactggatttggcgcatccttttccttgtcggcgctgctaccggcgcgcattccttcgaacttgaaatggctcaggtgcagctggtgcagagcggagccgaagtgaagaaacctggcagcagcgtgaaggtgtcctgcaaagcttctggcggcaccttcagcagctacgccatctcttgggttcgacaggcccctggacaaggactggaatggatgggcagaatcatccccatcctgggaatcgccaactacgcccagaaattccagggcagagtgacaatcaccgccgacaagagcaccagcaccgcctacatggaactgagcagcctgagaagcgaggacaccgccgtgtactattgtgcaagaggcggctactacagccacgacatgtggagcgaagattggggccagggcacactggtcacagtgtcatctacgcgtatccagaaccctgatcctgccgtgtaccagctgcgggatagcaagagcagcgacaagagcgtgtgtctgttcaccgacttcgacagccagaccaacgtgtcccagagcaaggactccgacgtgtacatcaccgataagtgcgtgctggacatgcggagcatggacttcaagagcaactccgccgtggcctggtccaacaagtccgatttcgcctgcgccaacgccttcaacaacagcattatccccgaggacacattcttcccaagccccgagagcagctgcgacgtgaagctggtggaaaagagcttcgagacagacaccaacctgaacttccagaacctgagcgtgatcggcttcagaatcctgctgctgaaagtggccggctttaacctgctgatgaccctgcggctgtggtccagc

SEQ ID NO: 1962 - DNA, 2283 bp, Artificial Sequence
  Synthetic Polynucloetide
atggccttaccagtgaccgccttgctcctgccgctggccttgctgctccacgccgccaggccggaagtgcagctggttgaatctggcggaggactggttcagcctggcggatctctgagactgtcttgtgccgccagcggcttcagcttcagcgacttttggatgagctgggtccgacaggcccctggcaaaggacttgaatgggtcgccacaatcagccaggccggcagcgagaaggactacgtggactctgtgaagggcagattcaccatcagccgggacaacgccaagaagtccctgtacctccagatgaacagcctgagagccgaggacaccgccgtgtactattgtgcctctggcgtgtacagcttcgactacagaggccagggcaccctggtcacagtctcttctggtaccggcggaggcggatctggcggcggaggtagcggtggcggaggatctgaattcgacttcgtgatgacacagagccctgatagcctggccgtgtctctcggcgagcgagtgaccatgagctgcaagtctagccagagcctgctgaacagcggcaaccagaagaactacctgacctggtatcagcagaagcccggccagcctcctaagctgctgatctactgggccagcaccagagaaagcggcgtgcccgatagattttctggctctggcagcggcaccgacttcaccctgacaatttctagcctgcaagccgaggacgtggccgtgtactactgccagaacgactacagctacccctacaccttcggccagggcaccaagctggaaatcaaactcgaggacctgaagaacgtgttcccacctgaggtggccgtgttcgagcctagcgaggccgagatcagccacacccagaaagccaccctcgtgtgcctggctaccggcttctaccccgaccatgtggaactgtcttggtgggtcaacggcaaagaggtgcacagcggcgtgtgtaccgacccccagccactgaaagaacagcccgccctgaacgacagccggtactgcctgagcagcagactgagagtgtccgccaccttctggcagaacccccggaaccacttcagatgccaggtgcagttctacggcctgagcgagaacgacgagtggacccaggacagagccaagcccgtgacccagatcgtgtctgccgaagcctggggcagagccgattgcggctttaccagcgagagctaccagcagggcgtgctgagcgccaccatcctgtacgagatcctgctgggcaaggccaccctgtacgccgtgctggtgtctgccctggtgctgatggctatggtcaagcggaaggacagccggggaagggccaagcgatctggatctggagcaacaaacttctcactactcaaacaagcaggtgacgtggaggagaatcccgggcctactagtatggactggatttggcgcatccttttccttgtcggcgctgctaccggcgcgcattccttcgaagaagtgcaactggttcagagcggagccgagctgaagaaacctggggccagcgtgaaggtgtcctgtaaagccagcggctacacctttaccgactactacatgaaatgggtccgacaggccccaggccagggactcgaatggatcggcgatattatccccagcaacggggccaccttctacaaccagaaattcaagggccgcgtgaccatcaccgtggacaagagcacaagcaccgcctacatggaactgagcagcctgagaagcgaggacaccgccgtgtattattgcgccagaagccatctgctgcgggccagttggttcgcctattggggacagggaaccctggtcaccgttagctctacgcgtatccagaaccctgatcctgccgtgtaccagctgcgggatagcaagagcagcgacaagagcgtgtgtctgttcaccgacttcgacagccagaccaacgtgtcccagagcaaggactccgacgtgtacatcaccgataagtgcgtgctggacatgcggagcatggacttcaagagcaactccgccgtggcctggtccaacaagtccgatttcgcctgcgccaacgccttcaacaacagcattatccccgaggacacattcttcccaagccccgagagcagctgcgacgtgaagctggtggaaaagagcttcgagacagacaccaacctgaacttccagaacctgagcgtgatcggcttcagaatcctgctgctgaaagtggccggctttaacctgctgatgaccctgcggctgtggtccagc

SEQ ID NO: 1963 - DNA, 2283 bp, Artificial Sequence
  Synthetic Polynucloetide
atggccttaccagtgaccgccttgctcctgccgctggccttgctgctccacgccgccaggccggaagtgcagctggttgaatctggcggaggactggttcagcctggcggatctctgagactgtcttgtgccgccagcggcttcagcttcagcgacttttggatgagctgggtccgacaggcccctggcaaaggacttgaatgggtcgccacaatcagccaggccggcagcgagaaggactacgtggactctgtgaagggcagattcaccatcagccgggacaacgccaagaagtccctgtacctccagatgaacagcctgagagccgaggacaccgccgtgtactattgtgcctctggcgtgtacagcttcgactacagaggccagggcaccctggtcacagtctcttctggtaccggcggaggcggatctggcggcggaggtagcggtggcggaggatctgaattcgacttcgtgatgacacagagccctgatagcctggccgtgtctctcggcgagcgagtgaccatgagctgcaagtctagccagagcctgctgaacagcggcaaccagaagaactacctgacctggtatcagcagaagcccggccagcctcctaagctgctgatctactgggccagcaccagagaaagcggcgtgcccgatagattttctggctctggcagcggcaccgacttcaccctgacaatttctagcctgcaagccgaggacgtggccgtgtactactgccagaacgactacagctacccctacaccttcggccagggcaccaagctggaaatcaaactcgaggacctgaagaacgtgttcccacctgaggtggccgtgttcgagcctagcgaggccgagatcagccacacccagaaagccaccctcgtgtgcctggctaccggcttctaccccgaccatgtggaactgtcttggtgggtcaacggcaaagaggtgcacagcggcgtgtgtaccgacccccagccactgaaagaacagcccgccctgaacgacagccggtactgcctgagcagcagactgagagtgtccgccaccttctggcagaacccccggaaccacttcagatgccaggtgcagttctacggcctgagcgagaacgacgagtggacccaggacagagccaagcccgtgacccagatcgtgtctgccgaagcctggggcagagccgattgcggctttaccagcgagagctaccagcagggcgtgctgagcgccaccatcctgtacgagatcctgctgggcaaggccaccctgtacgccgtgctggtgtctgccctggtgctgatggctatggtcaagcggaaggacagccggggaagggccaagcgatctggatctggagcaacaaacttctcactactcaaacaagcaggtgacgtggaggagaatcccgggcctactagtatggactggatttggcgcatccttttccttgtcggcgctgctaccggcgcgcattccttcgaacaagtgcaactggttcagagcggagccgagctgaagaaacctggggccagcgtgaaggtgtcctgtaaagccagcggctacacctttaccgactactacatgaaatgggtccgacaggccccaggccagggactcgaatggatcggcgatattatccccagcaacggggccaccttctacaaccagaaattcaagggccgcgtgaccatcaccgtggacaagagcacaagcaccgcctacatggaactgagcagcctgagaagcgaggacaccgccgtgtattattgcgccagaagccatctgctgcgggccagttggttcgcctattggggacagggaaccctggtcaccgttagctctacgcgtatccagaaccctgatcctgccgtgtaccagctgcgggatagcaagagcagcgacaagagcgtgtgtctgttcaccgacttcgacagccagaccaacgtgtcccagagcaaggactccgacgtgtacatcaccgataagtgcgtgctggacatgcggagcatggacttcaagagcaactccgccgtggcctggtccaacaagtccgatttcgcctgcgccaacgccttcaacaacagcattatccccgaggacacattcttcccaagccccgagagcagctgcgacgtgaagctggtggaaaagagcttcgagacagacaccaacctgaacttccagaacctgagcgtgatcggcttcagaatcctgctgctgaaagtggccggctttaacctgctgatgaccctgcggctgtggtccagc

SEQ ID NO: 1964 - DNA, 2253 bp, Artificial Sequence
  Synthetic Polynucloetide
atggccttaccagtgaccgccttgctcctgccgctggccttgctgctccacgccgccaggccggaagtgcagctggttgaatctggcggaggactggttcagcctggcggatctctgagactgtcttgtgccgccagcggcttcagcttcagcgacttttggatgagctgggtccgacaggcccctggcaaaggacttgaatgggtcgccacaatcagccaggccggcagcgagaaggactacgtggactctgtgaagggcagattcaccatcagccgggacaacgccaagaagtccctgtacctccagatgaacagcctgagagccgaggacaccgccgtgtactattgtgcctctggcgtgtacagcttcgactacagaggccagggcaccctggtcacagtctcttctggtaccggcggaggcggatctggcggcggaggtagcggtggcggaggatctgaattcgacgtgcagatcacacagagccctagctacctggctgcctctcctggcgagacaatcaccatcaactgtcgggccagcaagagcatcagcaaggacctggcctggtatcaagagaagcccggcaagaccaacaagctgctgatctacagcggcagcacactccagtctggcatccccagcagattttccggctctggcagcggcaccgatttcaccctgaccataagcagcctggaacctgaggacttcgccatgtactactgccagcagcacaacaagtacccctacacctttggcggaggcaccaagctggaaatcaagagactcgaggacctgaagaacgtgttcccacctgaggtggccgtgttcgagcctagcgaggccgagatcagccacacccagaaagccaccctcgtgtgcctggctaccggcttctaccccgaccatgtggaactgtcttggtgggtcaacggcaaagaggtgcacagcggcgtgtgtaccgacccccagccactgaaagaacagcccgccctgaacgacagccggtactgcctgagcagcagactgagagtgtccgccaccttctggcagaacccccggaaccacttcagatgccaggtgcagttctacggcctgagcgagaacgacgagtggacccaggacagagccaagcccgtgacccagatcgtgtctgccgaagcctggggcagagccgattgcggctttaccagcgagagctaccagcagggcgtgctgagcgccaccatcctgtacgagatcctgctgggcaaggccaccctgtacgccgtgctggtgtctgccctggtgctgatggctatggtcaagcggaaggacagccggggaagggccaagcgatctggatctggagcaacaaacttctcactactcaaacaagcaggtgacgtggaggagaatcccgggcctactagtatggactggatttggcgcatccttttccttgtcggcgctgctaccggcgcgcattccttcgaacaagttcaactgcaacagcctggggccgagcttgttagacctggcgcttctgtgaagctgagctgcaaggccagcggctacaccttcaccagctactggatgaactgggtcaagcagcggcctgaccagggcctcgaatggatcggcagaatcgacccctacgacagcgagacacactacaaccagaagttcaaggacaaggccatcctgaccgtggacaagagcagctccaccgcctacatgcaactgagcagcctgacctctgaggatagcgccgtgtactattgcgccagaggcaactgggacgactattggggccagggcacaaccctgacagtgtctagtacgcgtatccagaaccctgatcctgccgtgtaccagctgcgggatagcaagagcagcgacaagagcgtgtgtctgttcaccgacttcgacagccagaccaacgtgtcccagagcaaggactccgacgtgtacatcaccgataagtgcgtgctggacatgcggagcatggacttcaagagcaactccgccgtggcctggtccaacaagtccgatttcgcctgcgccaacgccttcaacaacagcattatccccgaggacacattcttcccaagccccgagagcagctgcgacgtgaagctggtggaaaagagcttcgagacagacaccaacctgaacttccagaacctgagcgtgatcggcttcagaatcctgctgctgaaagtggccggctttaacctgctgatgaccctgcggctgtggtccagc

SEQ ID NO: 1965 - DNA, 2259 bp, Artificial Sequence
  Synthetic Polynucloetide
atggccttaccagtgaccgccttgctcctgccgctggccttgctgctccacgccgccaggccggaagtgcagctggttgaatctggcggaggactggttcagcctggcggatctctgagactgtcttgtgccgccagcggcttcagcttcagcgacttttggatgagctgggtccgacaggcccctggcaaaggacttgaatgggtcgccacaatcagccaggccggcagcgagaaggactacgtggactctgtgaagggcagattcaccatcagccgggacaacgccaagaagtccctgtacctccagatgaacagcctgagagccgaggacaccgccgtgtactattgtgcctctggcgtgtacagcttcgactacagaggccagggcaccctggtcacagtctcttctggtaccggcggaggcggatctggcggcggaggtagcggtggcggaggatctgaattcgagatcgtgctgacacagagccctaccagcatgacagcctctccaggcgagcaagtgaccatcacctgtagagccagcagcagcatcaactacatgcactggtatcagcagaagcctggcgcaagccccagaccttggatctacgagacaagcaagctggcctccggcgtgcccgatagattttctggatctgccagcggcaccagctacagcctgaccatcaacaacatggaagccgaggacgccgccacctactactgccagcagtggaattacccctcctggacctttggcggaggcaccaagctggaacttaaactcgaggacctgaagaacgtgttcccacctgaggtggccgtgttcgagcctagcgaggccgagatcagccacacccagaaagccaccctcgtgtgcctggctaccggcttctaccccgaccatgtggaactgtcttggtgggtcaacggcaaagaggtgcacagcggcgtgtgtaccgacccccagccactgaaagaacagcccgccctgaacgacagccggtactgcctgagcagcagactgagagtgtccgccaccttctggcagaacccccggaaccacttcagatgccaggtgcagttctacggcctgagcgagaacgacgagtggacccaggacagagccaagcccgtgacccagatcgtgtctgccgaagcctggggcagagccgattgcggctttaccagcgagagctaccagcagggcgtgctgagcgccaccatcctgtacgagatcctgctgggcaaggccaccctgtacgccgtgctggtgtctgccctggtgctgatggctatggtcaagcggaaggacagccggggaagggccaagcgatctggatctggagcaacaaacttctcactactcaaacaagcaggtgacgtggaggagaatcccgggcctactagtatggactggatttggcgcatccttttccttgtcggcgctgctaccggcgcgcattccttcgaagaagtgcagctcgttgagtctggtggcggactggttcagcctggaagaagcctgaagctgagctgtgccgccagcggcttcaccttcagcgactacaatatggcctgggtccgacaggcccctaagaaaggactggaatgggtcgccaccatcctgtacgatggcggcagaacctactaccggggcagcgtgaagggcagattcaccatcagcagagacaacgccaagagcaccctgtacctgcggatggactctctgagaagcgaggataccgccacatattactgtgccacacacagccggggcaccgactactttgattattggggccagggcgtgatggttaccgtgtctagtacgcgtatccagaaccctgatcctgccgtgtaccagctgcgggatagcaagagcagcgacaagagcgtgtgtctgttcaccgacttcgacagccagaccaacgtgtcccagagcaaggactccgacgtgtacatcaccgataagtgcgtgctggacatgcggagcatggacttcaagagcaactccgccgtggcctggtccaacaagtccgatttcgcctgcgccaacgccttcaacaacagcattatccccgaggacacattcttcccaagccccgagagcagctgcgacgtgaagctggtggaaaagagcttcgagacagacaccaacctgaacttccagaacctgagcgtgatcggcttcagaatcctgctgctgaaagtggccggctttaacctgctgatgaccctgcggctgtggtccagc

SEQ ID NO: 1966 - DNA, 2286 bp, Artificial Sequence
  Synthetic Polynucloetide
atggccttaccagtgaccgccttgctcctgccgctggccttgctgctccacgccgccaggccggaagtgcagctggttgaatctggcggaggactggttcagcctggcggatctctgagactgtcttgtgccgccagcggcttcagcttcagcgacttttggatgagctgggtccgacaggcccctggcaaaggacttgaatgggtcgccacaatcagccaggccggcagcgagaaggactacgtggactctgtgaagggcagattcaccatcagccgggacaacgccaagaagtccctgtacctccagatgaacagcctgagagccgaggacaccgccgtgtactattgtgcctctggcgtgtacagcttcgactacagaggccagggcaccctggtcacagtctcttctggtaccggcggaggcggatctggcggcggaggtagcggtggcggaggatctgaattcgacatcgtgatgacacagagcccttctagcctggccgtgtctgagggcgagacagtgaccatcaactgcaagagcagccagagcttcctgtctagcggcgacggcaagaattacgtggcctggtatcagtacaagcccggacagagccccaagctgctgatctactgggccagcacaagacagagcggcgtgcccgatagattcatcggctctggcagcggcaccgacttcaccctgacaatctctacagtgcaggccgaggacctggctatctactactgccagcagtattacgacacccctctgacctttggctccggcaccaagctggaaatcaaactcgaggacctgaagaacgtgttcccacctgaggtggccgtgttcgagcctagcgaggccgagatcagccacacccagaaagccaccctcgtgtgcctggctaccggcttctaccccgaccatgtggaactgtcttggtgggtcaacggcaaagaggtgcacagcggcgtgtgtaccgacccccagccactgaaagaacagcccgccctgaacgacagccggtactgcctgagcagcagactgagagtgtccgccaccttctggcagaacccccggaaccacttcagatgccaggtgcagttctacggcctgagcgagaacgacgagtggacccaggacagagccaagcccgtgacccagatcgtgtctgccgaagcctggggcagagccgattgcggctttaccagcgagagctaccagcagggcgtgctgagcgccaccatcctgtacgagatcctgctgggcaaggccaccctgtacgccgtgctggtgtctgccctggtgctgatggctatggtcaagcggaaggacagccggggaagggccaagcgatctggatctggagcaacaaacttctcactactcaaacaagcaggtgacgtggaggagaatcccgggcctactagtatggactggatttggcgcatccttttccttgtcggcgctgctaccggcgcgcattccttcgaagaagtgaagctgcaagagtctggccccagcctggtgcagagtagccaaacactgagcctgacctgtaccgtgtccggctttagcctgaccagctaccacatccactgggtccgacagacccctggcaaaggactggaatggatgggcgtgatgtggagcgacggcgacaccagctataacagcgccctgaagtcccggctgagcatcagcagagatacaagccagagccaggtgttcctgaagatgaacagcctccagaccgaggacaccgccacctactattgtgccagaggctactacagcagctacctgtacctttggttcgcctattggggccagggcaccctggttacagtcagctctacgcgtatccagaaccctgatcctgccgtgtaccagctgcgggatagcaagagcagcgacaagagcgtgtgtctgttcaccgacttcgacagccagaccaacgtgtcccagagcaaggactccgacgtgtacatcaccgataagtgcgtgctggacatgcggagcatggacttcaagagcaactccgccgtggcctggtccaacaagtccgatttcgcctgcgccaacgccttcaacaacagcattatccccgaggacacattcttcccaagccccgagagcagctgcgacgtgaagctggtggaaaagagcttcgagacagacaccaacctgaacttccagaacctgagcgtgatcggcttcagaatcctgctgctgaaagtggccggctttaacctgctgatgaccctgcggctgtggtccagc

SEQ ID NO: 1967 - DNA, 2298 bp, Artificial Sequence
  Synthetic Polynucloetide
atggccttaccagtgaccgccttgctcctgccgctggccttgctgctccacgccgccaggccggaagtgcagctggttgaatctggcggaggactggttcagcctggcggatctctgagactgtcttgtgccgccagcggcttcagcttcagcgacttttggatgagctgggtccgacaggcccctggcaaaggacttgaatgggtcgccacaatcagccaggccggcagcgagaaggactacgtggactctgtgaagggcagattcaccatcagccgggacaacgccaagaagtccctgtacctccagatgaacagcctgagagccgaggacaccgccgtgtactattgtgcctctggcgtgtacagcttcgactacagaggccagggcaccctggtcacagtctcttctggtaccggcggaggcggatctggcggcggaggtagcggtggcggaggatctgaattcgacgtgctgatgacccagacacctgtgtctctgccagtgtctctcggaggccaggtgtccatctcctgtagaagcagccagagcctggtgcactccgacggcgatacctacctgcactggtatctccagaagcctggacagagccctcagctcctgatctaccgggtgtccaacagattcagcggcgtgcccgatagattttccggcagcggctctggcaccgacttcaccctgaagatcagcagagtggaacccgaggacctgggcctgtactactgtctccagaccacacacttcccaccttggacctttggcggaggcaccaagctggaaatgaaactcgaggacctgaagaacgtgttcccacctgaggtggccgtgttcgagcctagcgaggccgagatcagccacacccagaaagccaccctcgtgtgcctggctaccggcttctaccccgaccatgtggaactgtcttggtgggtcaacggcaaagaggtgcacagcggcgtgtgtaccgacccccagccactgaaagaacagcccgccctgaacgacagccggtactgcctgagcagcagactgagagtgtccgccaccttctggcagaacccccggaaccacttcagatgccaggtgcagttctacggcctgagcgagaacgacgagtggacccaggacagagccaagcccgtgacccagatcgtgtctgccgaagcctggggcagagccgattgcggctttaccagcgagagctaccagcagggcgtgctgagcgccaccatcctgtacgagatcctgctgggcaaggccaccctgtacgccgtgctggtgtctgccctggtgctgatggctatggtcaagcggaaggacagccggggaagggccaagcgatctggatctggagcaacaaacttctcactactcaaacaagcaggtgacgtggaggagaatcccgggcctactagtatggactggatttggcgcatccttttccttgtcggcgctgctaccggcgcgcattccttcgaacaggttcagctccagcagtctggacccgagcttagaaggccaggatctagcgtcagactgagctgcaaggccagcggctaccggatcaaggacttcctgatccactggattaagaacagacccgagcacggcctggaatggatcggatggattgaccctgaggacggcgagactaagtacgcccagaagttccagaccaaggccacactgaccgccgacacctctagcaacaccgcctacatgcaactgagcagcctgaccagcgaggacaccgccacctacttttgtgctagatggggcgacgtgtactacggcctgatgagaggccatgtgatggatgcctggggccagggaacaagcgtgacagtctcttctacgcgtatccagaaccctgatcctgccgtgtaccagctgcgggatagcaagagcagcgacaagagcgtgtgtctgttcaccgacttcgacagccagaccaacgtgtcccagagcaaggactccgacgtgtacatcaccgataagtgcgtgctggacatgcggagcatggacttcaagagcaactccgccgtggcctggtccaacaagtccgatttcgcctgcgccaacgccttcaacaacagcattatccccgaggacacattcttcccaagccccgagagcagctgcgacgtgaagctggtggaaaagagcttcgagacagacaccaacctgaacttccagaacctgagcgtgatcggcttcagaatcctgctgctgaaagtggccggctttaacctgctgatgaccctgcggctgtggtccagc

SEQ ID NO: 1968 - DNA, 2283 bp, Artificial Sequence
  Synthetic Polynucloetide
atggccttaccagtgaccgccttgctcctgccgctggccttgctgctccacgccgccaggccggaagtgcagctggttgaatctggcggaggactggttcagcctggcggatctctgagactgtcttgtgccgccagcggcttcagcttcagcgacttttggatgagctgggtccgacaggcccctggcaaaggacttgaatgggtcgccacaatcagccaggccggcagcgagaaggactacgtggactctgtgaagggcagattcaccatcagccgggacaacgccaagaagtccctgtacctccagatgaacagcctgagagccgaggacaccgccgtgtactattgtgcctctggcgtgtacagcttcgactacagaggccagggcaccctggtcacagtctcttctggtaccggcggaggcggatctggcggcggaggtagcggtggcggaggatctgaattcgacatcgtgatgacacagagccccgccacactgtcactgtctccaggcgaaagagccacactgagctgtcggagcagcaagagcctccagaacgtgaacggcaacacctacctgtactggttccagcagaagcccggccagtctcctcagctcctgatctacagaatgagcaacctgaacagcggcgtgcccgacagattttctggcagcggaagcggcaccgagttcaccctgaccataagcagcctggaacctgaggacttcgccgtgtactactgtatgcagcacctggaataccccatcaccttcggagccggcaccaagctggaaatcaaactcgaggacctgaagaacgtgttcccacctgaggtggccgtgttcgagcctagcgaggccgagatcagccacacccagaaagccaccctcgtgtgcctggctaccggcttctaccccgaccatgtggaactgtcttggtgggtcaacggcaaagaggtgcacagcggcgtgtgtaccgacccccagccactgaaagaacagcccgccctgaacgacagccggtactgcctgagcagcagactgagagtgtccgccaccttctggcagaacccccggaaccacttcagatgccaggtgcagttctacggcctgagcgagaacgacgagtggacccaggacagagccaagcccgtgacccagatcgtgtctgccgaagcctggggcagagccgattgcggctttaccagcgagagctaccagcagggcgtgctgagcgccaccatcctgtacgagatcctgctgggcaaggccaccctgtacgccgtgctggtgtctgccctggtgctgatggctatggtcaagcggaaggacagccggggaagggccaagcgatctggatctggagcaacaaacttctcactactcaaacaagcaggtgacgtggaggagaatcccgggcctactagtatggactggatttggcgcatccttttccttgtcggcgctgctaccggcgcgcattccttcgaagaagtgcaactggttgaatctggcggcggactggttaagcctggcggatctctgaagctgagctgtgccgccagcggctacacctttaccagctacgtgatgcactgggtccgacaggcccctggcaaaggacttgagtggatcggctacatcaacccctacaacgatggcaccaagtacaacgagaagttccagggcagagtgaccatcagctccgacaagagcatcagcaccgcctacatggaactgagcagcctgagaagcgaggataccgccatgtactattgcgccagaggcacctactactacggcaccagagtgttcgactactggggccagggaaccctggtcacagtctcttctacgcgtatccagaaccctgatcctgccgtgtaccagctgcgggatagcaagagcagcgacaagagcgtgtgtctgttcaccgacttcgacagccagaccaacgtgtcccagagcaaggactccgacgtgtacatcaccgataagtgcgtgctggacatgcggagcatggacttcaagagcaactccgccgtggcctggtccaacaagtccgatttcgcctgcgccaacgccttcaacaacagcattatccccgaggacacattcttcccaagccccgagagcagctgcgacgtgaagctggtggaaaagagcttcgagacagacaccaacctgaacttccagaacctgagcgtgatcggcttcagaatcctgctgctgaaagtggccggctttaacctgctgatgaccctgcggctgtggtccagc

SEQ ID NO: 1969 - DNA, 2271 bp, Artificial Sequence
  Synthetic Polynucloetide
atggccttaccagtgaccgccttgctcctgccgctggccttgctgctccacgccgccaggccggaagtgcagctggttgaatctggcggaggactggttcagcctggcggatctctgagactgtcttgtgccgccagcggcttcagcttcagcgacttttggatgagctgggtccgacaggcccctggcaaaggacttgaatgggtcgccacaatcagccaggccggcagcgagaaggactacgtggactctgtgaagggcagattcaccatcagccgggacaacgccaagaagtccctgtacctccagatgaacagcctgagagccgaggacaccgccgtgtactattgtgcctctggcgtgtacagcttcgactacagaggccagggcaccctggtcacagtctcttctggtaccggcggaggcggatctggcggcggaggtagcggtggcggaggatctgaattcgacatccagatgacacagagccctagcagcctgtctgccagcgtgggagacagagtgaccatcacatgcaaggccagcgaccacatcaacaactggctggcctggtatcagcagaagcctggacaggcccctaagctgctgatctacggcgctaccacactggaaacaggcgtgcccagcagattttctggcagcggctctggcaccgactacaccctgacaatatccagcctccagcctgaggacttcgccacctactactgtcagcagagctggaacaccccttggacattcggccagggcaccaagctggaaatcaagagactcgaggacctgaagaacgtgttcccacctgaggtggccgtgttcgagcctagcgaggccgagatcagccacacccagaaagccaccctcgtgtgcctggctaccggcttctaccccgaccatgtggaactgtcttggtgggtcaacggcaaagaggtgcacagcggcgtgtgtaccgacccccagccactgaaagaacagcccgccctgaacgacagccggtactgcctgagcagcagactgagagtgtccgccaccttctggcagaacccccggaaccacttcagatgccaggtgcagttctacggcctgagcgagaacgacgagtggacccaggacagagccaagcccgtgacccagatcgtgtctgccgaagcctggggcagagccgattgcggctttaccagcgagagctaccagcagggcgtgctgagcgccaccatcctgtacgagatcctgctgggcaaggccaccctgtacgccgtgctggtgtctgccctggtgctgatggctatggtcaagcggaaggacagccggggaagggccaagcgatctggatctggagcaacaaacttctcactactcaaacaagcaggtgacgtggaggagaatcccgggcctactagtatggactggatttggcgcatccttttccttgtcggcgctgctaccggcgcgcattccttcgaacaagttcagcttcaacagcctggcgctgagctggtcaaacctggcgcttctgtgaagatgagctgcaaagccagcggctacgccttcagcagctactggatcaactggatgaagcagaaacccggccagggactcgaatggatcggccaaatctatcccggcgacggcgacaccaactacaacggcaagttcaagggcagagccacactgaccgccgatacctctagcagcacagcctacatgcagctgagcagcctgaccagcgaagatagcgccgtgtacttctgtgcccggtccatcacaacagtcgtgggctgcgctatggactattggggccagggaacaagcgtgaccgtgtctagtacgcgtatccagaaccctgatcctgccgtgtaccagctgcgggatagcaagagcagcgacaagagcgtgtgtctgttcaccgacttcgacagccagaccaacgtgtcccagagcaaggactccgacgtgtacatcaccgataagtgcgtgctggacatgcggagcatggacttcaagagcaactccgccgtggcctggtccaacaagtccgatttcgcctgcgccaacgccttcaacaacagcattatccccgaggacacattcttcccaagccccgagagcagctgcgacgtgaagctggtggaaaagagcttcgagacagacaccaacctgaacttccagaacctgagcgtgatcggcttcagaatcctgctgctgaaagtggccggctttaacctgctgatgaccctgcggctgtggtccagc

SEQ ID NO: 1970 - DNA, 2277 bp, Artificial Sequence
  Synthetic Polynucloetide
atggccttaccagtgaccgccttgctcctgccgctggccttgctgctccacgccgccaggccggaagtgcagctggttgaatctggcggaggactggttcagcctggcggatctctgagactgtcttgtgccgccagcggcttcagcttcagcgacttttggatgagctgggtccgacaggcccctggcaaaggacttgaatgggtcgccacaatcagccaggccggcagcgagaaggactacgtggactctgtgaagggcagattcaccatcagccgggacaacgccaagaagtccctgtacctccagatgaacagcctgagagccgaggacaccgccgtgtactattgtgcctctggcgtgtacagcttcgactacagaggccagggcaccctggtcacagtctcttctggtaccggcggaggcggatctggcggcggaggtagcggtggcggaggatctgaattccagatcgtgctgtctcagtctcctgccatcctgagcgcttccccaggcgagaaagtgaccatgacctgtagagccagcagcagcgtgtcctacatgcactggtatcagcagaagcccggcagcagccctaagccttggatctacgccaccagcaatctggcctctggcgtgccagccagattttctggctctggcagcggcaccagctacagcttcacaatcagcagagtggaagccgaggacgccgccacctactattgtcagcagtggaccttcaatcctcctaccttcggcggaggcacccggctggaaatcaaaagaacagtggctgctctcgaggacctgaagaacgtgttcccacctgaggtggccgtgttcgagcctagcgaggccgagatcagccacacccagaaagccaccctcgtgtgcctggctaccggcttctaccccgaccatgtggaactgtcttggtgggtcaacggcaaagaggtgcacagcggcgtgtgtaccgacccccagccactgaaagaacagcccgccctgaacgacagccggtactgcctgagcagcagactgagagtgtccgccaccttctggcagaacccccggaaccacttcagatgccaggtgcagttctacggcctgagcgagaacgacgagtggacccaggacagagccaagcccgtgacccagatcgtgtctgccgaagcctggggcagagccgattgcggctttaccagcgagagctaccagcagggcgtgctgagcgccaccatcctgtacgagatcctgctgggcaaggccaccctgtacgccgtgctggtgtctgccctggtgctgatggctatggtcaagcggaaggacagccggggaagggccaagcgatctggatctggagcaacaaacttctcactactcaaacaagcaggtgacgtggaggagaatcccgggcctactagtatggactggatttggcgcatccttttccttgtcggcgctgctaccggcgcgcattccttcgaacaggcttatctgcaacagagcggagccgaactcgtcagacctggcgcttctgtgaagatgagctgcaaggccagcggctacaccttcaccagctataatatgcactgggtcaagcagacccctcggcagggactcgaatggatcggcggaatctatcccggcaacggcgacacctcctacaaccagaagttcaagggcaaagccacactgaccgtgggcaagagcagcagcaccgcctatatgcagctcagcagcctgaccagcgaggacagcgccgtgtacttctgcgccagatacgactacaactacgctatggactactggggccagggcaccagcgtgacagttagctctgccagcacgcgtatccagaaccctgatcctgccgtgtaccagctgcgggatagcaagagcagcgacaagagcgtgtgtctgttcaccgacttcgacagccagaccaacgtgtcccagagcaaggactccgacgtgtacatcaccgataagtgcgtgctggacatgcggagcatggacttcaagagcaactccgccgtggcctggtccaacaagtccgatttcgcctgcgccaacgccttcaacaacagcattatccccgaggacacattcttcccaagccccgagagcagctgcgacgtgaagctggtggaaaagagcttcgagacagacaccaacctgaacttccagaacctgagcgtgatcggcttcagaatcctgctgctgaaagtggccggctttaacctgctgatgaccctgcggctgtggtccagc

SEQ ID NO: 1971 - DNA, 2271 bp, Artificial Sequence
  Synthetic Polynucloetide
atggccttaccagtgaccgccttgctcctgccgctggccttgctgctccacgccgccaggccggaagtgcagctggttgaatctggcggaggactggttcagcctggcggatctctgagactgtcttgtgccgccagcggcttcagcttcagcgacttttggatgagctgggtccgacaggcccctggcaaaggacttgaatgggtcgccacaatcagccaggccggcagcgagaaggactacgtggactctgtgaagggcagattcaccatcagccgggacaacgccaagaagtccctgtacctccagatgaacagcctgagagccgaggacaccgccgtgtactattgtgcctctggcgtgtacagcttcgactacagaggccagggcaccctggtcacagtctcttctggtaccggcggaggcggatctggcggcggaggtagcggtggcggaggatctgaattcgagatcgtgctgacacagagccctgccaccctgtctctgagccctggcgaaagagccaccctgagctgtagagccagccagagcgtgtccagctacctggcctggtatcagcagaagcccggccaggctccccggctgctgatctacgatgccagcaatagagccaccggcatccccgccagattttccggctctggcagcggcaccgacttcaccctgaccatcagctccctggaacccgaggacttcgccgtgtactactgccagcagcggagcaactggcccatcacattcggccagggcacccggctggaaatcaaactcgaggacctgaagaacgtgttcccacctgaggtggccgtgttcgagcctagcgaggccgagatcagccacacccagaaagccaccctcgtgtgcctggctaccggcttctaccccgaccatgtggaactgtcttggtgggtcaacggcaaagaggtgcacagcggcgtgtgtaccgacccccagccactgaaagaacagcccgccctgaacgacagccggtactgcctgagcagcagactgagagtgtccgccaccttctggcagaacccccggaaccacttcagatgccaggtgcagttctacggcctgagcgagaacgacgagtggacccaggacagagccaagcccgtgacccagatcgtgtctgccgaagcctggggcagagccgattgcggctttaccagcgagagctaccagcagggcgtgctgagcgccaccatcctgtacgagatcctgctgggcaaggccaccctgtacgccgtgctggtgtctgccctggtgctgatggctatggtcaagcggaaggacagccggggaagggccaagcgatctggatctggagcaacaaacttctcactactcaaacaagcaggtgacgtggaggagaatcccgggcctactagtatggactggatttggcgcatccttttccttgtcggcgctgctaccggcgcgcattccttcgaagaggtgcagcttgttgagtctggcggaggactggtgcagcccgatagaagcctgagactgtcttgtgccgccagcggcttcaccttccacgattatgccatgcactgggtccgacaggcccctggcaaaggacttgaatgggtgtccaccatctcttggaacagcggcacaatcggctacgccgactctgtgaagggcagattcaccatcagccgggacaacgccaagaacagcctgtacctccagatgaactccctgagagccgaggacacagccctgtactactgcgccaaggacatccagtacggcaactactactacggcatggacgtgtggggccagggcacaacagtgacagtctcttctacgcgtatccagaaccctgatcctgccgtgtaccagctgcgggatagcaagagcagcgacaagagcgtgtgtctgttcaccgacttcgacagccagaccaacgtgtcccagagcaaggactccgacgtgtacatcaccgataagtgcgtgctggacatgcggagcatggacttcaagagcaactccgccgtggcctggtccaacaagtccgatttcgcctgcgccaacgccttcaacaacagcattatccccgaggacacattcttcccaagccccgagagcagctgcgacgtgaagctggtggaaaagagcttcgagacagacaccaacctgaacttccagaacctgagcgtgatcggcttcagaatcctgctgctgaaagtggccggctttaacctgctgatgaccctgcggctgtggtccagc

SEQ ID NO: 1972 - DNA, 2256 bp, Artificial Sequence
  Synthetic Polynucloetide
atggccttaccagtgaccgccttgctcctgccgctggccttgctgctccacgccgccaggccggaagtgcagctggttgaatctggcggaggactggttcagcctggcggatctctgagactgtcttgtgccgccagcggcttcagcttcagcgacttttggatgagctgggtccgacaggcccctggcaaaggacttgaatgggtcgccacaatcagccaggccggcagcgagaaggactacgtggactctgtgaagggcagattcaccatcagccgggacaacgccaagaagtccctgtacctccagatgaacagcctgagagccgaggacaccgccgtgtactattgtgcctctggcgtgtacagcttcgactacagaggccagggcaccctggtcacagtctcttctggtaccggcggaggcggatctggcggcggaggtagcggtggcggaggatctgaattcgacatccagatgacacagagccctagcagcctgtctgccagcgtgggagatagagtgaccatcaactgcaaggccagccaggacatcaacagctacctgagctggttccagcagaagcctggcaaggcccctaagacactgatctaccgggccaacagactggtggatggcgtgccaagcagattttctggcagcggcagcggccaggattacaccctgacaatatccagcctccagcctgaggacttcgccacctactactgcctccagtacgacgagttccctctgacctttggcggaggcaccaaggtggaaatcaaactcgaggacctgaagaacgtgttcccacctgaggtggccgtgttcgagcctagcgaggccgagatcagccacacccagaaagccaccctcgtgtgcctggctaccggcttctaccccgaccatgtggaactgtcttggtgggtcaacggcaaagaggtgcacagcggcgtgtgtaccgacccccagccactgaaagaacagcccgccctgaacgacagccggtactgcctgagcagcagactgagagtgtccgccaccttctggcagaacccccggaaccacttcagatgccaggtgcagttctacggcctgagcgagaacgacgagtggacccaggacagagccaagcccgtgacccagatcgtgtctgccgaagcctggggcagagccgattgcggctttaccagcgagagctaccagcagggcgtgctgagcgccaccatcctgtacgagatcctgctgggcaaggccaccctgtacgccgtgctggtgtctgccctggtgctgatggctatggtcaagcggaaggacagccggggaagggccaagcgatctggatctggagcaacaaacttctcactactcaaacaagcaggtgacgtggaggagaatcccgggcctactagtatggactggatttggcgcatccttttccttgtcggcgctgctaccggcgcgcattccttcgaacaggtgcaactggtgcagtctggggccgaagtgaagaaacctggggcctctgtgaaggtgtcctgcaaagccagcggctacacctttaccaactacgacatcaactgggtccgacaggctccaggccaaggactggaatggatcggctggatctatcctggcgacggcagcaccaagtacaacgagaagttcaaggccaaggccacactgaccgccgataccagcacaagcaccgcctacatggaactgcggagcctgagaagcgacgacaccgccgtgtactattgtgcctccggctacgaggacgctatggactattggggccagggcaccaccgtgacagtgtctagtacgcgtatccagaaccctgatcctgccgtgtaccagctgcgggatagcaagagcagcgacaagagcgtgtgtctgttcaccgacttcgacagccagaccaacgtgtcccagagcaaggactccgacgtgtacatcaccgataagtgcgtgctggacatgcggagcatggacttcaagagcaactccgccgtggcctggtccaacaagtccgatttcgcctgcgccaacgccttcaacaacagcattatccccgaggacacattcttcccaagccccgagagcagctgcgacgtgaagctggtggaaaagagcttcgagacagacaccaacctgaacttccagaacctgagcgtgatcggcttcagaatcctgctgctgaaagtggccggctttaacctgctgatgaccctgcggctgtggtccagc

SEQ ID NO: 1973 - DNA, 2262 bp, Artificial Sequence
  Synthetic Polynucloetide
atggccttaccagtgaccgccttgctcctgccgctggccttgctgctccacgccgccaggccggaagtgcagctggttgaatctggcggaggactggttcagcctggcggatctctgagactgtcttgtgccgccagcggcttcagcttcagcgacttttggatgagctgggtccgacaggcccctggcaaaggacttgaatgggtcgccacaatcagccaggccggcagcgagaaggactacgtggactctgtgaagggcagattcaccatcagccgggacaacgccaagaagtccctgtacctccagatgaacagcctgagagccgaggacaccgccgtgtactattgtgcctctggcgtgtacagcttcgactacagaggccagggcaccctggtcacagtctcttctggtaccggcggaggcggatctggcggcggaggtagcggtggcggaggatctgaattcgacatcgtgatgacccagacacctctgagcctgagcgtgacacctggacagcctgccagcattagctgcaagagcagccagtctctgctggacggcgacggcaagacctacctgaattggctgctccagaagcctggacagagccctcagcggctgatctacctggtgtccaagctggatagcggcgtgcccgatagattttctggcagcggctctggcaccgacttcaccctgaagatcagcagagtggaagccgaggacgtgggcgtgtactactgttggcagggcacacacttccccagaacattcggccagggcacaaagctggaaatcaaactcgaggacctgaagaacgtgttcccacctgaggtggccgtgttcgagcctagcgaggccgagatcagccacacccagaaagccaccctcgtgtgcctggctaccggcttctaccccgaccatgtggaactgtcttggtgggtcaacggcaaagaggtgcacagcggcgtgtgtaccgacccccagccactgaaagaacagcccgccctgaacgacagccggtactgcctgagcagcagactgagagtgtccgccaccttctggcagaacccccggaaccacttcagatgccaggtgcagttctacggcctgagcgagaacgacgagtggacccaggacagagccaagcccgtgacccagatcgtgtctgccgaagcctggggcagagccgattgcggctttaccagcgagagctaccagcagggcgtgctgagcgccaccatcctgtacgagatcctgctgggcaaggccaccctgtacgccgtgctggtgtctgccctggtgctgatggctatggtcaagcggaaggacagccggggaagggccaagcgatctggatctggagcaacaaacttctcactactcaaacaagcaggtgacgtggaggagaatcccgggcctactagtatggactggatttggcgcatccttttccttgtcggcgctgctaccggcgcgcattccttcgaacaagtgcaactggttcagagcggagccgaagtgaagaaacctggggcctctgtgaaggtgtcctgcaaggccagcggctacaccttcaaggacacctacatccactgggtccgacaggcccctggacaaggacttgagtggatgggcagaatcgaccccgccaacggcaacaccaaatacgaccccaagttccagggcagagtgaccatgaccagagacaccagcatcagcaccgcctacatggaactgagccggctgagatccgatgacaccgccgtgtactattgcgctagaagaggcggagtggattggggccagggaacactggttaccgtgtctagtacgcgtatccagaaccctgatcctgccgtgtaccagctgcgggatagcaagagcagcgacaagagcgtgtgtctgttcaccgacttcgacagccagaccaacgtgtcccagagcaaggactccgacgtgtacatcaccgataagtgcgtgctggacatgcggagcatggacttcaagagcaactccgccgtggcctggtccaacaagtccgatttcgcctgcgccaacgccttcaacaacagcattatccccgaggacacattcttcccaagccccgagagcagctgcgacgtgaagctggtggaaaagagcttcgagacagacaccaacctgaacttccagaacctgagcgtgatcggcttcagaatcctgctgctgaaagtggccggctttaacctgctgatgaccctgcggctgtggtccagc

SEQ ID NO: 1974 - DNA, 2265 bp, Artificial Sequence
  Synthetic Polynucloetide
atggccttaccagtgaccgccttgctcctgccgctggccttgctgctccacgccgccaggccggaagtgcagctggttgaatctggcggaggactggttcagcctggcggatctctgagactgtcttgtgccgccagcggcttcagcttcagcgacttttggatgagctgggtccgacaggcccctggcaaaggacttgaatgggtcgccacaatcagccaggccggcagcgagaaggactacgtggactctgtgaagggcagattcaccatcagccgggacaacgccaagaagtccctgtacctccagatgaacagcctgagagccgaggacaccgccgtgtactattgtgcctctggcgtgtacagcttcgactacagaggccagggcaccctggtcacagtctcttctggtaccggcggaggcggatctggcggcggaggtagcggtggcggaggatctgaattcgacatccagatgacacagagccctagcagcctgtctgccagcgtgggagacagagtgaccatcacatgcaaggccagccaggatgtgtctacagccgtggcctggttccagcagaagcctggaaaagcccctaagctgctgatctacagccccagctacagatacaccggcgtgcccagcagattttctggcagcggctctggcaccgacttcaccctgacaatatccagcctccagcctgaggacttcacctactactgccagcagctctacagcaccccttacacattcggccagggcaccaaggtggaaatcaaactcgaggacctgaagaacgtgttcccacctgaggtggccgtgttcgagcctagcgaggccgagatcagccacacccagaaagccaccctcgtgtgcctggctaccggcttctaccccgaccatgtggaactgtcttggtgggtcaacggcaaagaggtgcacagcggcgtgtgtaccgacccccagccactgaaagaacagcccgccctgaacgacagccggtactgcctgagcagcagactgagagtgtccgccaccttctggcagaacccccggaaccacttcagatgccaggtgcagttctacggcctgagcgagaacgacgagtggacccaggacagagccaagcccgtgacccagatcgtgtctgccgaagcctggggcagagccgattgcggctttaccagcgagagctaccagcagggcgtgctgagcgccaccatcctgtacgagatcctgctgggcaaggccaccctgtacgccgtgctggtgtctgccctggtgctgatggctatggtcaagcggaaggacagccggggaagggccaagcgatctggatctggagcaacaaacttctcactactcaaacaagcaggtgacgtggaggagaatcccgggcctactagtatggactggatttggcgcatccttttccttgtcggcgctgctaccggcgcgcattccttcgaagaagtgcaactggttcagagcggagccgaagtgaagaaacctggggcctctgtgaaggtgtcctgcaaagccagcggctacacctttaccgactactacctggacgtggtcgtgcggcaagctcctggacaaggactggaatggatcggcagagtgaacccctacaacggcggcaccatctacaaccagaaattcaagggaagagtgaccctgaccagagacaccagcacctccacagcctacctggaactgagcagcctgagaagcgaagataccgccgtgtactactgcgccagggaccactacagatatgaccctctgctggactactggggccagggaaccctggttacagtgtctagtacgcgtatccagaaccctgatcctgccgtgtaccagctgcgggatagcaagagcagcgacaagagcgtgtgtctgttcaccgacttcgacagccagaccaacgtgtcccagagcaaggactccgacgtgtacatcaccgataagtgcgtgctggacatgcggagcatggacttcaagagcaactccgccgtggcctggtccaacaagtccgatttcgcctgcgccaacgccttcaacaacagcattatccccgaggacacattcttcccaagccccgagagcagctgcgacgtgaagctggtggaaaagagcttcgagacagacaccaacctgaacttccagaacctgagcgtgatcggcttcagaatcctgctgctgaaagtggccggctttaacctgctgatgaccctgcggctgtggtccagc

SEQ ID NO: 1975 - DNA, 2283 bp, Artificial Sequence
  Synthetic Polynucloetide
atggccttaccagtgaccgccttgctcctgccgctggccttgctgctccacgccgccaggccggaagtgcagctggttgaatctggcggaggactggttcagcctggcggatctctgagactgtcttgtgccgccagcggcttcagcttcagcgacttttggatgagctgggtccgacaggcccctggcaaaggacttgaatgggtcgccacaatcagccaggccggcagcgagaaggactacgtggactctgtgaagggcagattcaccatcagccgggacaacgccaagaagtccctgtacctccagatgaacagcctgagagccgaggacaccgccgtgtactattgtgcctctggcgtgtacagcttcgactacagaggccagggcaccctggtcacagtctcttctggtaccggcggaggcggatctggcggcggaggtagcggtggcggaggatctgaattcgacatccagatgacacagagccctagcagcctgtctgccagcgtgggagacagagtgaccatcacctgtagagccagccagagcgtgtccaccagcagctacaactacatgcactggtatcagcagaagcccggcaagcctcctaagctgctgattaagtacgccagcaacctggaaagcggcgtgcccagcagattttctggcagcggctctggcaccgacttcaccctgacaatatccagcctccagcctgaggacttcgccacctactactgtcagcactcctgggagatccctctgacattcggccagggcaccaaggtggaaatcaaactcgaggacctgaagaacgtgttcccacctgaggtggccgtgttcgagcctagcgaggccgagatcagccacacccagaaagccaccctcgtgtgcctggctaccggcttctaccccgaccatgtggaactgtcttggtgggtcaacggcaaagaggtgcacagcggcgtgtgtaccgacccccagccactgaaagaacagcccgccctgaacgacagccggtactgcctgagcagcagactgagagtgtccgccaccttctggcagaacccccggaaccacttcagatgccaggtgcagttctacggcctgagcgagaacgacgagtggacccaggacagagccaagcccgtgacccagatcgtgtctgccgaagcctggggcagagccgattgcggctttaccagcgagagctaccagcagggcgtgctgagcgccaccatcctgtacgagatcctgctgggcaaggccaccctgtacgccgtgctggtgtctgccctggtgctgatggctatggtcaagcggaaggacagccggggaagggccaagcgatctggatctggagcaacaaacttctcactactcaaacaagcaggtgacgtggaggagaatcccgggcctactagtatggactggatttggcgcatccttttccttgtcggcgctgctaccggcgcgcattccttcgaagaagtgcaactggttcagagcggagccgaagtgaagaaacctggggcctctgtgaaggtgtcctgcaaggccagcggctacagcttcaccgactattatatgcactgggtccgacaggctccaggccagggacttgagtggatcggcagaatcaacccctacaacggcgctgccttctacagccagaacttcaaggatagagtgaccctgaccgtggacaccagcaccagcacagcctacctggaactgagcagcctgagaagcgaggacaccgccgtgtactactgcgccattgagagaggcgctgacctggaaggctacgctatggattattggggccagggaaccctggtcaccgtgtcatctacgcgtatccagaaccctgatcctgccgtgtaccagctgcgggatagcaagagcagcgacaagagcgtgtgtctgttcaccgacttcgacagccagaccaacgtgtcccagagcaaggactccgacgtgtacatcaccgataagtgcgtgctggacatgcggagcatggacttcaagagcaactccgccgtggcctggtccaacaagtccgatttcgcctgcgccaacgccttcaacaacagcattatccccgaggacacattcttcccaagccccgagagcagctgcgacgtgaagctggtggaaaagagcttcgagacagacaccaacctgaacttccagaacctgagcgtgatcggcttcagaatcctgctgctgaaagtggccggctttaacctgctgatgaccctgcggctgtggtccagc

SEQ ID NO: 1976 - DNA, 2277 bp, Artificial Sequence
  Synthetic Polynucloetide
atggccttaccagtgaccgccttgctcctgccgctggccttgctgctccacgccgccaggccggaagtgcagctggttgaatctggcggaggactggttcagcctggcggatctctgagactgtcttgtgccgccagcggcttcagcttcagcgacttttggatgagctgggtccgacaggcccctggcaaaggacttgaatgggtcgccacaatcagccaggccggcagcgagaaggactacgtggactctgtgaagggcagattcaccatcagccgggacaacgccaagaagtccctgtacctccagatgaacagcctgagagccgaggacaccgccgtgtactattgtgcctctggcgtgtacagcttcgactacagaggccagggcaccctggtcacagtctcttctggtaccggcggaggcggatctggcggcggaggtagcggtggcggaggatctgaattcgagatcgtgctgacacagtctccagccacactgagcgcttctccaggcgagagagtgaccctgacctgtagagccagcagcaacgtgatctccagctacgtgcactggtatcagcagaagcctggcagcagccccagactgtttctgtacagcaccagcaatctggcctccggcgtgccaagcagattttctggctctggcagcggcaccgacttcacctttaccatctctagcctggaagccgaggacgccgccacctactactgtcagcagtacagcggctaccctctgaccttcggccagggcacaagactggaaatcaaactcgaggacctgaagaacgtgttcccacctgaggtggccgtgttcgagcctagcgaggccgagatcagccacacccagaaagccaccctcgtgtgcctggctaccggcttctaccccgaccatgtggaactgtcttggtgggtcaacggcaaagaggtgcacagcggcgtgtgtaccgacccccagccactgaaagaacagcccgccctgaacgacagccggtactgcctgagcagcagactgagagtgtccgccaccttctggcagaacccccggaaccacttcagatgccaggtgcagttctacggcctgagcgagaacgacgagtggacccaggacagagccaagcccgtgacccagatcgtgtctgccgaagcctggggcagagccgattgcggctttaccagcgagagctaccagcagggcgtgctgagcgccaccatcctgtacgagatcctgctgggcaaggccaccctgtacgccgtgctggtgtctgccctggtgctgatggctatggtcaagcggaaggacagccggggaagggccaagcgatctggatctggagcaacaaacttctcactactcaaacaagcaggtgacgtggaggagaatcccgggcctactagtatggactggatttggcgcatccttttccttgtcggcgctgctaccggcgcgcattccttcgaacaagttcagctgcaagagtctggccctggcctggtcaagcctagcgaaacactgagcctgacctgcgccgtgtctggctactctatcaccagcgcctactattggaactggatcagacagcctcctggcaaaggactggaatggatcggctacatcagctacgacggcagaaacaactacaaccccagcctgaagaaccggatcaccatcaatcccgacaccagcaagaaccagttcagcctccagctgaacagcgtgacccctgaggataccgccgtgtactactgtgccagagaaggcgactacgacgtgggcaactactacgctatggactactggggccagggaaccctggtcacagtctcttctacgcgtatccagaaccctgatcctgccgtgtaccagctgcgggatagcaagagcagcgacaagagcgtgtgtctgttcaccgacttcgacagccagaccaacgtgtcccagagcaaggactccgacgtgtacatcaccgataagtgcgtgctggacatgcggagcatggacttcaagagcaactccgccgtggcctggtccaacaagtccgatttcgcctgcgccaacgccttcaacaacagcattatccccgaggacacattcttcccaagccccgagagcagctgcgacgtgaagctggtggaaaagagcttcgagacagacaccaacctgaacttccagaacctgagcgtgatcggcttcagaatcctgctgctgaaagtggccggctttaacctgctgatgaccctgcggctgtggtccagc

SEQ ID NO: 1977 - DNA, 2277 bp, Artificial Sequence
  Synthetic Polynucloetide
atggccttaccagtgaccgccttgctcctgccgctggccttgctgctccacgccgccaggccggaagtgcagctggttgaatctggcggaggactggttcagcctggcggatctctgagactgtcttgtgccgccagcggcttcagcttcagcgacttttggatgagctgggtccgacaggcccctggcaaaggacttgaatgggtcgccacaatcagccaggccggcagcgagaaggactacgtggactctgtgaagggcagattcaccatcagccgggacaacgccaagaagtccctgtacctccagatgaacagcctgagagccgaggacaccgccgtgtactattgtgcctctggcgtgtacagcttcgactacagaggccagggcaccctggtcacagtctcttctggtaccggcggaggcggatctggcggcggaggtagcggtggcggaggatctgaattcgagatcgtgctgacacagtctcccgccacactgtcactgtctccaggcgaaagagccacactgagctgtagagccagcagcaacgtgatctccagctacgtgcactggtatcagcagaagcctggacaggcccctcggctgctgatctacagcacaagcaatctggcctctggcatccccgccagattttctggctctggaagcggcaccgacttcaccctgaccataagcagcctggaacctgaggacttcgccgtgtactactgccagcagtatagcggctaccctctgaccttcggccagggcacaagactggaaatcaaactcgaggacctgaagaacgtgttcccacctgaggtggccgtgttcgagcctagcgaggccgagatcagccacacccagaaagccaccctcgtgtgcctggctaccggcttctaccccgaccatgtggaactgtcttggtgggtcaacggcaaagaggtgcacagcggcgtgtgtaccgacccccagccactgaaagaacagcccgccctgaacgacagccggtactgcctgagcagcagactgagagtgtccgccaccttctggcagaacccccggaaccacttcagatgccaggtgcagttctacggcctgagcgagaacgacgagtggacccaggacagagccaagcccgtgacccagatcgtgtctgccgaagcctggggcagagccgattgcggctttaccagcgagagctaccagcagggcgtgctgagcgccaccatcctgtacgagatcctgctgggcaaggccaccctgtacgccgtgctggtgtctgccctggtgctgatggctatggtcaagcggaaggacagccggggaagggccaagcgatctggatctggagcaacaaacttctcactactcaaacaagcaggtgacgtggaggagaatcccgggcctactagtatggactggatttggcgcatccttttccttgtcggcgctgctaccggcgcgcattccttcgaagaagtgcaactggtggaaagtggcggcggactggtgcaacctggaagaagcctgagactgtcctgtgccgccagcggctactctatcacaagcgcctactactggaactgggtccgacaggctcctggcaaaggactggaatgggtgtcctacatcagctacgacggcagaaacaactacaaccccagcctgaagaaccgcttcaccatcagccgggacaacgccaagaagtccctgtacctccagatgaacagcctgagagccgaggacacagccctgtactattgcgccaaagagggcgactacgacgtcggcaactactacgctatggactactggggccagggaaccaccgtgactgtctcttctacgcgtatccagaaccctgatcctgccgtgtaccagctgcgggatagcaagagcagcgacaagagcgtgtgtctgttcaccgacttcgacagccagaccaacgtgtcccagagcaaggactccgacgtgtacatcaccgataagtgcgtgctggacatgcggagcatggacttcaagagcaactccgccgtggcctggtccaacaagtccgatttcgcctgcgccaacgccttcaacaacagcattatccccgaggacacattcttcccaagccccgagagcagctgcgacgtgaagctggtggaaaagagcttcgagacagacaccaacctgaacttccagaacctgagcgtgatcggcttcagaatcctgctgctgaaagtggccggctttaacctgctgatgaccctgcggctgtggtccagc

SEQ ID NO: 1978 - DNA, 2274 bp, Artificial Sequence
  Synthetic Polynucloetide
atggccttaccagtgaccgccttgctcctgccgctggccttgctgctccacgccgccaggccggaagtgcagctggttgaatctggcggaggactggttcagcctggcggatctctgagactgtcttgtgccgccagcggcttcagcttcagcgacttttggatgagctgggtccgacaggcccctggcaaaggacttgaatgggtcgccacaatcagccaggccggcagcgagaaggactacgtggactctgtgaagggcagattcaccatcagccgggacaacgccaagaagtccctgtacctccagatgaacagcctgagagccgaggacaccgccgtgtactattgtgcctctggcgtgtacagcttcgactacagaggccagggcaccctggtcacagtctcttctggtaccggcggaggcggatctggcggcggaggtagcggtggcggaggatctgaattcgacgtggtcatgacacagaccccactgagcctgcctgtgtctctgggagatcaggccagcatctcctgtagaagcagccagagcctggtgcacagcaacggcaacacctacctgcggtggtatctccagaagcctggacagagccccaaggtgctgatctacaaggtgtccaacagagtgtccggcgtgcccgatagattttctggcagcggctctggcaccgacttcaccctgaagatcaatagagtggaagccgaggacctgggcgtgtacttctgtagccagagcacccatgtgccttggacctttggcggaggcaccaagctggaaatcaagctcgaggacctgaagaacgtgttcccacctgaggtggccgtgttcgagcctagcgaggccgagatcagccacacccagaaagccaccctcgtgtgcctggctaccggcttctaccccgaccatgtggaactgtcttggtgggtcaacggcaaagaggtgcacagcggcgtgtgtaccgacccccagccactgaaagaacagcccgccctgaacgacagccggtactgcctgagcagcagactgagagtgtccgccaccttctggcagaacccccggaaccacttcagatgccaggtgcagttctacggcctgagcgagaacgacgagtggacccaggacagagccaagcccgtgacccagatcgtgtctgccgaagcctggggcagagccgattgcggctttaccagcgagagctaccagcagggcgtgctgagcgccaccatcctgtacgagatcctgctgggcaaggccaccctgtacgccgtgctggtgtctgccctggtgctgatggctatggtcaagcggaaggacagccggggaagggccaagcgatctggatctggagcaacaaacttctcactactcaaacaagcaggtgacgtggaggagaatcccgggcctactagtatggactggatttggcgcatccttttccttgtcggcgctgctaccggcgcgcattccttcgaaggcgtgaagctggacgagacaggcggaggacttgttcaacctggcggagccatgaagctgagctgtgtgaccagcggctttaccttcggccactactggatgaactgggtccgacagtcccctgagaaaggactggaatgggtcgcccagttcagaaacaagccctacaactacgaaacctactacagcgacagcgtgaagggcagattcaccatcagccgggacgacagcaagtccagcgtgtacctccagatgaacaacctgcgcgtggaagataccggcatctactactgtaccggggccagctacggcatggaatatctcggccagggcaccagcgtgaccgtgtctacaacgcgtatccagaaccctgatcctgccgtgtaccagctgcgggatagcaagagcagcgacaagagcgtgtgtctgttcaccgacttcgacagccagaccaacgtgtcccagagcaaggactccgacgtgtacatcaccgataagtgcgtgctggacatgcggagcatggacttcaagagcaactccgccgtggcctggtccaacaagtccgatttcgcctgcgccaacgccttcaacaacagcattatccccgaggacacattcttcccaagccccgagagcagctgcgacgtgaagctggtggaaaagagcttcgagacagacaccaacctgaacttccagaacctgagcgtgatcggcttcagaatcctgctgctgaaagtggccggctttaacctgctgatgaccctgcggctgtggtccagc

SEQ ID NO: 1979 - DNA, 2292 bp, Artificial Sequence
  Synthetic Polynucloetide
atggccttaccagtgaccgccttgctcctgccgctggccttgctgctccacgccgccaggccggaagtgcagctggttgaatctggcggaggactggttcagcctggcggatctctgagactgtcttgtgccgccagcggcttcagcttcagcgacttttggatgagctgggtccgacaggcccctggcaaaggacttgaatgggtcgccacaatcagccaggccggcagcgagaaggactacgtggactctgtgaagggcagattcaccatcagccgggacaacgccaagaagtccctgtacctccagatgaacagcctgagagccgaggacaccgccgtgtactattgtgcctctggcgtgtacagcttcgactacagaggccagggcaccctggtcacagtctcttctggtaccggcggaggcggatctggcggcggaggtagcggtggcggaggatctgaattccaggtgcaactggtggaatctggcggcaatctggttcagcctggcggctctctgagactgtcttgtgccgccagcggcttcaccttcggcagcttttctatgagctgggtccgacaagctcctggcggaggacttgaatgggtggcaggactgtctgccagaagcagcctgacacactacgccgactctgtgaagggcagattcaccatcagccgggacaacgccaagaacagcgtgtacctccagatgaacagcctgagagtggaagataccgccgtgtactactgcgccagaagaagctacgacagcagcggctactggggccacttctacagctacatggatgtgtggggccagggcaccctggttacagtttctctcgaggacctgaagaacgtgttcccacctgaggtggccgtgttcgagcctagcgaggccgagatcagccacacccagaaagccaccctcgtgtgcctggctaccggcttctaccccgaccatgtggaactgtcttggtgggtcaacggcaaagaggtgcacagcggcgtgtgtaccgacccccagccactgaaagaacagcccgccctgaacgacagccggtactgcctgagcagcagactgagagtgtccgccaccttctggcagaacccccggaaccacttcagatgccaggtgcagttctacggcctgagcgagaacgacgagtggacccaggacagagccaagcccgtgacccagatcgtgtctgccgaagcctggggcagagccgattgcggctttaccagcgagagctaccagcagggcgtgctgagcgccaccatcctgtacgagatcctgctgggcaaggccaccctgtacgccgtgctggtgtctgccctggtgctgatggctatggtcaagcggaaggacagccggggaagggccaagcgatctggatctggagcaacaaacttctcactactcaaacaagcaggtgacgtggaggagaatcccgggcctactagtatggactggatttggcgcatccttttccttgtcggcgctgctaccggcgcgcattccttcgaatctgtgctgacccagcctagctccgtgtctgctgctcctggacagaaagtgaccatctcctgtagcggcagcaccagcaacatcggcaacaactacgtgtcctggtatcagcagcaccccggcaaggcccctaagctgatgatctacgacgtgtccaagaggcccagcggcgtgccagatagattttccggcagcaagagcggcaacagcgccagcctggatattagcggactccagtctgaggacgaggccgactactattgcgccgcctgggatgatagcctgagcgagtttctgtttggcaccggcaccaagctgacagtgcttggaacgcgtatccagaaccctgatcctgccgtgtaccagctgcgggatagcaagagcagcgacaagagcgtgtgtctgttcaccgacttcgacagccagaccaacgtgtcccagagcaaggactccgacgtgtacatcaccgataagtgcgtgctggacatgcggagcatggacttcaagagcaactccgccgtggcctggtccaacaagtccgatttcgcctgcgccaacgccttcaacaacagcattatccccgaggacacattcttcccaagccccgagagcagctgcgacgtgaagctggtggaaaagagcttcgagacagacaccaacctgaacttccagaacctgagcgtgatcggcttcagaatcctgctgctgaaagtggccggctttaacctgctgatgaccctgcggctgtggtccagc

SEQ ID NO: 1980 - DNA, 2277 bp, Artificial Sequence
  Synthetic Polynucloetide
atggccttaccagtgaccgccttgctcctgccgctggccttgctgctccacgccgccaggccggaagtgcagctggttgaatctggcggaggactggttcagcctggcggatctctgagactgtcttgtgccgccagcggcttcagcttcagcgacttttggatgagctgggtccgacaggcccctggcaaaggacttgaatgggtcgccacaatcagccaggccggcagcgagaaggactacgtggactctgtgaagggcagattcaccatcagccgggacaacgccaagaagtccctgtacctccagatgaacagcctgagagccgaggacaccgccgtgtactattgtgcctctggcgtgtacagcttcgactacagaggccagggcaccctggtcacagtctcttctggtaccggcggaggcggatctggcggcggaggtagcggtggcggaggatctgaattcgacgtggtcatgacacagagcccttctagcctgtctgccagcgtgggcgacagagtgacaatcacctgtcagagcagcctggacatcagccactacctgaactggtatcagcagaagcccggcaaggcccctaagctgctgatctacgacgccagcaatctggaaaccggcgtgcccagcagattttctggcagcggaagcggcacccacttcaccttcacaatatccagcctccagcctgaggacttcgccacctactactgccagcagtacgacaacctgcctctgacctttggcggaggcaccaagctggaaatcaagagactcgaggacctgaagaacgtgttcccacctgaggtggccgtgttcgagcctagcgaggccgagatcagccacacccagaaagccaccctcgtgtgcctggctaccggcttctaccccgaccatgtggaactgtcttggtgggtcaacggcaaagaggtgcacagcggcgtgtgtaccgacccccagccactgaaagaacagcccgccctgaacgacagccggtactgcctgagcagcagactgagagtgtccgccaccttctggcagaacccccggaaccacttcagatgccaggtgcagttctacggcctgagcgagaacgacgagtggacccaggacagagccaagcccgtgacccagatcgtgtctgccgaagcctggggcagagccgattgcggctttaccagcgagagctaccagcagggcgtgctgagcgccaccatcctgtacgagatcctgctgggcaaggccaccctgtacgccgtgctggtgtctgccctggtgctgatggctatggtcaagcggaaggacagccggggaagggccaagcgatctggatctggagcaacaaacttctcactactcaaacaagcaggtgacgtggaggagaatcccgggcctactagtatggactggatttggcgcatccttttccttgtcggcgctgctaccggcgcgcattccttcgaacaagttcaactggttcaatcaggcggaggcgtggtgcaacctggtggctctctgagagtgtcttgtgctgcctctggcgtgaccctgagcgactatggaatgcactgggtccgacaggcccctggcaaaggacttgagtgggtcgccttcatcagaaacgacggcagcgacaagtattacgccgacagcgtgaagggcagattcaccatcagccgggacaacagcgagaaaaccgtgtctctccagatgtctagcctgagagccgaggacaccgccgtgtactactgtgccaagaatggcgagagcggccctctggactactggtatctggatctgtggggcagaggcaccctggtcacagtctcttctacgcgtatccagaaccctgatcctgccgtgtaccagctgcgggatagcaagagcagcgacaagagcgtgtgtctgttcaccgacttcgacagccagaccaacgtgtcccagagcaaggactccgacgtgtacatcaccgataagtgcgtgctggacatgcggagcatggacttcaagagcaactccgccgtggcctggtccaacaagtccgatttcgcctgcgccaacgccttcaacaacagcattatccccgaggacacattcttcccaagccccgagagcagctgcgacgtgaagctggtggaaaagagcttcgagacagacaccaacctgaacttccagaacctgagcgtgatcggcttcagaatcctgctgctgaaagtggccggctttaacctgctgatgaccctgcggctgtggtccagc

SEQ ID NO: 1981 - DNA, 2289 bp, Artificial Sequence
  Synthetic Polynucloetide
atggccttaccagtgaccgccttgctcctgccgctggccttgctgctccacgccgccaggccggaagtgcagctggttgaatctggcggaggactggttcagcctggcggatctctgagactgtcttgtgccgccagcggcttcagcttcagcgacttttggatgagctgggtccgacaggcccctggcaaaggacttgaatgggtcgccacaatcagccaggccggcagcgagaaggactacgtggactctgtgaagggcagattcaccatcagccgggacaacgccaagaagtccctgtacctccagatgaacagcctgagagccgaggacaccgccgtgtactattgtgcctctggcgtgtacagcttcgactacagaggccagggcaccctggtcacagtctcttctggtaccggcggaggcggatctggcggcggaggtagcggtggcggaggatctgaattcagctacgagctgacacagcctccatccgtgtctggcacacctggacagagagtggctatctcctgtagcggcagcagcagcaacatcggcaccagaatggtcacctggtatcagcacgtgccaggcacagcccctaagctgctgatcttcaacaacaaccagcggcctagcggcgtgcccgatagattttctgccagcaagagcggcacaagcgccagcctggctatcatcggactccagtctgacgacgaggccgactactactgtgccacctgggacgacaacgtgaagtcctacgtgttcggcaccggcaccaaagtgacagtgcttggaagtagactcgaggacctgaagaacgtgttcccacctgaggtggccgtgttcgagcctagcgaggccgagatcagccacacccagaaagccaccctcgtgtgcctggctaccggcttctaccccgaccatgtggaactgtcttggtgggtcaacggcaaagaggtgcacagcggcgtgtgtaccgacccccagccactgaaagaacagcccgccctgaacgacagccggtactgcctgagcagcagactgagagtgtccgccaccttctggcagaacccccggaaccacttcagatgccaggtgcagttctacggcctgagcgagaacgacgagtggacccaggacagagccaagcccgtgacccagatcgtgtctgccgaagcctggggcagagccgattgcggctttaccagcgagagctaccagcagggcgtgctgagcgccaccatcctgtacgagatcctgctgggcaaggccaccctgtacgccgtgctggtgtctgccctggtgctgatggctatggtcaagcggaaggacagccggggaagggccaagcgatctggatctggagcaacaaacttctcactactcaaacaagcaggtgacgtggaggagaatcccgggcctactagtatggactggatttggcgcatccttttccttgtcggcgctgctaccggcgcgcattccttcgaacttgaaatggcccaggttcagctccagcagtggggagctggactgctgaagcctagcgagacactgagcctgacctgtgctgtgtacggcggcagcttcagcggctactactggtcctggatcagacagcctcctggcaaaggactggaatggatcggcgagatcaaccacagcggctccaccaactacaaccccagcctgaagtccagagtgaccatcagcgtggacaccagcaagaaccagttctccctgaagctgagcagcgtgacagccgctgataccgccgtgtactattgcgctagagcccctcagtcttggtacgtgggagatgtgtggggccagggcacactggttacagtgtcatctacgcgtatccagaaccctgatcctgccgtgtaccagctgcgggatagcaagagcagcgacaagagcgtgtgtctgttcaccgacttcgacagccagaccaacgtgtcccagagcaaggactccgacgtgtacatcaccgataagtgcgtgctggacatgcggagcatggacttcaagagcaactccgccgtggcctggtccaacaagtccgatttcgcctgcgccaacgccttcaacaacagcattatccccgaggacacattcttcccaagccccgagagcagctgcgacgtgaagctggtggaaaagagcttcgagacagacaccaacctgaacttccagaacctgagcgtgatcggcttcagaatcctgctgctgaaagtggccggctttaacctgctgatgaccctgcggctgtggtccagc

SEQ ID NO: 1982 - DNA, 2280 bp, Artificial Sequence
  Synthetic Polynucloetide
atggccttaccagtgaccgccttgctcctgccgctggccttgctgctccacgccgccaggccggaagtgcagctggttgaatctggcggaggactggttcagcctggcggatctctgagactgtcttgtgccgccagcggcttcagcttcagcgacttttggatgagctgggtccgacaggcccctggcaaaggacttgaatgggtcgccacaatcagccaggccggcagcgagaaggactacgtggactctgtgaagggcagattcaccatcagccgggacaacgccaagaagtccctgtacctccagatgaacagcctgagagccgaggacaccgccgtgtactattgtgcctctggcgtgtacagcttcgactacagaggccagggcaccctggtcacagtctcttctggtaccggcggaggcggatctggcggcggaggtagcggtggcggaggatctgaattccagtctgtgctgacacagcctcctagcctgtctgtggcccctggaaagacagccagcatcacatgcggcggcaacaacatcggcatgaagtccgtgcactggtatcagcagaggccaggacaggctcctgtgctggtcatctactacgacagcgacagaccctctggcatccccggcagattttccggcagcaactctggcaataccgccacactgaccatctccagagtggaagctggcgacgaggccgactactactgccaagtgtgggataccaccggcgatcaccctggctatgtgtttggcaccggcaccaaagtgacagtgcttctcgaggacctgaagaacgtgttcccacctgaggtggccgtgttcgagcctagcgaggccgagatcagccacacccagaaagccaccctcgtgtgcctggctaccggcttctaccccgaccatgtggaactgtcttggtgggtcaacggcaaagaggtgcacagcggcgtgtgtaccgacccccagccactgaaagaacagcccgccctgaacgacagccggtactgcctgagcagcagactgagagtgtccgccaccttctggcagaacccccggaaccacttcagatgccaggtgcagttctacggcctgagcgagaacgacgagtggacccaggacagagccaagcccgtgacccagatcgtgtctgccgaagcctggggcagagccgattgcggctttaccagcgagagctaccagcagggcgtgctgagcgccaccatcctgtacgagatcctgctgggcaaggccaccctgtacgccgtgctggtgtctgccctggtgctgatggctatggtcaagcggaaggacagccggggaagggccaagcgatctggatctggagcaacaaacttctcactactcaaacaagcaggtgacgtggaggagaatcccgggcctactagtatggactggatttggcgcatccttttccttgtcggcgctgctaccggcgcgcattccttcgaacaagttcaactggttcagagcggagccgaagtgaagaaacctggcagcagcgtgaaggtgtcctgcaaagcaagcggcggcacctttagcagctacgccatctcttgggtccgacaggcacctggacaaggactggaatggatgggcggcatcatccccatcttcggcacagccaattacgcccagaaattccagggcagagtgaccatcaccgccgacgagtctacaagcaccgcctacatggaactgagcagcctgagaagcgaggacaccgccgtgtactattgtgccagaggcgtgtacggctacagcggctctgccccttatgatgagtggggccagggaaccctggtcaccgtttcttctacgcgtatccagaaccctgatcctgccgtgtaccagctgcgggatagcaagagcagcgacaagagcgtgtgtctgttcaccgacttcgacagccagaccaacgtgtcccagagcaaggactccgacgtgtacatcaccgataagtgcgtgctggacatgcggagcatggacttcaagagcaactccgccgtggcctggtccaacaagtccgatttcgcctgcgccaacgccttcaacaacagcattatccccgaggacacattcttcccaagccccgagagcagctgcgacgtgaagctggtggaaaagagcttcgagacagacaccaacctgaacttccagaacctgagcgtgatcggcttcagaatcctgctgctgaaagtggccggctttaacctgctgatgaccctgcggctgtggtccagc

SEQ ID NO: 1983 - DNA, 2274 bp, Artificial Sequence
  Synthetic Polynucloetide
atggccttaccagtgaccgccttgctcctgccgctggccttgctgctccacgccgccaggccggaagtgcagctggttgaatctggcggaggactggttcagcctggcggatctctgagactgtcttgtgccgccagcggcttcagcttcagcgacttttggatgagctgggtccgacaggcccctggcaaaggacttgaatgggtcgccacaatcagccaggccggcagcgagaaggactacgtggactctgtgaagggcagattcaccatcagccgggacaacgccaagaagtccctgtacctccagatgaacagcctgagagccgaggacaccgccgtgtactattgtgcctctggcgtgtacagcttcgactacagaggccagggcaccctggtcacagtctcttctggtaccggcggaggcggatctggcggcggaggtagcggtggcggaggatctgaattcgaggtgcaactggttgagtctggcggaggactggtgcagcctggaagaagcctgagactgtcttgtgccgccagcggcttcaccttcgacgattatgccatgcactgggtccgacaggcccctggcaaaggacttgaatgggtgtccggcatctcctggaacagcggctctatcggctacgccgattccgtgaagggcagattcaccatcagccgggacaacgccaagaacagcctgtacctccagatgaactccctgagagccgaggacacagccctgtactactgcgccaaagacaaaggcggaggctactacgacttttggagcggcagcgattattggggccagggcacactggtcacagtgtctagcctcgaggacctgaagaacgtgttcccacctgaggtggccgtgttcgagcctagcgaggccgagatcagccacacccagaaagccaccctcgtgtgcctggctaccggcttctaccccgaccatgtggaactgtcttggtgggtcaacggcaaagaggtgcacagcggcgtgtgtaccgacccccagccactgaaagaacagcccgccctgaacgacagccggtactgcctgagcagcagactgagagtgtccgccaccttctggcagaacccccggaaccacttcagatgccaggtgcagttctacggcctgagcgagaacgacgagtggacccaggacagagccaagcccgtgacccagatcgtgtctgccgaagcctggggcagagccgattgcggctttaccagcgagagctaccagcagggcgtgctgagcgccaccatcctgtacgagatcctgctgggcaaggccaccctgtacgccgtgctggtgtctgccctggtgctgatggctatggtcaagcggaaggacagccggggaagggccaagcgatctggatctggagcaacaaacttctcactactcaaacaagcaggtgacgtggaggagaatcccgggcctactagtatggactggatttggcgcatccttttccttgtcggcgctgctaccggcgcgcattccttcgaatcttctgagctgacacaggaccctgccgtgtctgttgctctgggccagacagtgcggattacctgtcagggcgatagcctgagaagctactacgcctcctggtatcagcagaagccaggccaggctcctgtgctggtcatctacggcaagaacaacagacccagcggcatccccgatagattcagcggaagcagctctggcaataccgccagcctgacaattactggcgctcaggccgaggacgaggccgactactactgcaacagcagagatagcagcggctgggttttcggcggaggcacaaaactgacagtgctgacgcgtatccagaaccctgatcctgccgtgtaccagctgcgggatagcaagagcagcgacaagagcgtgtgtctgttcaccgacttcgacagccagaccaacgtgtcccagagcaaggactccgacgtgtacatcaccgataagtgcgtgctggacatgcggagcatggacttcaagagcaactccgccgtggcctggtccaacaagtccgatttcgcctgcgccaacgccttcaacaacagcattatccccgaggacacattcttcccaagccccgagagcagctgcgacgtgaagctggtggaaaagagcttcgagacagacaccaacctgaacttccagaacctgagcgtgatcggcttcagaatcctgctgctgaaagtggccggctttaacctgctgatgaccctgcggctgtggtccagc

SEQ ID NO: 1984 - DNA, 2301 bp, Artificial Sequence
  Synthetic Polynucloetide
atggccttaccagtgaccgccttgctcctgccgctggccttgctgctccacgccgccaggccggaagtgcagctggttgaatctggcggaggactggttcagcctggcggatctctgagactgtcttgtgccgccagcggcttcagcttcagcgacttttggatgagctgggtccgacaggcccctggcaaaggacttgaatgggtcgccacaatcagccaggccggcagcgagaaggactacgtggactctgtgaagggcagattcaccatcagccgggacaacgccaagaagtccctgtacctccagatgaacagcctgagagccgaggacaccgccgtgtactattgtgcctctggcgtgtacagcttcgactacagaggccagggcaccctggtcacagtctcttctggtaccggcggaggcggatctggcggcggaggtagcggtggcggaggatctgaattcgaagtgcagctccagcagtctggacctggcctggttaagcctagccagacactgagcctgacctgtgccatcagcggcgatagcgtgctgagcaacagcgacacctggaactggatcagacagagccctagcagaggactggaatggctgggcagaacctaccacagaagcacttggtacgacgactacgccagctctgtgcggggcagagtgtccatcaatgtggacaccagcaagaaccagtacagcctgcaactgaacgccgtgacacctgaggataccggcgtgtactactgcgccagagacagactccaggacggcaactcttggagcgacgcctttgatgtgtggggccagggcacaatggtcaccgtttctagcctcgaggacctgaagaacgtgttcccacctgaggtggccgtgttcgagcctagcgaggccgagatcagccacacccagaaagccaccctcgtgtgcctggctaccggcttctaccccgaccatgtggaactgtcttggtgggtcaacggcaaagaggtgcacagcggcgtgtgtaccgacccccagccactgaaagaacagcccgccctgaacgacagccggtactgcctgagcagcagactgagagtgtccgccaccttctggcagaacccccggaaccacttcagatgccaggtgcagttctacggcctgagcgagaacgacgagtggacccaggacagagccaagcccgtgacccagatcgtgtctgccgaagcctggggcagagccgattgcggctttaccagcgagagctaccagcagggcgtgctgagcgccaccatcctgtacgagatcctgctgggcaaggccaccctgtacgccgtgctggtgtctgccctggtgctgatggctatggtcaagcggaaggacagccggggaagggccaagcgatctggatctggagcaacaaacttctcactactcaaacaagcaggtgacgtggaggagaatcccgggcctactagtatggactggatttggcgcatccttttccttgtcggcgctgctaccggcgcgcattccttcgaacaatctgctctgacacagcctgccagcgtgtcaggatctcctggacagagcatcaccatctcttgcaccggcaccagctctgatgtcggcggctacaattacgtgtcctggtatcagcagcaccccggcaaggcccctaagctgatgatctacgacgtgtccaacagacccagcggcgtgtccaatagattctccggcagcaagagcggcaacaccgccagcctgacaatttctggactgcaagccgaggacgaggccgactactactgtagcagctacaccagcagcagcacactggtgtacgtgttcggcacaggcaccaaagtgaccgtgcttacgcgtatccagaaccctgatcctgccgtgtaccagctgcgggatagcaagagcagcgacaagagcgtgtgtctgttcaccgacttcgacagccagaccaacgtgtcccagagcaaggactccgacgtgtacatcaccgataagtgcgtgctggacatgcggagcatggacttcaagagcaactccgccgtggcctggtccaacaagtccgatttcgcctgcgccaacgccttcaacaacagcattatccccgaggacacattcttcccaagccccgagagcagctgcgacgtgaagctggtggaaaagagcttcgagacagacaccaacctgaacttccagaacctgagcgtgatcggcttcagaatcctgctgctgaaagtggccggctttaacctgctgatgaccctgcggctgtggtccagc

SEQ ID NO: 1985 - DNA, 2235 bp, Artificial Sequence
  Synthetic Polynucloetide
atggccttaccagtgaccgccttgctcctgccgctggccttgctgctccacgccgccaggccggaagtgcagctggttgaatctggcggaggactggttcagcctggcggatctctgagactgtcttgtgccgccagcggcttcagcttcagcgacttttggatgagctgggtccgacaggcccctggcaaaggacttgaatgggtcgccacaatcagccaggccggcagcgagaaggactacgtggactctgtgaagggcagattcaccatcagccgggacaacgccaagaagtccctgtacctccagatgaacagcctgagagccgaggacaccgccgtgtactattgtgcctctggcgtgtacagcttcgactacagaggccagggcaccctggtcacagtctcttctggtaccggcggaggcggatctggcggcggaggtagcggtggcggaggatctgaattccaggtgcaactggttcagtctggggccgaagtgaagaaacctggggcctctgtgaaggtgtcctgcaaggcttccggctacacctttaccagctacgacatcaactgggtccgacaggccacaggccaaggactggaatggatgggctggatgaaccccaacagcggcaataccggctacgcccagaaattccagggcagagtgaccatgaccagaaacaccagcatcagcaccgcctacatggaactgagcagcctgagaagcgaggacaccgccgtgtactattgcgccagaggcgacagcaccaaggtggaaatcaaactcgaggacctgaagaacgtgttcccacctgaggtggccgtgttcgagcctagcgaggccgagatcagccacacccagaaagccaccctcgtgtgcctggctaccggcttctaccccgaccatgtggaactgtcttggtgggtcaacggcaaagaggtgcacagcggcgtgtgtaccgacccccagccactgaaagaacagcccgccctgaacgacagccggtactgcctgagcagcagactgagagtgtccgccaccttctggcagaacccccggaaccacttcagatgccaggtgcagttctacggcctgagcgagaacgacgagtggacccaggacagagccaagcccgtgacccagatcgtgtctgccgaagcctggggcagagccgattgcggctttaccagcgagagctaccagcagggcgtgctgagcgccaccatcctgtacgagatcctgctgggcaaggccaccctgtacgccgtgctggtgtctgccctggtgctgatggctatggtcaagcggaaggacagccggggaagggccaagcgatctggatctggagcaacaaacttctcactactcaaacaagcaggtgacgtggaggagaatcccgggcctactagtatggactggatttggcgcatccttttccttgtcggcgctgctaccggcgcgcattccttcgaacaatctgtgctgacccagcctagatccgtgtctggctctcctggacagagcgtgaccatctcttgtaccggcaccagctctgatgtcggcggctacaattacgtgtcctggtatcagcagcaccccggcgaagcccctaagctgattatctacgacgccgacaagcggcccagcggcatcagcaatagattcagctctggcaagagcggcaacaccgccagcctgacaatcagcggactccaggtggaagatgaggccgactactactgctgctcctatgccggcggaagcacctgggttttcggaggcggtacaaaagtgaccgtgctgacgcgtatccagaaccctgatcctgccgtgtaccagctgcgggatagcaagagcagcgacaagagcgtgtgtctgttcaccgacttcgacagccagaccaacgtgtcccagagcaaggactccgacgtgtacatcaccgataagtgcgtgctggacatgcggagcatggacttcaagagcaactccgccgtggcctggtccaacaagtccgatttcgcctgcgccaacgccttcaacaacagcattatccccgaggacacattcttcccaagccccgagagcagctgcgacgtgaagctggtggaaaagagcttcgagacagacaccaacctgaacttccagaacctgagcgtgatcggcttcagaatcctgctgctgaaagtggccggctttaacctgctgatgaccctgcggctgtggtccagc

SEQ ID NO: 1986 - DNA, 2301 bp, Artificial Sequence
  Synthetic Polynucloetide
atggccttaccagtgaccgccttgctcctgccgctggccttgctgctccacgccgccaggccggaagtgcagctggttgaatctggcggaggactggttcagcctggcggatctctgagactgtcttgtgccgccagcggcttcagcttcagcgacttttggatgagctgggtccgacaggcccctggcaaaggacttgaatgggtcgccacaatcagccaggccggcagcgagaaggactacgtggactctgtgaagggcagattcaccatcagccgggacaacgccaagaagtccctgtacctccagatgaacagcctgagagccgaggacaccgccgtgtactattgtgcctctggcgtgtacagcttcgactacagaggccagggcaccctggtcacagtctcttctggtaccggcggaggcggatctggcggcggaggtagcggtggcggaggatctgaattcgaagtgcagctccagcagtctggacctggcctggttaagcctagccagacactgagcctgacctgtgccatcagcggcgatagcgtgtcctctaatagcgccgcctggaactggatcagacagagccctagcagaggactggaatggctgggcagaacctactaccgcagcaagtggtacagcgactacgccgtgtccgtgaagtcccggatcaccatcaatcccgacaccagcaagaaccagttcagcctgcaactgaacagcgtgacccctgaggataccgccgtgtactactgcgccagagatccctacgacttttggagcggctaccccgacgcctttgacatctggggacagggcacaatggtcaccgtttctagcctcgaggacctgaagaacgtgttcccacctgaggtggccgtgttcgagcctagcgaggccgagatcagccacacccagaaagccaccctcgtgtgcctggctaccggcttctaccccgaccatgtggaactgtcttggtgggtcaacggcaaagaggtgcacagcggcgtgtgtaccgacccccagccactgaaagaacagcccgccctgaacgacagccggtactgcctgagcagcagactgagagtgtccgccaccttctggcagaacccccggaaccacttcagatgccaggtgcagttctacggcctgagcgagaacgacgagtggacccaggacagagccaagcccgtgacccagatcgtgtctgccgaagcctggggcagagccgattgcggctttaccagcgagagctaccagcagggcgtgctgagcgccaccatcctgtacgagatcctgctgggcaaggccaccctgtacgccgtgctggtgtctgccctggtgctgatggctatggtcaagcggaaggacagccggggaagggccaagcgatctggatctggagcaacaaacttctcactactcaaacaagcaggtgacgtggaggagaatcccgggcctactagtatggactggatttggcgcatccttttccttgtcggcgctgctaccggcgcgcattccttcgaacaatctgctctgacacagcctgccagcgtgtcaggatctcctggacagagcatcaccatctcttgcaccggcaccagctctgatgtcggcggctacaattacgtgtcctggtatcagcagcaccccggcaaggcccctaaagtgattatcagcgaagtgaacaacagacccagcggcgtgtcccacagattcagcggctctaagtctggcaacaccgccagcctgacaatctctggactgcaagccgaggacgaggccgactacttctgtagcagctacaccagcggcagaaccctgtacgtgttcggcacaggcagcaaagtgacagtgctgggaacgcgtatccagaaccctgatcctgccgtgtaccagctgcgggatagcaagagcagcgacaagagcgtgtgtctgttcaccgacttcgacagccagaccaacgtgtcccagagcaaggactccgacgtgtacatcaccgataagtgcgtgctggacatgcggagcatggacttcaagagcaactccgccgtggcctggtccaacaagtccgatttcgcctgcgccaacgccttcaacaacagcattatccccgaggacacattcttcccaagccccgagagcagctgcgacgtgaagctggtggaaaagagcttcgagacagacaccaacctgaacttccagaacctgagcgtgatcggcttcagaatcctgctgctgaaagtggccggctttaacctgctgatgaccctgcggctgtggtccagc

SEQ ID NO: 1987 - DNA, 2298 bp, Artificial Sequence
  Synthetic Polynucloetide
atggccttaccagtgaccgccttgctcctgccgctggccttgctgctccacgccgccaggccggaagtgcagctggttgaatctggcggaggactggttcagcctggcggatctctgagactgtcttgtgccgccagcggcttcagcttcagcgacttttggatgagctgggtccgacaggcccctggcaaaggacttgaatgggtcgccacaatcagccaggccggcagcgagaaggactacgtggactctgtgaagggcagattcaccatcagccgggacaacgccaagaagtccctgtacctccagatgaacagcctgagagccgaggacaccgccgtgtactattgtgcctctggcgtgtacagcttcgactacagaggccagggcaccctggtcacagtctcttctggtaccggcggaggcggatctggcggcggaggtagcggtggcggaggatctgaattccaatctgctctgacacagcctgccagcgcctctggatctcctggacagagcgtgaccatctcctgtaccggcacctcttctgatgtcggcggctacaactacgtgtcctggtatcagcagcaccccggcaaggcccctaagctgatgatctacgacgtgtccaacagacccagcggcgtgtccaatagattctccggcagcaagagcggcaacaccgccagcctgacaatttctggactgcaagccgaggacgaggccgactactactgtagcagctacaccagcagcagcacactgtacgtgttcggcacaggcacccagctcacagttcttctcgaggacctgaagaacgtgttcccacctgaggtggccgtgttcgagcctagcgaggccgagatcagccacacccagaaagccaccctcgtgtgcctggctaccggcttctaccccgaccatgtggaactgtcttggtgggtcaacggcaaagaggtgcacagcggcgtgtgtaccgacccccagccactgaaagaacagcccgccctgaacgacagccggtactgcctgagcagcagactgagagtgtccgccaccttctggcagaacccccggaaccacttcagatgccaggtgcagttctacggcctgagcgagaacgacgagtggacccaggacagagccaagcccgtgacccagatcgtgtctgccgaagcctggggcagagccgattgcggctttaccagcgagagctaccagcagggcgtgctgagcgccaccatcctgtacgagatcctgctgggcaaggccaccctgtacgccgtgctggtgtctgccctggtgctgatggctatggtcaagcggaaggacagccggggaagggccaagcgatctggatctggagcaacaaacttctcactactcaaacaagcaggtgacgtggaggagaatcccgggcctactagtatggactggatttggcgcatccttttccttgtcggcgctgctaccggcgcgcattccttcgaagaagtgcagctccagcagtctggacctggcctggttaagcctagccagacactgagcctgacctgtgccatcagcggcgattccatgctgagcaacagcgacacctggaactggatcagacagagccccagcagaggcctggaatggctgggcagaacataccacagaagcacttggtacgacgactacgccagctctgtgcggggcagagtgtccatcaatgtggacaccagcaagaaccagtacagcctgcaactgaacgccgtgacacctgaggataccggcgtgtactactgtgccagagtgcggctccaggacggcaattcttggagcgacgcctttgatgtgtggggccagggcacaatggtcaccgtttctagcacgcgtatccagaaccctgatcctgccgtgtaccagctgcgggatagcaagagcagcgacaagagcgtgtgtctgttcaccgacttcgacagccagaccaacgtgtcccagagcaaggactccgacgtgtacatcaccgataagtgcgtgctggacatgcggagcatggacttcaagagcaactccgccgtggcctggtccaacaagtccgatttcgcctgcgccaacgccttcaacaacagcattatccccgaggacacattcttcccaagccccgagagcagctgcgacgtgaagctggtggaaaagagcttcgagacagacaccaacctgaacttccagaacctgagcgtgatcggcttcagaatcctgctgctgaaagtggccggctttaacctgctgatgaccctgcggctgtggtccagc

SEQ ID NO: 1988 - DNA, 2298 bp, Artificial Sequence
  Synthetic Polynucloetide
atggccttaccagtgaccgccttgctcctgccgctggccttgctgctccacgccgccaggccggaagtgcagctggttgaatctggcggaggactggttcagcctggcggatctctgagactgtcttgtgccgccagcggcttcagcttcagcgacttttggatgagctgggtccgacaggcccctggcaaaggacttgaatgggtcgccacaatcagccaggccggcagcgagaaggactacgtggactctgtgaagggcagattcaccatcagccgggacaacgccaagaagtccctgtacctccagatgaacagcctgagagccgaggacaccgccgtgtactattgtgcctctggcgtgtacagcttcgactacagaggccagggcaccctggtcacagtctcttctggtaccggcggaggcggatctggcggcggaggtagcggtggcggaggatctgaattcgacgtgatgctgacccagacaccactgagcctgcctgtgtctctgggcgatcaggccagcatctcctgtagaagcagccagagcatcctgcacagcaccggcgatacctacctggaatggtatctccagaagcctggacagagccccaagctgctgattaacaaggtgtccaaccggctgagcggcgtgcccgatagattttctggcagcggctctggcaccgacttcaccctgaagatcagcagagtggaagccgaggacctgggcgtgtactactgcttccaaggcagccatgttccttggacctttggcggaggcaccaagctggaaatcaagagagctgacgccgctcctaccgtgtccatctttcctctcgaggacctgaagaacgtgttcccacctgaggtggccgtgttcgagcctagcgaggccgagatcagccacacccagaaagccaccctcgtgtgcctggctaccggcttctaccccgaccatgtggaactgtcttggtgggtcaacggcaaagaggtgcacagcggcgtgtgtaccgacccccagccactgaaagaacagcccgccctgaacgacagccggtactgcctgagcagcagactgagagtgtccgccaccttctggcagaacccccggaaccacttcagatgccaggtgcagttctacggcctgagcgagaacgacgagtggacccaggacagagccaagcccgtgacccagatcgtgtctgccgaagcctggggcagagccgattgcggctttaccagcgagagctaccagcagggcgtgctgagcgccaccatcctgtacgagatcctgctgggcaaggccaccctgtacgccgtgctggtgtctgccctggtgctgatggctatggtcaagcggaaggacagccggggaagggccaagcgatctggatctggagcaacaaacttctcactactcaaacaagcaggtgacgtggaggagaatcccgggcctactagtatggactggatttggcgcatccttttccttgtcggcgctgctaccggcgcgcattccttcgaacaagtgaagctccagcagagcggccctagccttgtgaaacctggcgcttccgtgaagatgagctgcaaggccagcggctacaccttcaccgatttctacatgaaatgggtcaagcagagccacggcaagtctctggaatggatcggcgacatcaaccccaacatcggagacaccttctacaaccagaagttcaagggcaaagccacactgaccgtggacaagagcagcagcaccgcctacatgcagctcaacagcctgaccagcgaggacagcgccgtgtacttttgttccgtgggctacttcgacgtgtggggagccggaacaaccgtgacagtctcttctacgcgtatccagaaccctgatcctgccgtgtaccagctgcgggatagcaagagcagcgacaagagcgtgtgtctgttcaccgacttcgacagccagaccaacgtgtcccagagcaaggactccgacgtgtacatcaccgataagtgcgtgctggacatgcggagcatggacttcaagagcaactccgccgtggcctggtccaacaagtccgatttcgcctgcgccaacgccttcaacaacagcattatccccgaggacacattcttcccaagccccgagagcagctgcgacgtgaagctggtggaaaagagcttcgagacagacaccaacctgaacttccagaacctgagcgtgatcggcttcagaatcctgctgctgaaagtggccggctttaacctgctgatgaccctgcggctgtggtccagc

SEQ ID NO: 1989 - DNA, 2286 bp, Artificial Sequence
  Synthetic Polynucloetide
atggccttaccagtgaccgccttgctcctgccgctggccttgctgctccacgccgccaggccggaagtgcagctggttgaatctggcggaggactggttcagcctggcggatctctgagactgtcttgtgccgccagcggcttcagcttcagcgacttttggatgagctgggtccgacaggcccctggcaaaggacttgaatgggtcgccacaatcagccaggccggcagcgagaaggactacgtggactctgtgaagggcagattcaccatcagccgggacaacgccaagaagtccctgtacctccagatgaacagcctgagagccgaggacaccgccgtgtactattgtgcctctggcgtgtacagcttcgactacagaggccagggcaccctggtcacagtctcttctggtaccggcggaggcggatctggcggcggaggtagcggtggcggaggatctgaattcgagatcgtgctgacacagtctcccgccacactgtcactgtctccaggcgaaagagccacactgagctgtagagccagccagagcgtgtccatctacctggcctggtatcagcagaagcctggacaggctccccggctgctgatctacgatgccagcaatagagccacaggcatccccgccagattttctggctctggcagcggcaccgatttcaccctgaccataagcagcctggaacctgaggacttcgccgtgtactactgccagcagagaagcaactggcctcctttcacattcggccctggcaccaaggtggacatcaaactcgaggacctgaagaacgtgttcccacctgaggtggccgtgttcgagcctagcgaggccgagatcagccacacccagaaagccaccctcgtgtgcctggctaccggcttctaccccgaccatgtggaactgtcttggtgggtcaacggcaaagaggtgcacagcggcgtgtgtaccgacccccagccactgaaagaacagcccgccctgaacgacagccggtactgcctgagcagcagactgagagtgtccgccaccttctggcagaacccccggaaccacttcagatgccaggtgcagttctacggcctgagcgagaacgacgagtggacccaggacagagccaagcccgtgacccagatcgtgtctgccgaagcctggggcagagccgattgcggctttaccagcgagagctaccagcagggcgtgctgagcgccaccatcctgtacgagatcctgctgggcaaggccaccctgtacgccgtgctggtgtctgccctggtgctgatggctatggtcaagcggaaggacagccggggaagggccaagcgatctggatctggagcaacaaacttctcactactcaaacaagcaggtgacgtggaggagaatcccgggcctactagtatggactggatttggcgcatccttttccttgtcggcgctgctaccggcgcgcattccttcgaacaggtgcagcttgttgaaagcggaggcggagttgtgcagcctggcagaagtctgagactgtcttgtgccgccagcggcttcaccttcagcagctatggaatgcactgggtccgacaggcccctggcaaaggacttgaatgggttgccgtgatctgggacgacggcagcaacaagtattacgtggacagcgtgaagggcagattcaccatcagccgggacaacagcaagaacaccctgtacctccagatgaacagcctgagagccgaggacacagccgtgtattattgcgccagagatgactactacggcagcggctccttcaacagctactatggcacagacgtgtggggccagggcacaacagttaccgttagctctacgcgtatccagaaccctgatcctgccgtgtaccagctgcgggatagcaagagcagcgacaagagcgtgtgtctgttcaccgacttcgacagccagaccaacgtgtcccagagcaaggactccgacgtgtacatcaccgataagtgcgtgctggacatgcggagcatggacttcaagagcaactccgccgtggcctggtccaacaagtccgatttcgcctgcgccaacgccttcaacaacagcattatccccgaggacacattcttcccaagccccgagagcagctgcgacgtgaagctggtggaaaagagcttcgagacagacaccaacctgaacttccagaacctgagcgtgatcggcttcagaatcctgctgctgaaagtggccggctttaacctgctgatgaccctgcggctgtggtccagc

SEQ ID NO: 1990 - DNA, 2241 bp, Artificial Sequence
  Synthetic Polynucloetide
atggccttaccagtgaccgccttgctcctgccgctggccttgctgctccacgccgccaggccggaagtgcagctggttgaatctggcggaggactggttcagcctggcggatctctgagactgtcttgtgccgccagcggcttcagcttcagcgacttttggatgagctgggtccgacaggcccctggcaaaggacttgaatgggtcgccacaatcagccaggccggcagcgagaaggactacgtggactctgtgaagggcagattcaccatcagccgggacaacgccaagaagtccctgtacctccagatgaacagcctgagagccgaggacaccgccgtgtactattgtgcctctggcgtgtacagcttcgactacagaggccagggcaccctggtcacagtctcttctggtaccggcggaggcggatctggcggcggaggtagcggtggcggaggatctgaattcgacatccagatgacacagagccctagcagcctgtctgccagcgtgggagacagagtgaccatcacctgtagagccagccagggcatctcttcttggctggcctggtatcagcagaagcccgagaaggcccctaagagcctgatctatgccgccagctctctccagagcggagtgcctagcagattttctggcagcggctccggcaccgatttcaccctgacaatatccagcctccagcctgaggacttcgccacctactactgccagcagtacaacagctacccctacaccttcggccagggcaccaagctggaaatcaaactcgaggacctgaagaacgtgttcccacctgaggtggccgtgttcgagcctagcgaggccgagatcagccacacccagaaagccaccctcgtgtgcctggctaccggcttctaccccgaccatgtggaactgtcttggtgggtcaacggcaaagaggtgcacagcggcgtgtgtaccgacccccagccactgaaagaacagcccgccctgaacgacagccggtactgcctgagcagcagactgagagtgtccgccaccttctggcagaacccccggaaccacttcagatgccaggtgcagttctacggcctgagcgagaacgacgagtggacccaggacagagccaagcccgtgacccagatcgtgtctgccgaagcctggggcagagccgattgcggctttaccagcgagagctaccagcagggcgtgctgagcgccaccatcctgtacgagatcctgctgggcaaggccaccctgtacgccgtgctggtgtctgccctggtgctgatggctatggtcaagcggaaggacagccggggaagggccaagcgatctggatctggagcaacaaacttctcactactcaaacaagcaggtgacgtggaggagaatcccgggcctactagtatggactggatttggcgcatccttttccttgtcggcgctgctaccggcgcgcattccttcgaagaagtgcaactggttcaatctggcggcggactggttcatccaggcggttctctgagactgagctgtgccggctctggcttcaccttcagcacctacctgatgtactgggtccgacaggcccctggcaagacactggaatgggtgtccgctattggcagcggaggcgatacctactacgccgactctgtgaagggcagattcaccatcagccgggacaacgccaagaacagcctgtacctccagatgaactccctgagagccgaggacatggccgtgtactactgtgccagaggactcggctattggggccagggaacactggtcacagtgtcctctacgcgtatccagaaccctgatcctgccgtgtaccagctgcgggatagcaagagcagcgacaagagcgtgtgtctgttcaccgacttcgacagccagaccaacgtgtcccagagcaaggactccgacgtgtacatcaccgataagtgcgtgctggacatgcggagcatggacttcaagagcaactccgccgtggcctggtccaacaagtccgatttcgcctgcgccaacgccttcaacaacagcattatccccgaggacacattcttcccaagccccgagagcagctgcgacgtgaagctggtggaaaagagcttcgagacagacaccaacctgaacttccagaacctgagcgtgatcggcttcagaatcctgctgctgaaagtggccggctttaacctgctgatgaccctgcggctgtggtccagc

SEQ ID NO: 1991 - DNA, 2298 bp, Artificial Sequence
  Synthetic Polynucloetide
atggccttaccagtgaccgccttgctcctgccgctggccttgctgctccacgccgccaggccggaagtgcagctggttgaatctggcggaggactggttcagcctggcggatctctgagactgtcttgtgccgccagcggcttcagcttcagcgacttttggatgagctgggtccgacaggcccctggcaaaggacttgaatgggtcgccacaatcagccaggccggcagcgagaaggactacgtggactctgtgaagggcagattcaccatcagccgggacaacgccaagaagtccctgtacctccagatgaacagcctgagagccgaggacaccgccgtgtactattgtgcctctggcgtgtacagcttcgactacagaggccagggcaccctggtcacagtctcttctggtaccggcggaggcggatctggcggcggaggtagcggtggcggaggatctgaattcctgcctgttctgacacagcctccatccgtgtctgtggcccctggaaagaccgccagaatcacatgcggcggcaacaacatcggcagcaagagcgtgcactggtatcagcagaagcctggacaggctcctgtgctggtggtgtacgacgacagcgatagacctagcggcatccccgagagattcagcggcagcaattccggcaataccgccacactgaccatcagcagagtggaagctggcgacgaggccgactactactgccaagtgtgggacagcagcagcgactacgtggtgtttggcggcggaacaaagctgacagtgcttctcgaggacctgaagaacgtgttcccacctgaggtggccgtgttcgagcctagcgaggccgagatcagccacacccagaaagccaccctcgtgtgcctggctaccggcttctaccccgaccatgtggaactgtcttggtgggtcaacggcaaagaggtgcacagcggcgtgtgtaccgacccccagccactgaaagaacagcccgccctgaacgacagccggtactgcctgagcagcagactgagagtgtccgccaccttctggcagaacccccggaaccacttcagatgccaggtgcagttctacggcctgagcgagaacgacgagtggacccaggacagagccaagcccgtgacccagatcgtgtctgccgaagcctggggcagagccgattgcggctttaccagcgagagctaccagcagggcgtgctgagcgccaccatcctgtacgagatcctgctgggcaaggccaccctgtacgccgtgctggtgtctgccctggtgctgatggctatggtcaagcggaaggacagccggggaagggccaagcgatctggatctggagcaacaaacttctcactactcaaacaagcaggtgacgtggaggagaatcccgggcctactagtatggactggatttggcgcatccttttccttgtcggcgctgctaccggcgcgcattccttcgaagaagttcaactggtgcagagcggagccgaagtgaagaagccaggcgagagcctgaagattagctgcaaaggcagcggctacagcttcaccagctactggatcggctgggtccgacagatgcctggcaaaggactggaatggatgggcatcatctaccccggcgacagcgacaccagatacagccctagctttcagggccaagtgaccatctccgccgacaagagcatcagcacagcctacctccagtggtcctctctgaaggccagcgataccgccatgtactactgcgccagacaagtctggggatggcaaggcggcatgtaccccaggtctaactggtggtacaacctggactcttggggccagggcacactggtcacagtctcttctacgcgtatccagaaccctgatcctgccgtgtaccagctgcgggatagcaagagcagcgacaagagcgtgtgtctgttcaccgacttcgacagccagaccaacgtgtcccagagcaaggactccgacgtgtacatcaccgataagtgcgtgctggacatgcggagcatggacttcaagagcaactccgccgtggcctggtccaacaagtccgatttcgcctgcgccaacgccttcaacaacagcattatccccgaggacacattcttcccaagccccgagagcagctgcgacgtgaagctggtggaaaagagcttcgagacagacaccaacctgaacttccagaacctgagcgtgatcggcttcagaatcctgctgctgaaagtggccggctttaacctgctgatgaccctgcggctgtggtccagc

SEQ ID NO: 1992 - DNA, 2277 bp, Artificial Sequence
  Synthetic Polynucloetide
atggccttaccagtgaccgccttgctcctgccgctggccttgctgctccacgccgccaggccggaagtgcagctggttgaatctggcggaggactggttcagcctggcggatctctgagactgtcttgtgccgccagcggcttcagcttcagcgacttttggatgagctgggtccgacaggcccctggcaaaggacttgaatgggtcgccacaatcagccaggccggcagcgagaaggactacgtggactctgtgaagggcagattcaccatcagccgggacaacgccaagaagtccctgtacctccagatgaacagcctgagagccgaggacaccgccgtgtactattgtgcctctggcgtgtacagcttcgactacagaggccagggcaccctggtcacagtctcttctggtaccggcggaggcggatctggcggcggaggtagcggtggcggaggatctgaattcgagctggtcatgacacagagccctgcttctctggccgtgtcactgggacagagagccaccatctcttgcagagccagcgagagcgtggacagctacggcaagagcttcatgcactggtatcagctcaagcccggccagcctcctaagctgctgatctacagagcctccaacctggaaagcggcgtgccagccagattttctggcagcggcagcagaaccgacttcaccctgaccattgatcccgtggaagccgatgatgccgccacctactactgccagcagaacaacgaggacccctggacatttggcggaggcaccaagctggaaatcaaactcgaggacctgaagaacgtgttcccacctgaggtggccgtgttcgagcctagcgaggccgagatcagccacacccagaaagccaccctcgtgtgcctggctaccggcttctaccccgaccatgtggaactgtcttggtgggtcaacggcaaagaggtgcacagcggcgtgtgtaccgacccccagccactgaaagaacagcccgccctgaacgacagccggtactgcctgagcagcagactgagagtgtccgccaccttctggcagaacccccggaaccacttcagatgccaggtgcagttctacggcctgagcgagaacgacgagtggacccaggacagagccaagcccgtgacccagatcgtgtctgccgaagcctggggcagagccgattgcggctttaccagcgagagctaccagcagggcgtgctgagcgccaccatcctgtacgagatcctgctgggcaaggccaccctgtacgccgtgctggtgtctgccctggtgctgatggctatggtcaagcggaaggacagccggggaagggccaagcgatctggatctggagcaacaaacttctcactactcaaacaagcaggtgacgtggaggagaatcccgggcctactagtatggactggatttggcgcatccttttccttgtcggcgctgctaccggcgcgcattccttcgaagaagtgcagctcgaacagtctggccccgagcttgtgaaacctggcgcttccgtgaagatgagctgcaaggccagcggctacaccttcaccaactactacatgaaatgggtcaagcagagccacggcaagtccctggaatggatcggcgatctgaaccccaacaacggcgacaccttctacaaccagaagttcaagggcaaagccacactgaccgtggacaagagcagcaacaccgcctacatgcagctcaactccctgaccagcgaggacagcgccgtgtactactgtgccagaaccggcagatacgaagagaacgctatggactactggggccagggcacaagcgtgacagtctcttctacgcgtatccagaaccctgatcctgccgtgtaccagctgcgggatagcaagagcagcgacaagagcgtgtgtctgttcaccgacttcgacagccagaccaacgtgtcccagagcaaggactccgacgtgtacatcaccgataagtgcgtgctggacatgcggagcatggacttcaagagcaactccgccgtggcctggtccaacaagtccgatttcgcctgcgccaacgccttcaacaacagcattatccccgaggacacattcttcccaagccccgagagcagctgcgacgtgaagctggtggaaaagagcttcgagacagacaccaacctgaacttccagaacctgagcgtgatcggcttcagaatcctgctgctgaaagtggccggctttaacctgctgatgaccctgcggctgtggtccagc

SEQ ID NO: 1993 - DNA, 2259 bp, Artificial Sequence
  Synthetic Polynucloetide
atggccttaccagtgaccgccttgctcctgccgctggccttgctgctccacgccgccaggccggaagtgcagctggttgaatctggcggaggactggttcagcctggcggatctctgagactgtcttgtgccgccagcggcttcagcttcagcgacttttggatgagctgggtccgacaggcccctggcaaaggacttgaatgggtcgccacaatcagccaggccggcagcgagaaggactacgtggactctgtgaagggcagattcaccatcagccgggacaacgccaagaagtccctgtacctccagatgaacagcctgagagccgaggacaccgccgtgtactattgtgcctctggcgtgtacagcttcgactacagaggccagggcaccctggtcacagtctcttctggtaccggcggaggcggatctggcggcggaggtagcggtggcggaggatctgaattcgacgtggtcatgacacagagcccttctagcctgtctgccagcgtgggcgacagagtgaccatcacctgtatggcctccgaggacatctacatccggctggcctggtatcagcagaagcctggaaacgcccctaagctgctgatctacgccgccacctctctggaaacaggcgtgccaagcagattttccggcagcggctctggcaccgatttcaccctgacaatatccagcctccagcctgaggacttcgccacctactactgccagcagtattggagcagcccctggacatttggcggaggcaccaaggtggaaatcaaactcgaggacctgaagaacgtgttcccacctgaggtggccgtgttcgagcctagcgaggccgagatcagccacacccagaaagccaccctcgtgtgcctggctaccggcttctaccccgaccatgtggaactgtcttggtgggtcaacggcaaagaggtgcacagcggcgtgtgtaccgacccccagccactgaaagaacagcccgccctgaacgacagccggtactgcctgagcagcagactgagagtgtccgccaccttctggcagaacccccggaaccacttcagatgccaggtgcagttctacggcctgagcgagaacgacgagtggacccaggacagagccaagcccgtgacccagatcgtgtctgccgaagcctggggcagagccgattgcggctttaccagcgagagctaccagcagggcgtgctgagcgccaccatcctgtacgagatcctgctgggcaaggccaccctgtacgccgtgctggtgtctgccctggtgctgatggctatggtcaagcggaaggacagccggggaagggccaagcgatctggatctggagcaacaaacttctcactactcaaacaagcaggtgacgtggaggagaatcccgggcctactagtatggactggatttggcgcatccttttccttgtcggcgctgctaccggcgcgcattccttcgaacaggttcagctgcaagagtctggccccggactggtcaagcctagccaaacactgagcctgacctgtaccgtgtccggctacagcatcaccagcgactacacctggaactggatcagacagcctcctggcaacggactggaatggatcggctacatcacctacagcggcagcaccagctacaaccccagcctgaaaagccgggtgctgatctccgtggacaccagcaagaatcaggtgtccctgaagctgagcagcgtgacagccgctgataccgccgtgtactactgtgccagactggggagaagatacacaatggactactggggccagggcaccaccgtgacagtttcttctacgcgtatccagaaccctgatcctgccgtgtaccagctgcgggatagcaagagcagcgacaagagcgtgtgtctgttcaccgacttcgacagccagaccaacgtgtcccagagcaaggactccgacgtgtacatcaccgataagtgcgtgctggacatgcggagcatggacttcaagagcaactccgccgtggcctggtccaacaagtccgatttcgcctgcgccaacgccttcaacaacagcattatccccgaggacacattcttcccaagccccgagagcagctgcgacgtgaagctggtggaaaagagcttcgagacagacaccaacctgaacttccagaacctgagcgtgatcggcttcagaatcctgctgctgaaagtggccggctttaacctgctgatgaccctgcggctgtggtccagc

SEQ ID NO: 1994 - DNA, 2271 bp, Artificial Sequence
  Synthetic Polynucloetide
atggccttaccagtgaccgccttgctcctgccgctggccttgctgctccacgccgccaggccggaagtgcagctggttgaatctggcggaggactggttcagcctggcggatctctgagactgtcttgtgccgccagcggcttcagcttcagcgacttttggatgagctgggtccgacaggcccctggcaaaggacttgaatgggtcgccacaatcagccaggccggcagcgagaaggactacgtggactctgtgaagggcagattcaccatcagccgggacaacgccaagaagtccctgtacctccagatgaacagcctgagagccgaggacaccgccgtgtactattgtgcctctggcgtgtacagcttcgactacagaggccagggcaccctggtcacagtctcttctggtaccggcggaggcggatctggcggcggaggtagcggtggcggaggatctgaattcgatattgtgctgactcagagccctgccactctgagccttagtccaggcgacagagctaccatctcctgtagggcctctgaatccgtgaccattctgggctctcatctcatatattggtatcaacaaaagccgggccagcctccacggctgctcattcaactggcctctaacgtgcagaccggcgtgccagctagattttctggctctggctcccggaccgactttacactgacaatcagctccgtggaacccgaagattttgccgtctattattgcctccagtccaggaccattcctcggacattcggccagggaacaaaactcgaaatcaagcggctcgaggacctgaagaacgtgttcccacctgaggtggccgtgttcgagcctagcgaggccgagatcagccacacccagaaagccaccctcgtgtgcctggctaccggcttctaccccgaccatgtggaactgtcttggtgggtcaacggcaaagaggtgcacagcggcgtgtgtaccgacccccagccactgaaagaacagcccgccctgaacgacagccggtactgcctgagcagcagactgagagtgtccgccaccttctggcagaacccccggaaccacttcagatgccaggtgcagttctacggcctgagcgagaacgacgagtggacccaggacagagccaagcccgtgacccagatcgtgtctgccgaagcctggggcagagccgattgcggctttaccagcgagagctaccagcagggcgtgctgagcgccaccatcctgtacgagatcctgctgggcaaggccaccctgtacgccgtgctggtgtctgccctggtgctgatggctatggtcaagcggaaggacagccggggaagggccaagcgatctggatctggagcaacaaacttctcactactcaaacaagcaggtgacgtggaggagaatcccgggcctactagtatggactggatttggcgcatccttttccttgtcggcgctgctaccggcgcgcattccttcgaacaggtgcagctcgttcagagtggccccgaagtgaaaaagccaggcgagtccgtgaagatttcctgcaaagcctccggctacacattccggcactactctatgaattgggtcaagcaggccccaggccagggccttaagtggatgggacgcatcaataccgagtccggcgtgccaatctacgccgatgacttcaaaggccggttcagcttcaccgtggatacctctgcctccaccgcctacctggaaatcagcagcctgaccagcgaggatacagctgtgtacttctgtagcaacgattacctctacagcctggatttctggggacagggaaccacactgaccgtgtctagcacgcgtatccagaaccctgatcctgccgtgtaccagctgcgggatagcaagagcagcgacaagagcgtgtgtctgttcaccgacttcgacagccagaccaacgtgtcccagagcaaggactccgacgtgtacatcaccgataagtgcgtgctggacatgcggagcatggacttcaagagcaactccgccgtggcctggtccaacaagtccgatttcgcctgcgccaacgccttcaacaacagcattatccccgaggacacattcttcccaagccccgagagcagctgcgacgtgaagctggtggaaaagagcttcgagacagacaccaacctgaacttccagaacctgagcgtgatcggcttcagaatcctgctgctgaaagtggccggctttaacctgctgatgaccctgcggctgtggtccagc

SEQ ID NO: 1995 - DNA, 2271 bp, Artificial Sequence
  Synthetic Polynucloetide
atggccttaccagtgaccgccttgctcctgccgctggccttgctgctccacgccgccaggccggaagtgcagctggttgaatctggcggaggactggttcagcctggcggatctctgagactgtcttgtgccgccagcggcttcagcttcagcgacttttggatgagctgggtccgacaggcccctggcaaaggacttgaatgggtcgccacaatcagccaggccggcagcgagaaggactacgtggactctgtgaagggcagattcaccatcagccgggacaacgccaagaagtccctgtacctccagatgaacagcctgagagccgaggacaccgccgtgtactattgtgcctctggcgtgtacagcttcgactacagaggccagggcaccctggtcacagtctcttctggtaccggcggaggcggatctggcggcggaggtagcggtggcggaggatctgaattcgacatcgtgctgacacagtctcccgccacactgtcactgagccctggcgatagagccacactgagctgtagagccagcgagagcgtgacaatcctgggcagccacctgatctactggtatcagcagaagcccggacaggcccctagactgctgattcagctcgccagcaatgtgcagacaggcatccctgccagattttccggcagcggcagcagaaccgatttcaccctgaccataagcagcctggaacctgaggacttcgccgtgtactactgcctccagagccggacaatccccagaacctttggacagggcaccaagctggaaatcaagagactcgaggacctgaagaacgtgttcccacctgaggtggccgtgttcgagcctagcgaggccgagatcagccacacccagaaagccaccctcgtgtgcctggctaccggcttctaccccgaccatgtggaactgtcttggtgggtcaacggcaaagaggtgcacagcggcgtgtgtaccgacccccagccactgaaagaacagcccgccctgaacgacagccggtactgcctgagcagcagactgagagtgtccgccaccttctggcagaacccccggaaccacttcagatgccaggtgcagttctacggcctgagcgagaacgacgagtggacccaggacagagccaagcccgtgacccagatcgtgtctgccgaagcctggggcagagccgattgcggctttaccagcgagagctaccagcagggcgtgctgagcgccaccatcctgtacgagatcctgctgggcaaggccaccctgtacgccgtgctggtgtctgccctggtgctgatggctatggtcaagcggaaggacagccggggaagggccaagcgatctggatctggagcaacaaacttctcactactcaaacaagcaggtgacgtggaggagaatcccgggcctactagtatggactggatttggcgcatccttttccttgtcggcgctgctaccggcgcgcattccttcgaacaggttcagctggtgcagtctggcagcgagctgaagaaacctggcgagagcgtgaagatcagctgcaaggccagcggctacaccttcacacactacagcatgaactgggtccgacaggcccctggacaaggactggaatggatgggcagaatcaacaccgagacaggcgagcccctgtacgccgacgatttcaagggcagattcgtgttcagcctggacaccagcgccagcacagcctatctccagatcagctctctgaaggccgaggacaccgccgtgtactactgctccaacgactacctgtactccctggactattggggccagggcacactggtcacagtgtctagtacgcgtatccagaaccctgatcctgccgtgtaccagctgcgggatagcaagagcagcgacaagagcgtgtgtctgttcaccgacttcgacagccagaccaacgtgtcccagagcaaggactccgacgtgtacatcaccgataagtgcgtgctggacatgcggagcatggacttcaagagcaactccgccgtggcctggtccaacaagtccgatttcgcctgcgccaacgccttcaacaacagcattatccccgaggacacattcttcccaagccccgagagcagctgcgacgtgaagctggtggaaaagagcttcgagacagacaccaacctgaacttccagaacctgagcgtgatcggcttcagaatcctgctgctgaaagtggccggctttaacctgctgatgaccctgcggctgtggtccagc

SEQ ID NO: 1996 - DNA, 2274 bp, Artificial Sequence
  Synthetic Polynucloetide
atggccttaccagtgaccgccttgctcctgccgctggccttgctgctccacgccgccaggccggaagtgcagctggttgaatctggcggaggactggttcagcctggcggatctctgagactgtcttgtgccgccagcggcttcagcttcagcgacttttggatgagctgggtccgacaggcccctggcaaaggacttgaatgggtcgccacaatcagccaggccggcagcgagaaggactacgtggactctgtgaagggcagattcaccatcagccgggacaacgccaagaagtccctgtacctccagatgaacagcctgagagccgaggacaccgccgtgtactattgtgcctctggcgtgtacagcttcgactacagaggccagggcaccctggtcacagtctcttctggtaccggcggaggcggatctggcggcggaggtagcggtggcggaggatctgaattcgacatccagctgactcagagccctagctttctgagcgccagcgtgggcgacagagtgaccattacatgtagagccagccagggcatcagcaccgacctgaactggtatcagcagaagcctggcaaggcccctaagctgctgatctacgccgccagcaatctggaaagcggcgtgccaagcagattttccggctctggcagcggcaccgagttcaccctgacaatatctagcctccagcctgaggacttcgccacctactactgccagcagagctacaactggccctacacctttggcggaggcaccaaggtggaaatcaagagactcgaggacctgaagaacgtgttcccacctgaggtggccgtgttcgagcctagcgaggccgagatcagccacacccagaaagccaccctcgtgtgcctggctaccggcttctaccccgaccatgtggaactgtcttggtgggtcaacggcaaagaggtgcacagcggcgtgtgtaccgacccccagccactgaaagaacagcccgccctgaacgacagccggtactgcctgagcagcagactgagagtgtccgccaccttctggcagaacccccggaaccacttcagatgccaggtgcagttctacggcctgagcgagaacgacgagtggacccaggacagagccaagcccgtgacccagatcgtgtctgccgaagcctggggcagagccgattgcggctttaccagcgagagctaccagcagggcgtgctgagcgccaccatcctgtacgagatcctgctgggcaaggccaccctgtacgccgtgctggtgtctgccctggtgctgatggctatggtcaagcggaaggacagccggggaagggccaagcgatctggatctggagcaacaaacttctcactactcaaacaagcaggtgacgtggaggagaatcccgggcctactagtatggactggatttggcgcatccttttccttgtcggcgctgctaccggcgcgcattccttcgaagaagttcagctggttgaatcaggcggaggactcgtgaaacctggcggctctctgagactgtcttgtgccgccagcggcttcaccttcagcaacttcgagatgaactgggtccgacaggccccaggcaaaggactggaatgggtgtccggcatcagctccaatggccggtacatcaactacgccgacagcgtgaagggcagattcaccatcagccgggacaacgccaagaacagcctgtacctccagatgaactccctgagagccgaggacaccgccgtgtactattgtgccagagtggtggacttcgaccaggactacaacggcttcgactattggggccagggcaccctggttaccgttagctctacgcgtatccagaaccctgatcctgccgtgtaccagctgcgggatagcaagagcagcgacaagagcgtgtgtctgttcaccgacttcgacagccagaccaacgtgtcccagagcaaggactccgacgtgtacatcaccgataagtgcgtgctggacatgcggagcatggacttcaagagcaactccgccgtggcctggtccaacaagtccgatttcgcctgcgccaacgccttcaacaacagcattatccccgaggacacattcttcccaagccccgagagcagctgcgacgtgaagctggtggaaaagagcttcgagacagacaccaacctgaacttccagaacctgagcgtgatcggcttcagaatcctgctgctgaaagtggccggctttaacctgctgatgaccctgcggctgtggtccagc

SEQ ID NO: 1997 - DNA, 2268 bp, Artificial Sequence
  Synthetic Polynucloetide
atggccttaccagtgaccgccttgctcctgccgctggccttgctgctccacgccgccaggccggaagtgcagctggttgaatctggcggaggactggttcagcctggcggatctctgagactgtcttgtgccgccagcggcttcagcttcagcgacttttggatgagctgggtccgacaggcccctggcaaaggacttgaatgggtcgccacaatcagccaggccggcagcgagaaggactacgtggactctgtgaagggcagattcaccatcagccgggacaacgccaagaagtccctgtacctccagatgaacagcctgagagccgaggacaccgccgtgtactattgtgcctctggcgtgtacagcttcgactacagaggccagggcaccctggtcacagtctcttctggtaccggcggaggcggatctggcggcggaggtagcggtggcggaggatctgaattcgacatccaactgactcagagccccagctttctgagcgcctctgtgggcgacagagtgaccatcacatgtagtctcagcctgggcatcagcacatggcgggattggtttccgccgaggcttggcaggggccttgagccgctgacctacgccgccagcacactgcaaagcggagtgcctagcagattttccggcagcggctctggcaccgagttcaccctgacaatatccagcctccagcctgaggacttcgccacctactactgccagcagctcaacagctaccctctgacctttggcggaggcaccaaggtggaaatcaagagactcgaggacctgaagaacgtgttcccacctgaggtggccgtgttcgagcctagcgaggccgagatcagccacacccagaaagccaccctcgtgtgcctggctaccggcttctaccccgaccatgtggaactgtcttggtgggtcaacggcaaagaggtgcacagcggcgtgtgtaccgacccccagccactgaaagaacagcccgccctgaacgacagccggtactgcctgagcagcagactgagagtgtccgccaccttctggcagaacccccggaaccacttcagatgccaggtgcagttctacggcctgagcgagaacgacgagtggacccaggacagagccaagcccgtgacccagatcgtgtctgccgaagcctggggcagagccgattgcggctttaccagcgagagctaccagcagggcgtgctgagcgccaccatcctgtacgagatcctgctgggcaaggccaccctgtacgccgtgctggtgtctgccctggtgctgatggctatggtcaagcggaaggacagccggggaagggccaagcgatctggatctggagcaacaaacttctcactactcaaacaagcaggtgacgtggaggagaatcccgggcctactagtatggactggatttggcgcatccttttccttgtcggcgctgctaccggcgcgcattccttcgaagaagttcaactggttgagtctggtggcggcctggttaagcctggcggatctctgagactgagctgtgccgccagcggcttcacctttagcacatacggcatgagctgggtccgacaggcccctggaaaaggacttgagtgggtcgcctacatcaacaacggctccggctacatctactacgccgacagcgtgaagggcagattcaccatcagccgggacaacgccaagaacagcctgtacctccagatgaactccctgagagccgaggacaccgccgtgtactattgtgccagaggacagtggtggagcggcggagactttgattattggggccagggcaccctggtcaccgtttcttctacgcgtatccagaaccctgatcctgccgtgtaccagctgcgggatagcaagagcagcgacaagagcgtgtgtctgttcaccgacttcgacagccagaccaacgtgtcccagagcaaggactccgacgtgtacatcaccgataagtgcgtgctggacatgcggagcatggacttcaagagcaactccgccgtggcctggtccaacaagtccgatttcgcctgcgccaacgccttcaacaacagcattatccccgaggacacattcttcccaagccccgagagcagctgcgacgtgaagctggtggaaaagagcttcgagacagacaccaacctgaacttccagaacctgagcgtgatcggcttcagaatcctgctgctgaaagtggccggctttaacctgctgatgaccctgcggctgtggtccagc

SEQ ID NO: 1998 - DNA, 2271 bp, Artificial Sequence
  Synthetic Polynucloetide
atggccttaccagtgaccgccttgctcctgccgctggccttgctgctccacgccgccaggccggaagtgcagctggttgaatctggcggaggactggttcagcctggcggatctctgagactgtcttgtgccgccagcggcttcagcttcagcgacttttggatgagctgggtccgacaggcccctggcaaaggacttgaatgggtcgccacaatcagccaggccggcagcgagaaggactacgtggactctgtgaagggcagattcaccatcagccgggacaacgccaagaagtccctgtacctccagatgaacagcctgagagccgaggacaccgccgtgtactattgtgcctctggcgtgtacagcttcgactacagaggccagggcaccctggtcacagtctcttctggtaccggcggaggcggatctggcggcggaggtagcggtggcggaggatctgaattcgagatcgtgctgacacagtctcccgccacactgtcactgtctccaggcgaaagagccacactgagctgtagcgccagcagcagcgtgtcctacatgtactggtatcagcagaagcccggacaggcccctagactgctgatctacagaaccagcaacctggcctctggcatccccgccagattttctggctctggcagcggcaccgatttcaccctgaccataagcagcctggaacctgaggacttcgccgtgtactactgccagcagtaccacagctaccccaccacctttggacagggcaccaaggtggaaatcaagcggacagttctcgaggacctgaagaacgtgttcccacctgaggtggccgtgttcgagcctagcgaggccgagatcagccacacccagaaagccaccctcgtgtgcctggctaccggcttctaccccgaccatgtggaactgtcttggtgggtcaacggcaaagaggtgcacagcggcgtgtgtaccgacccccagccactgaaagaacagcccgccctgaacgacagccggtactgcctgagcagcagactgagagtgtccgccaccttctggcagaacccccggaaccacttcagatgccaggtgcagttctacggcctgagcgagaacgacgagtggacccaggacagagccaagcccgtgacccagatcgtgtctgccgaagcctggggcagagccgattgcggctttaccagcgagagctaccagcagggcgtgctgagcgccaccatcctgtacgagatcctgctgggcaaggccaccctgtacgccgtgctggtgtctgccctggtgctgatggctatggtcaagcggaaggacagccggggaagggccaagcgatctggatctggagcaacaaacttctcactactcaaacaagcaggtgacgtggaggagaatcccgggcctactagtatggactggatttggcgcatccttttccttgtcggcgctgctaccggcgcgcattccttcgaagaagtgcagctggttgaatcaggtggcggcctggttcaacctggcggatctctgagactgtcttgtgccgccagcggcttcagcttcaacacctacgccatgaactgggtccgacaggctcctggcaaaggactggaatgggtgtcccacatcagaagcaagagcaacaacttcgccacctactacgccgacagcgtgaaggacagattcaccatcagccgggacaacgccaagaacagcctgtacctccagatgaactccctgagagccgaggacaccgccgtgtattattgcgccagacaaggcggcgacttccctatggattattggggccagggcaccctggtcaccgtttcttctacgcgtatccagaaccctgatcctgccgtgtaccagctgcgggatagcaagagcagcgacaagagcgtgtgtctgttcaccgacttcgacagccagaccaacgtgtcccagagcaaggactccgacgtgtacatcaccgataagtgcgtgctggacatgcggagcatggacttcaagagcaactccgccgtggcctggtccaacaagtccgatttcgcctgcgccaacgccttcaacaacagcattatccccgaggacacattcttcccaagccccgagagcagctgcgacgtgaagctggtggaaaagagcttcgagacagacaccaacctgaacttccagaacctgagcgtgatcggcttcagaatcctgctgctgaaagtggccggctttaacctgctgatgaccctgcggctgtggtccagc

SEQ ID NO: 1999 - DNA, 2259 bp, Artificial Sequence
  Synthetic Polynucloetide
atggccttaccagtgaccgccttgctcctgccgctggccttgctgctccacgccgccaggccggaagtgcagctggttgaatctggcggaggactggttcagcctggcggatctctgagactgtcttgtgccgccagcggcttcagcttcagcgacttttggatgagctgggtccgacaggcccctggcaaaggacttgaatgggtcgccacaatcagccaggccggcagcgagaaggactacgtggactctgtgaagggcagattcaccatcagccgggacaacgccaagaagtccctgtacctccagatgaacagcctgagagccgaggacaccgccgtgtactattgtgcctctggcgtgtacagcttcgactacagaggccagggcaccctggtcacagtctcttctggtaccggcggaggcggatctggcggcggaggtagcggtggcggaggatctgaattcgacgtggtcatgacacagagcccttctagcctgtctgccagcgtgggcgacagagtgaccatcacctgtaaagccagcgaggacatctacatccggctggcctggtatcagcagaagcctggaaaggcccctaagctgctgatctacgccgccacctctctggaaacaggcgtgccaagcagattttccggcagcggctctggcaccgatttcaccctgacaatatccagcctccagcctgaggacttcgccacctactactgccagcagtattggaccacaccttggacctttggcggaggcaccaaggtggaaatcaaactcgaggacctgaagaacgtgttcccacctgaggtggccgtgttcgagcctagcgaggccgagatcagccacacccagaaagccaccctcgtgtgcctggctaccggcttctaccccgaccatgtggaactgtcttggtgggtcaacggcaaagaggtgcacagcggcgtgtgtaccgacccccagccactgaaagaacagcccgccctgaacgacagccggtactgcctgagcagcagactgagagtgtccgccaccttctggcagaacccccggaaccacttcagatgccaggtgcagttctacggcctgagcgagaacgacgagtggacccaggacagagccaagcccgtgacccagatcgtgtctgccgaagcctggggcagagccgattgcggctttaccagcgagagctaccagcagggcgtgctgagcgccaccatcctgtacgagatcctgctgggcaaggccaccctgtacgccgtgctggtgtctgccctggtgctgatggctatggtcaagcggaaggacagccggggaagggccaagcgatctggatctggagcaacaaacttctcactactcaaacaagcaggtgacgtggaggagaatcccgggcctactagtatggactggatttggcgcatccttttccttgtcggcgctgctaccggcgcgcattccttcgaacaggtgcagctccaagagtctggccctggactggtcaagcctagccagacactgagcctgacctgtaccgtgtccggctacagcatcaccatcgactacacctggaactggatcagacagcctcctggcaaaggactggaatggatcggctacatcacctacagcggcagcaccgactacaaccccagcctgaaaagccgggtgctgatctccgtggacaccagcaagaatcaggtgtccctgaagctgagcagcgtgacagccgctgataccgccgtgtactactgtgccagactgggcagaagatacgccctggattattggggccagggcaccaccgtgacagtgtcatctacgcgtatccagaaccctgatcctgccgtgtaccagctgcgggatagcaagagcagcgacaagagcgtgtgtctgttcaccgacttcgacagccagaccaacgtgtcccagagcaaggactccgacgtgtacatcaccgataagtgcgtgctggacatgcggagcatggacttcaagagcaactccgccgtggcctggtccaacaagtccgatttcgcctgcgccaacgccttcaacaacagcattatccccgaggacacattcttcccaagccccgagagcagctgcgacgtgaagctggtggaaaagagcttcgagacagacaccaacctgaacttccagaacctgagcgtgatcggcttcagaatcctgctgctgaaagtggccggctttaacctgctgatgaccctgcggctgtggtccagc

SEQ ID NO: 2000 - DNA, 2274 bp, Artificial Sequence
  Synthetic Polynucloetide
atggccttaccagtgaccgccttgctcctgccgctggccttgctgctccacgccgccaggccggaagtgcagctggttgaatctggcggaggactggttcagcctggcggatctctgagactgtcttgtgccgccagcggcttcagcttcagcgacttttggatgagctgggtccgacaggcccctggcaaaggacttgaatgggtcgccacaatcagccaggccggcagcgagaaggactacgtggactctgtgaagggcagattcaccatcagccgggacaacgccaagaagtccctgtacctccagatgaacagcctgagagccgaggacaccgccgtgtactattgtgcctctggcgtgtacagcttcgactacagaggccagggcaccctggtcacagtctcttctggtaccggcggaggcggatctggcggcggaggtagcggtggcggaggatctgaattcgacatccagatgacccagaccacaagcagcctgtctgccagcctgggcgacagagtgaccatctcttgtagagccagccaggacatcagcaactacctgaactggtatcagcagaaacccgacggcaccgtgaagctgctgatctactacaccagcatcctgcacagcggcgtgcccagcagattttctggctctggcagcggcaccgactacagcctgaccatcagcaatctggaacaagaggacttcgctacctacttctgccagcaaggcaacaccctgccttggacatttggcggaggcaccaagctggaaatcaaagctctcgaggacctgaagaacgtgttcccacctgaggtggccgtgttcgagcctagcgaggccgagatcagccacacccagaaagccaccctcgtgtgcctggctaccggcttctaccccgaccatgtggaactgtcttggtgggtcaacggcaaagaggtgcacagcggcgtgtgtaccgacccccagccactgaaagaacagcccgccctgaacgacagccggtactgcctgagcagcagactgagagtgtccgccaccttctggcagaacccccggaaccacttcagatgccaggtgcagttctacggcctgagcgagaacgacgagtggacccaggacagagccaagcccgtgacccagatcgtgtctgccgaagcctggggcagagccgattgcggctttaccagcgagagctaccagcagggcgtgctgagcgccaccatcctgtacgagatcctgctgggcaaggccaccctgtacgccgtgctggtgtctgccctggtgctgatggctatggtcaagcggaaggacagccggggaagggccaagcgatctggatctggagcaacaaacttctcactactcaaacaagcaggtgacgtggaggagaatcccgggcctactagtatggactggatttggcgcatccttttccttgtcggcgctgctaccggcgcgcattccttcgaagaagtgcaactggttgaatctggcggcggactggttaagcctggcggatctctgaagctgagctgtgccgcctctggcttcgccttcagcatctacgatatgagctgggtccgacagacccctgagaagagactggaatgggtcgcctacatctctagcggcggagggacctactatcccgacacagtgaagggcagattcaccatctccagagacaacgccaagaacaccctgtacctccagatgagcagcctgaagtccgaggacaccgccatgtactactgcgccagacacagcggctatggcacacattggggagtgctgtttgcctactggggccagggaacactggtcacagtttctgctacgcgtatccagaaccctgatcctgccgtgtaccagctgcgggatagcaagagcagcgacaagagcgtgtgtctgttcaccgacttcgacagccagaccaacgtgtcccagagcaaggactccgacgtgtacatcaccgataagtgcgtgctggacatgcggagcatggacttcaagagcaactccgccgtggcctggtccaacaagtccgatttcgcctgcgccaacgccttcaacaacagcattatccccgaggacacattcttcccaagccccgagagcagctgcgacgtgaagctggtggaaaagagcttcgagacagacaccaacctgaacttccagaacctgagcgtgatcggcttcagaatcctgctgctgaaagtggccggctttaacctgctgatgaccctgcggctgtggtccagc

SEQ ID NO: 2001 - DNA, 2304 bp, Artificial Sequence
  Synthetic Polynucloetide
atggccttaccagtgaccgccttgctcctgccgctggccttgctgctccacgccgccaggccggaagtgcagctggttgaatctggcggaggactggttcagcctggcggatctctgagactgtcttgtgccgccagcggcttcagcttcagcgacttttggatgagctgggtccgacaggcccctggcaaaggacttgaatgggtcgccacaatcagccaggccggcagcgagaaggactacgtggactctgtgaagggcagattcaccatcagccgggacaacgccaagaagtccctgtacctccagatgaacagcctgagagccgaggacaccgccgtgtactattgtgcctctggcgtgtacagcttcgactacagaggccagggcaccctggtcacagtctcttctggtaccggcggaggcggatctggcggcggaggtagcggtggcggaggatctgaattcgacatcgtgatgacacagagccctgatagcctggccgtgtctctgggagagagagccaccatcaactgcaagagcagccagagcctgctgtacagaagcaaccagaagaactacctggcctggtatcagcagaagcccggccagcctcctaagctgctgatctactgggccagcaccagagaaagcggcgtgcccgatagattttctggctctggcagcggcaccgacttcaccctgacaatttctagcctgcaagccgaggacgtggccgtgtactactgccagcagtattacaactaccccagaaccttcggccagggcaccaaggtggaaatcaagagaacagttctcgaggacctgaagaacgtgttcccacctgaggtggccgtgttcgagcctagcgaggccgagatcagccacacccagaaagccaccctcgtgtgcctggctaccggcttctaccccgaccatgtggaactgtcttggtgggtcaacggcaaagaggtgcacagcggcgtgtgtaccgacccccagccactgaaagaacagcccgccctgaacgacagccggtactgcctgagcagcagactgagagtgtccgccaccttctggcagaacccccggaaccacttcagatgccaggtgcagttctacggcctgagcgagaacgacgagtggacccaggacagagccaagcccgtgacccagatcgtgtctgccgaagcctggggcagagccgattgcggctttaccagcgagagctaccagcagggcgtgctgagcgccaccatcctgtacgagatcctgctgggcaaggccaccctgtacgccgtgctggtgtctgccctggtgctgatggctatggtcaagcggaaggacagccggggaagggccaagcgatctggatctggagcaacaaacttctcactactcaaacaagcaggtgacgtggaggagaatcccgggcctactagtatggactggatttggcgcatccttttccttgtcggcgctgctaccggcgcgcattccttcgaagaagttcagctgcttgaatcaggcggcggactggttcaacctggcggatctctgagactgagctgtgccgccagcggctacagcatcacaagcgactatgcctggaactgggtccgacaggcccctggcaaaggactggaatgggtgtcctacatcagcaacagcggcagcaccagctacaaccccagcctgaagtcccggttcaccatcagcagagacaacagcaagaacaccctgtacctccagatgaacagcctgagagctgaggacaccgccgtgtattattgcgccaaagagcggaactacgactacgacgattactactacgctatggactactggggccagggaaccctggtcacagtctcttctacgcgtatccagaaccctgatcctgccgtgtaccagctgcgggatagcaagagcagcgacaagagcgtgtgtctgttcaccgacttcgacagccagaccaacgtgtcccagagcaaggactccgacgtgtacatcaccgataagtgcgtgctggacatgcggagcatggacttcaagagcaactccgccgtggcctggtccaacaagtccgatttcgcctgcgccaacgccttcaacaacagcattatccccgaggacacattcttcccaagccccgagagcagctgcgacgtgaagctggtggaaaagagcttcgagacagacaccaacctgaacttccagaacctgagcgtgatcggcttcagaatcctgctgctgaaagtggccggctttaacctgctgatgaccctgcggctgtggtccagc

SEQ ID NO: 2002 - DNA, 2283 bp, Artificial Sequence
  Synthetic Polynucloetide
atggccttaccagtgaccgccttgctcctgccgctggccttgctgctccacgccgccaggccggaagtgcagctggttgaatctggcggaggactggttcagcctggcggatctctgagactgtcttgtgccgccagcggcttcagcttcagcgacttttggatgagctgggtccgacaggcccctggcaaaggacttgaatgggtcgccacaatcagccaggccggcagcgagaaggactacgtggactctgtgaagggcagattcaccatcagccgggacaacgccaagaagtccctgtacctccagatgaacagcctgagagccgaggacaccgccgtgtactattgtgcctctggcgtgtacagcttcgactacagaggccagggcaccctggtcacagtctcttctggtaccggcggaggcggatctggcggcggaggtagcggtggcggaggatctgaattcgacgtggtcatgacacagagccctctgagcctgcctgtgacacttggacagcctgccagcatcagctgtagaagcagccagagcctgctgcacagcagcggcaatacctacctggaatggtatcagcagaggcccggacagagccccagacctctgatctacaagatcagcacccggttcagcggcgtgcccgatagattttctggctctggcagcggcaccgacttcaccctgaagattagcagagtggaagccgaggacgtgggcgtgtactactgcttccaaggcagccacgtgccatacacctttggcggcggaacaaaggtggaaatcaagagactcgaggacctgaagaacgtgttcccacctgaggtggccgtgttcgagcctagcgaggccgagatcagccacacccagaaagccaccctcgtgtgcctggctaccggcttctaccccgaccatgtggaactgtcttggtgggtcaacggcaaagaggtgcacagcggcgtgtgtaccgacccccagccactgaaagaacagcccgccctgaacgacagccggtactgcctgagcagcagactgagagtgtccgccaccttctggcagaacccccggaaccacttcagatgccaggtgcagttctacggcctgagcgagaacgacgagtggacccaggacagagccaagcccgtgacccagatcgtgtctgccgaagcctggggcagagccgattgcggctttaccagcgagagctaccagcagggcgtgctgagcgccaccatcctgtacgagatcctgctgggcaaggccaccctgtacgccgtgctggtgtctgccctggtgctgatggctatggtcaagcggaaggacagccggggaagggccaagcgatctggatctggagcaacaaacttctcactactcaaacaagcaggtgacgtggaggagaatcccgggcctactagtatggactggatttggcgcatccttttccttgtcggcgctgctaccggcgcgcattccttcgaacaagttcagctggttcagagcggagccgaagtgaagaaacctggggcctctgtgaaggtgtcctgcaaagcctctggcctgaccatcgaggactactacatgcactgggtccgacaggcccctggacaaggacttgaatggatgggctggatcgaccccgagaacggcgatacagagtacggccctaagttccagggcagagtgaccatgaccagagacaccagcatcaacaccgcctacatggaactgagccggctgagatccgatgacaccgccgtgtactattgcgccgtgcacaatgcccactacggcacttggtttgcctattggggccagggcacactggtcaccgttagctctacgcgtatccagaaccctgatcctgccgtgtaccagctgcgggatagcaagagcagcgacaagagcgtgtgtctgttcaccgacttcgacagccagaccaacgtgtcccagagcaaggactccgacgtgtacatcaccgataagtgcgtgctggacatgcggagcatggacttcaagagcaactccgccgtggcctggtccaacaagtccgatttcgcctgcgccaacgccttcaacaacagcattatccccgaggacacattcttcccaagccccgagagcagctgcgacgtgaagctggtggaaaagagcttcgagacagacaccaacctgaacttccagaacctgagcgtgatcggcttcagaatcctgctgctgaaagtggccggctttaacctgctgatgaccctgcggctgtggtccagc

SEQ ID NO: 2003 - DNA, 2259 bp, Artificial Sequence
  Synthetic Polynucloetide
atggccttaccagtgaccgccttgctcctgccgctggccttgctgctccacgccgccaggccggaagtgcagctggttgaatctggcggaggactggttcagcctggcggatctctgagactgtcttgtgccgccagcggcttcagcttcagcgacttttggatgagctgggtccgacaggcccctggcaaaggacttgaatgggtcgccacaatcagccaggccggcagcgagaaggactacgtggactctgtgaagggcagattcaccatcagccgggacaacgccaagaagtccctgtacctccagatgaacagcctgagagccgaggacaccgccgtgtactattgtgcctctggcgtgtacagcttcgactacagaggccagggcaccctggtcacagtctcttctggtaccggcggaggcggatctggcggcggaggtagcggtggcggaggatctgaattcgacatccagatgacacagagccctagcagcctgtctgccagcgtgggagacagagtgaccatcacctgtagagccagcgagaacatctacagcaacctggcctggtatcagcagaagcctggcaaggcccctaagctgctgatctacgccgccaccaatctggctgatggcgtgccaagcagattttccggctctggcagcggcaccgatttcaccctgacaatatccagcctccagcctgaggacttcgccacctactactgccagcacttttggggcacccctacattcggccagggcaccaaggtggaaatcaagagaacagttctcgaggacctgaagaacgtgttcccacctgaggtggccgtgttcgagcctagcgaggccgagatcagccacacccagaaagccaccctcgtgtgcctggctaccggcttctaccccgaccatgtggaactgtcttggtgggtcaacggcaaagaggtgcacagcggcgtgtgtaccgacccccagccactgaaagaacagcccgccctgaacgacagccggtactgcctgagcagcagactgagagtgtccgccaccttctggcagaacccccggaaccacttcagatgccaggtgcagttctacggcctgagcgagaacgacgagtggacccaggacagagccaagcccgtgacccagatcgtgtctgccgaagcctggggcagagccgattgcggctttaccagcgagagctaccagcagggcgtgctgagcgccaccatcctgtacgagatcctgctgggcaaggccaccctgtacgccgtgctggtgtctgccctggtgctgatggctatggtcaagcggaaggacagccggggaagggccaagcgatctggatctggagcaacaaacttctcactactcaaacaagcaggtgacgtggaggagaatcccgggcctactagtatggactggatttggcgcatccttttccttgtcggcgctgctaccggcgcgcattccttcgaagaagtgcagctggttgaatcaggtggcggcctggttcaacctggcggatctctgagactgagctgtgccgcctctggcttcagcctgacaaattacggcgtgcactgggtccgacaggcccctggaaaaggactggaatgggtgtccgtgatttggagcggcggcagcaccgattacaacgccgccttcatcagccggttcaccatcagcgccgacaccagcaagaataccgcctacctccagatgaactccctgagagccgaggacaccgccgtgtactattgcgccagagaactgatccacgctatggacaactggggccagggaaccctggtcacagtctcttctacgcgtatccagaaccctgatcctgccgtgtaccagctgcgggatagcaagagcagcgacaagagcgtgtgtctgttcaccgacttcgacagccagaccaacgtgtcccagagcaaggactccgacgtgtacatcaccgataagtgcgtgctggacatgcggagcatggacttcaagagcaactccgccgtggcctggtccaacaagtccgatttcgcctgcgccaacgccttcaacaacagcattatccccgaggacacattcttcccaagccccgagagcagctgcgacgtgaagctggtggaaaagagcttcgagacagacaccaacctgaacttccagaacctgagcgtgatcggcttcagaatcctgctgctgaaagtggccggctttaacctgctgatgaccctgcggctgtggtccagc

SEQ ID NO: 2004 - DNA, 2280 bp, Artificial Sequence
  Synthetic Polynucloetide
atggccttaccagtgaccgccttgctcctgccgctggccttgctgctccacgccgccaggccggaagtgcagctggttgaatctggcggaggactggttcagcctggcggatctctgagactgtcttgtgccgccagcggcttcagcttcagcgacttttggatgagctgggtccgacaggcccctggcaaaggacttgaatgggtcgccacaatcagccaggccggcagcgagaaggactacgtggactctgtgaagggcagattcaccatcagccgggacaacgccaagaagtccctgtacctccagatgaacagcctgagagccgaggacaccgccgtgtactattgtgcctctggcgtgtacagcttcgactacagaggccagggcaccctggtcacagtctcttctggtaccggcggaggcggatctggcggcggaggtagcggtggcggaggatctgaattcgacttcgtgatgacacagagccctctgagcctgcctgtgacacctggcgaacctgccagcatcagctgtagaagcagccagagcatcgtgcacagcaacggcaacacctacctggaatggtatctccagaagcctggacagagcccacagctgctgatctacaaggtgtccaacagattcagcggcgtgcccgacagattttctggcagcggctctggcaccgacttcaccctgaagattagcagagtggaagccgaggacgtgggcgtgtactactgcttccaaggctctcacgtgcccctgacctttggacagggcaccaagctggaaatcaagagactcgaggacctgaagaacgtgttcccacctgaggtggccgtgttcgagcctagcgaggccgagatcagccacacccagaaagccaccctcgtgtgcctggctaccggcttctaccccgaccatgtggaactgtcttggtgggtcaacggcaaagaggtgcacagcggcgtgtgtaccgacccccagccactgaaagaacagcccgccctgaacgacagccggtactgcctgagcagcagactgagagtgtccgccaccttctggcagaacccccggaaccacttcagatgccaggtgcagttctacggcctgagcgagaacgacgagtggacccaggacagagccaagcccgtgacccagatcgtgtctgccgaagcctggggcagagccgattgcggctttaccagcgagagctaccagcagggcgtgctgagcgccaccatcctgtacgagatcctgctgggcaaggccaccctgtacgccgtgctggtgtctgccctggtgctgatggctatggtcaagcggaaggacagccggggaagggccaagcgatctggatctggagcaacaaacttctcactactcaaacaagcaggtgacgtggaggagaatcccgggcctactagtatggactggatttggcgcatccttttccttgtcggcgctgctaccggcgcgcattccttcgaagaagtgcagctggttgaaagcggagccgaagtgaagaaacctggggcctctgtgaaggtgtcctgcaaggccagcggctacacctttaccagctactggattcactgggtccgacaggcccctggacaaggacttgagtggatgggcgagaacgacccctccaacggcaggaccaactacaacgagaagttcaagaaccgcgtgaccctgaccgtggacaccagcatctctaccgcctacatggaactgagccggctgagatccgatgacaccgccgtgtactattgcgccagaggacccaactacttttacagcatggactactggggccagggcacaatggtcaccgttagctctacgcgtatccagaaccctgatcctgccgtgtaccagctgcgggatagcaagagcagcgacaagagcgtgtgtctgttcaccgacttcgacagccagaccaacgtgtcccagagcaaggactccgacgtgtacatcaccgataagtgcgtgctggacatgcggagcatggacttcaagagcaactccgccgtggcctggtccaacaagtccgatttcgcctgcgccaacgccttcaacaacagcattatccccgaggacacattcttcccaagccccgagagcagctgcgacgtgaagctggtggaaaagagcttcgagacagacaccaacctgaacttccagaacctgagcgtgatcggcttcagaatcctgctgctgaaagtggccggctttaacctgctgatgaccctgcggctgtggtccagc

SEQ ID NO: 2005 - DNA, 2259 bp, Artificial Sequence
  Synthetic Polynucloetide
atggccttaccagtgaccgccttgctcctgccgctggccttgctgctccacgccgccaggccggaagtgcagctggttgaatctggcggaggactggttcagcctggcggatctctgagactgtcttgtgccgccagcggcttcagcttcagcgacttttggatgagctgggtccgacaggcccctggcaaaggacttgaatgggtcgccacaatcagccaggccggcagcgagaaggactacgtggactctgtgaagggcagattcaccatcagccgggacaacgccaagaagtccctgtacctccagatgaacagcctgagagccgaggacaccgccgtgtactattgtgcctctggcgtgtacagcttcgactacagaggccagggcaccctggtcacagtctcttctggtaccggcggaggcggatctggcggcggaggtagcggtggcggaggatctgaattcgacatccagctgactcagagccctagctttctgagcgccagcgtgggcgacagagtgaccatcacatgtagcgccagatccagcatcagcttcatgtactggtatcagcagaagcccggcaaggcccctaagctgctgatctacgacaccagcaatctggcctctggcgtgcccagcagattttctggaagcggcagcggcaccgagttcaccctgacaatctctagcctggaagccgaggatgccgccacctactattgccagcagtggtccagctatcccctgacatttggacagggcaccaagctggaaatcaaactcgaggacctgaagaacgtgttcccacctgaggtggccgtgttcgagcctagcgaggccgagatcagccacacccagaaagccaccctcgtgtgcctggctaccggcttctaccccgaccatgtggaactgtcttggtgggtcaacggcaaagaggtgcacagcggcgtgtgtaccgacccccagccactgaaagaacagcccgccctgaacgacagccggtactgcctgagcagcagactgagagtgtccgccaccttctggcagaacccccggaaccacttcagatgccaggtgcagttctacggcctgagcgagaacgacgagtggacccaggacagagccaagcccgtgacccagatcgtgtctgccgaagcctggggcagagccgattgcggctttaccagcgagagctaccagcagggcgtgctgagcgccaccatcctgtacgagatcctgctgggcaaggccaccctgtacgccgtgctggtgtctgccctggtgctgatggctatggtcaagcggaaggacagccggggaagggccaagcgatctggatctggagcaacaaacttctcactactcaaacaagcaggtgacgtggaggagaatcccgggcctactagtatggactggatttggcgcatccttttccttgtcggcgctgctaccggcgcgcattccttcgaacaggttcagctggttcagtctggggccgaagtgaagaaacctggggcctctgtgaaggtgtcctgcaaggcttccggctacacctttaccggctcttggatgaactgggtccgacaggctcctggacagggactcgaatggatcggcagaatctatcctggcgacggcgagacaaactacaacggcaagttcaaggaccgcgtgacaatcaccgccgacaagagcacaagcaccgcctacatggaactgagcagcctgcggagcgaagataccgccgtgtactactgcgcccggatctacggcaacaacgtgtacttcgatgtgtggggccagggcacaaccgtgacagtctcttctacgcgtatccagaaccctgatcctgccgtgtaccagctgcgggatagcaagagcagcgacaagagcgtgtgtctgttcaccgacttcgacagccagaccaacgtgtcccagagcaaggactccgacgtgtacatcaccgataagtgcgtgctggacatgcggagcatggacttcaagagcaactccgccgtggcctggtccaacaagtccgatttcgcctgcgccaacgccttcaacaacagcattatccccgaggacacattcttcccaagccccgagagcagctgcgacgtgaagctggtggaaaagagcttcgagacagacaccaacctgaacttccagaacctgagcgtgatcggcttcagaatcctgctgctgaaagtggccggctttaacctgctgatgaccctgcggctgtggtccagc

SEQ ID NO: 2006 - DNA, 2283 bp, Artificial Sequence
  Synthetic Polynucloetide
atggccttaccagtgaccgccttgctcctgccgctggccttgctgctccacgccgccaggccggaagtgcagctggttgaatctggcggaggactggttcagcctggcggatctctgagactgtcttgtgccgccagcggcttcagcttcagcgacttttggatgagctgggtccgacaggcccctggcaaaggacttgaatgggtcgccacaatcagccaggccggcagcgagaaggactacgtggactctgtgaagggcagattcaccatcagccgggacaacgccaagaagtccctgtacctccagatgaacagcctgagagccgaggacaccgccgtgtactattgtgcctctggcgtgtacagcttcgactacagaggccagggcaccctggtcacagtctcttctggtaccggcggaggcggatctggcggcggaggtagcggtggcggaggatctgaattccagctggtgctgacacagtctccaagcgcctctgccagcctgggatctagcgtgaagctgacctgtacactgagcagcggccacaagaccgacaccatcgactggtatcagcagcagcctggcaaggcccctagatacctgatgaagctggaaggcagcggcagctacaacaaaggctctggcgtgcccgatagattcagcggcagttcttctggcgctgattggtatctgaccatcagcagcctccagagcgaggacgaggccgattactactgcggcacagactaccccggcaactacctgtttggcggcggaacacagctgacagtgcttggcctcgaggacctgaagaacgtgttcccacctgaggtggccgtgttcgagcctagcgaggccgagatcagccacacccagaaagccaccctcgtgtgcctggctaccggcttctaccccgaccatgtggaactgtcttggtgggtcaacggcaaagaggtgcacagcggcgtgtgtaccgacccccagccactgaaagaacagcccgccctgaacgacagccggtactgcctgagcagcagactgagagtgtccgccaccttctggcagaacccccggaaccacttcagatgccaggtgcagttctacggcctgagcgagaacgacgagtggacccaggacagagccaagcccgtgacccagatcgtgtctgccgaagcctggggcagagccgattgcggctttaccagcgagagctaccagcagggcgtgctgagcgccaccatcctgtacgagatcctgctgggcaaggccaccctgtacgccgtgctggtgtctgccctggtgctgatggctatggtcaagcggaaggacagccggggaagggccaagcgatctggatctggagcaacaaacttctcactactcaaacaagcaggtgacgtggaggagaatcccgggcctactagtatggactggatttggcgcatccttttccttgtcggcgctgctaccggcgcgcattccttcgaacaagaacagctggttgaaagcggcggaggactggttcaacctggcggttctctgagactgagctgtgccgccagcggcttcaccttcagcgactactacatgagctggatcagacaggccccaggcaaaggactggaatgggtcgccacaatctaccccagcagcggcaagacctactacgccgattctgccaagggcagactgaccatctccagcgacaacgccaaggacagcctgtacctccagatgaacagcctgagagccgaggacaccgccgtgtactactgcaccagagatagctacgccgacgacgccgctctgtttgacatttggggccagggcaccaccgtgaccgtttcttctacgcgtatccagaaccctgatcctgccgtgtaccagctgcgggatagcaagagcagcgacaagagcgtgtgtctgttcaccgacttcgacagccagaccaacgtgtcccagagcaaggactccgacgtgtacatcaccgataagtgcgtgctggacatgcggagcatggacttcaagagcaactccgccgtggcctggtccaacaagtccgatttcgcctgcgccaacgccttcaacaacagcattatccccgaggacacattcttcccaagccccgagagcagctgcgacgtgaagctggtggaaaagagcttcgagacagacaccaacctgaacttccagaacctgagcgtgatcggcttcagaatcctgctgctgaaagtggccggctttaacctgctgatgaccctgcggctgtggtccagc

SEQ ID NO: 2007 - DNA, 2248 bp, Artificial Sequence
  Synthetic Polynucloetide
atggccttaccagtgaccgccttgctcctgccgctggccttgctgctccacgccgccaggccggaagtgcagctggttgaatctggcggaggactggttcagcctggcggatctctgagactgtcttgtgccgccagcggcttcagcttcagcgacttttggatgagctgggtccgacaggcccctggcaaaggacttgaatgggtcgccacaatcagccaggccggcagcgagaaggactacgtggactctgtgaagggcagattcaccatcagccgggacaacgccaagaagtccctgtacctccagatgaacagcctgagagccgaggacaccgccgtgtactattgtgcctctggcgtgtacagcttcgactacagaggccagggcaccctggtcacagtctcttctggtaccggcggaggcggatctggcggcggaggtagcggtggcggaggatctgaattcgagattgtgttgacacagtctcccgataccctgtcactgtcacccggcgagaaggcaacgctgagttgcagagcaagccagtcagtctcctcttcttttctggcctggtatcagcaaaaaccaggtcaggcaccatctctcctgatttacgttgccagcagacgggcggctggcattcccgacaggttctctggaagcggatctgggaccgattttaccctgacaattagccgcttggagcccgaagactttggtatgttttactgccagcactacggaaggacacctttcacatttggcccggctcgaggacctgaagaacgtgttcccacctgaggtggccgtgttcgagcctagcgaggccgagatcagccacacccagaaagccaccctcgtgtgcctggctaccggcttctaccccgaccatgtggaactgtcttggtgggtcaacggcaaagaggtgcacagcggcgtgtgtaccgacccccagccactgaaagaacagcccgccctgaacgacagccggtactgcctgagcagcagactgagagtgtccgccaccttctggcagaacccccggaaccacttcagatgccaggtgcagttctacggcctgagcgagaacgacgagtggacccaggacagagccaagcccgtgacccagatcgtgtctgccgaagcctggggcagagccgattgcggctttaccagcgagagctaccagcagggcgtgctgagcgccaccatcctgtacgagatcctgctgggcaaggccaccctgtacgccgtgctggtgtctgccctggtgctgatggctatggtcaagcggaaggacagccggggaagggccaagcgatctggatctggagcaacaaacttctcactactcaaacaagcaggtgacgtggaggagaatcccgggcctactagtatggactggatttggcgcatccttttccttgtcggcgctgctaccggcgcgcattccttcgaacagatccagttggtggaatcagggggcggtgtggtgcagccgggtaggagcctgagactgtcatgcgtggcgtctggcttcacattcaagaactacggcatgcactgggtgcgacaggcccccggaaagggtttggagtgggtcgccgtgatctggtacgacggatctaatgagtattacggagatcctgtgaagggaaggttcaccatctcccgcgacaatagcaaaaatatgctctacctgcaaatgaactcactcagggcggatgatacggcggtctactattgcgctcgctcagggattgctgtggccggcgcattcgattactggggacagggtaccctggtgacagtatcaagcacgcgtatccagaaccctgatcctgccgtgtaccagctgcgggatagcaagagcagcgacaagagcgtgtgtctgttcaccgacttcgacagccagaccaacgtgtcccagagcaaggactccgacgtgtacatcaccgataagtgcgtgctggacatgcggagcatggacttcaagagcaactccgccgtggcctggtccaacaagtccgatttcgcctgcgccaacgccttcaacaacagcattatccccgaggacacattcttcccaagccccgagagcagctgcgacgtgaagctggtggaaaagagcttcgagacagacaccaacctgaacttccagaacctgagcgtgatcggcttcagaatcctgctgctgaaagtggccggctttaacctgctgatgaccctgcggctgtggtccagc

SEQ ID NO: 2008 - DNA, 2297 bp, Artificial Sequence
  Synthetic Polynucloetide
atggccttaccagtgaccgccttgctcctgccgctggccttgctgctccacgccgccaggccggaagtgcagctggttgaatctggcggaggactggttcagcctggcggatctctgagactgtcttgtgccgccagcggcttcagcttcagcgacttttggatgagctgggtccgacaggcccctggcaaaggacttgaatgggtcgccacaatcagccaggccggcagcgagaaggactacgtggactctgtgaagggcagattcaccatcagccgggacaacgccaagaagtccctgtacctccagatgaacagcctgagagccgaggacaccgccgtgtactattgtgcctctggcgtgtacagcttcgactacagaggccagggcaccctggtcacagtctcttctggtaccggcggaggcggatctggcggcggaggtagcggtggcggaggatctgaattcgacattcagatgacccaaagcccgtccagcctgtccgccagcctgggagatagagtgacaatcacgtgtagagcttcccaagggataagaaatgatctcgggtggtatcagcagaagcccggcaaagcccccaaaaggcttatatatgctagtagtacactgcagtctggagttccttcccgattttcaggtagcggctccggtacagagttcaccctcacgataagctcactccagcctgaggatttcgcaacgtactactgcctccagcacaacaattttccctggactttcggccagggcaccaaggtggagatcaagaggctcgaggacctgaagaacgtgttcccacctgaggtggccgtgttcgagcctagcgaggccgagatcagccacacccagaaagccaccctcgtgtgcctggctaccggcttctaccccgaccatgtggaactgtcttggtgggtcaacggcaaagaggtgcacagcggcgtgtgtaccgacccccagccactgaaagaacagcccgccctgaacgacagccggtactgcctgagcagcagactgagagtgtccgccaccttctggcagaacccccggaaccacttcagatgccaggtgcagttctacggcctgagcgagaacgacgagtggacccaggacagagccaagcccgtgacccagatcgtgtctgccgaagcctggggcagagccgattgcggctttaccagcgagagctaccagcagggcgtgctgagcgccaccatcctgtacgagatcctgctgggcaaggccaccctgtacgccgtgctggtgtctgccctggtgctgatggctatggtcaagcggaaggacagccggggaagggccaagcgatctggatctggagcaacaaacttctcactactcaaacaagcaggtgacgtggaggagaatcccgggcctactagtatggactggatttggcgcatccttttccttgtcggcgctgctaccggcgcgcattccttcgaacacgcccgcaagttactttgaaggagtctggacctgtactggtgaagccaaccgagacactgacactcacgtgtacagtgagtggtttttccttgatcaacgcaaggatgggcgtcagctggatcaggcaaccccctggcaaggctctggaatggctcgctcacatattcagcaatgccgaaaaaagctaccggacaagcctgaaatcccgcctgactatttccaaggacacttctaagtctcaggtggtgctgaccatgaccaacatggacccggtggacaccgccacctattactgcgcaagaatccctgggtatggtgggaatggtgactaccattattatgggatggatgtgtgggggcaaggcacaaccgtaacggtctcaagcacgcgtatccagaaccctgatcctgccgtgtaccagctgcgggatagcaagagcagcgacaagagcgtgtgtctgttcaccgacttcgacagccagaccaacgtgtcccagagcaaggactccgacgtgtacatcaccgataagtgcgtgctggacatgcggagcatggacttcaagagcaactccgccgtggcctggtccaacaagtccgatttcgcctgcgccaacgccttcaacaacagcattatccccgaggacacattcttcccaagccccgagagcagctgcgacgtgaagctggtggaaaagagcttcgagacagacaccaacctgaacttccagaacctgagcgtgatcggcttcagaatcctgctgctgaaagtggccggctttaacctgctgatgaccctgcggctgtggtccagc

SEQ ID NO: 2009 - DNA, 2268 bp, Artificial Sequence
  Synthetic Polynucloetide
atggccttaccagtgaccgccttgctcctgccgctggccttgctgctccacgccgccaggccggaagtgcagctggttgaatctggcggaggactggttcagcctggcggatctctgagactgtcttgtgccgccagcggcttcagcttcagcgacttttggatgagctgggtccgacaggcccctggcaaaggacttgaatgggtcgccacaatcagccaggccggcagcgagaaggactacgtggactctgtgaagggcagattcaccatcagccgggacaacgccaagaagtccctgtacctccagatgaacagcctgagagccgaggacaccgccgtgtactattgtgcctctggcgtgtacagcttcgactacagaggccagggcaccctggtcacagtctcttctggtaccggcggaggcggatctggcggcggaggtagcggtggcggaggatctgaattcgacatcgtgctgacacagagccctccaagcctggctatgagcctgggaaagagagccaccatcagctgtagagccagcgagagcgtgacaatcctgggctctcacctgatccactggtatcagcagaagcccggccagcctcctacactgctgattcagctggcctccaatgtgcagacaggcgtgccagccagattttctggcagcggcagcagaaccgacttcaccctgaccattgatcccgtggaagaggacgacgtggccgtgtactactgcctccagagcagaacaatccccagaacctttggcggaggcaccaagctggaaatcaaactcgaggacctgaagaacgtgttcccacctgaggtggccgtgttcgagcctagcgaggccgagatcagccacacccagaaagccaccctcgtgtgcctggctaccggcttctaccccgaccatgtggaactgtcttggtgggtcaacggcaaagaggtgcacagcggcgtgtgtaccgacccccagccactgaaagaacagcccgccctgaacgacagccggtactgcctgagcagcagactgagagtgtccgccaccttctggcagaacccccggaaccacttcagatgccaggtgcagttctacggcctgagcgagaacgacgagtggacccaggacagagccaagcccgtgacccagatcgtgtctgccgaagcctggggcagagccgattgcggctttaccagcgagagctaccagcagggcgtgctgagcgccaccatcctgtacgagatcctgctgggcaaggccaccctgtacgccgtgctggtgtctgccctggtgctgatggctatggtcaagcggaaggacagccggggaagggccaagcgatctggatctggagcaacaaacttctcactactcaaacaagcaggtgacgtggaggagaatcccgggcctactagtatggactggatttggcgcatccttttccttgtcggcgctgctaccggcgcgcattccttcgaacaaatccagctggtgcagtctggccccgagctgaagaaacctggcgagacagtgaagatcagctgcaaggccagcggctacaccttcaccgactacagcatcaactgggtcaagagagcccctggcaagggcctgaaatggatgggctggatcaacaccgaaaccagagagcccgcctacgcctacgacttcagaggcagattcgccttcagcctggaaaccagcgccagcacagcctacctccagatcaacaacctgaagtacgaggacaccgccacctacttttgcgccctggactacagctacgctatggactattggggccagggcaccagcgtgacagtctcttctacgcgtatccagaaccctgatcctgccgtgtaccagctgcgggatagcaagagcagcgacaagagcgtgtgtctgttcaccgacttcgacagccagaccaacgtgtcccagagcaaggactccgacgtgtacatcaccgataagtgcgtgctggacatgcggagcatggacttcaagagcaactccgccgtggcctggtccaacaagtccgatttcgcctgcgccaacgccttcaacaacagcattatccccgaggacacattcttcccaagccccgagagcagctgcgacgtgaagctggtggaaaagagcttcgagacagacaccaacctgaacttccagaacctgagcgtgatcggcttcagaatcctgctgctgaaagtggccggctttaacctgctgatgaccctgcggctgtggtccagc

SEQ ID NO: 2010 - DNA, 2273 bp, Artificial Sequence
  Synthetic Polynucloetide
atggccttaccagtgaccgccttgctcctgccgctggccttgctgctccacgccgccaggccggaagtgcagctggttgaatctggcggaggactggttcagcctggcggatctctgagactgtcttgtgccgccagcggcttcagcttcagcgacttttggatgagctgggtccgacaggcccctggcaaaggacttgaatgggtcgccacaatcagccaggccggcagcgagaaggactacgtggactctgtgaagggcagattcaccatcagccgggacaacgccaagaagtccctgtacctccagatgaacagcctgagagccgaggacaccgccgtgtactattgtgcctctggcgtgtacagcttcgactacagaggccagggcaccctggtcacagtctcttctggtaccggcggaggcggatctggcggcggaggtagcggtggcggaggatctgaattcgatattcaactgacacaatcccccagctcactcagcgccagcgtgggggacagggttagctttacctgtcaagcctctcaggatataaataactttctgaactggtatcaacagaagcctgggaaggcgcccaaactcctgatctatgatgcgtccaacctggaaactggcgtgccttcacgctttagcggctctggcagtggtacagacttcacttttaccatctcttcacttcagccggaggacatcgccacatattactgtcaacagtacggaaacttgccctttacttttggaggcggcaccaaagttgaaatcaaaagctcgaggacctgaagaacgtgttcccacctgaggtggccgtgttcgagcctagcgaggccgagatcagccacacccagaaagccaccctcgtgtgcctggctaccggcttctaccccgaccatgtggaactgtcttggtgggtcaacggcaaagaggtgcacagcggcgtgtgtaccgacccccagccactgaaagaacagcccgccctgaacgacagccggtactgcctgagcagcagactgagagtgtccgccaccttctggcagaacccccggaaccacttcagatgccaggtgcagttctacggcctgagcgagaacgacgagtggacccaggacagagccaagcccgtgacccagatcgtgtctgccgaagcctggggcagagccgattgcggctttaccagcgagagctaccagcagggcgtgctgagcgccaccatcctgtacgagatcctgctgggcaaggccaccctgtacgccgtgctggtgtctgccctggtgctgatggctatggtcaagcggaaggacagccggggaagggccaagcgatctggatctggagcaacaaacttctcactactcaaacaagcaggtgacgtggaggagaatcccgggcctactagtatggactggatttggcgcatccttttccttgtcggcgctgctaccggcgcgcattccttcgaacaggtccaactgcaagaaagcggacccggactggtgaagccttctgagacacttagtctgacgtgcacggtcagtggcggctccatctcctcctattattggtcatggatacgacaacccccaggtaagggcctggaatggattggctatatctactattcaggaagcacgaactacaatcccagcctgaagtcccgagtgacaatttcagtagataccagtaaaaaccagttcagtcttaaactgtcaagcgtgacagctgccgacaccgctgtgtattactgcgtctcactggtgtattgtggaggggattgttatagcgggttcgattattggggacagggaaccctggtgactgtatcttccacgcgtatccagaaccctgatcctgccgtgtaccagctgcgggatagcaagagcagcgacaagagcgtgtgtctgttcaccgacttcgacagccagaccaacgtgtcccagagcaaggactccgacgtgtacatcaccgataagtgcgtgctggacatgcggagcatggacttcaagagcaactccgccgtggcctggtccaacaagtccgatttcgcctgcgccaacgccttcaacaacagcattatccccgaggacacattcttcccaagccccgagagcagctgcgacgtgaagctggtggaaaagagcttcgagacagacaccaacctgaacttccagaacctgagcgtgatcggcttcagaatcctgctgctgaaagtggccggctttaacctgctgatgaccctgcggctgtggtccagc

SEQ ID NO: 2011 - DNA, 2280 bp, Artificial Sequence
  Synthetic Polynucloetide
atggccttaccagtgaccgccttgctcctgccgctggccttgctgctccacgccgccaggccggaagtgcagctggttgaatctggcggaggactggttcagcctggcggatctctgagactgtcttgtgccgccagcggcttcagcttcagcgacttttggatgagctgggtccgacaggcccctggcaaaggacttgaatgggtcgccacaatcagccaggccggcagcgagaaggactacgtggactctgtgaagggcagattcaccatcagccgggacaacgccaagaagtccctgtacctccagatgaacagcctgagagccgaggacaccgccgtgtactattgtgcctctggcgtgtacagcttcgactacagaggccagggcaccctggtcacagtctcttctggtaccggcggaggcggatctggcggcggaggtagcggtggcggaggatctgaattcgatatccagctcactcaaagcccctctagtctctctgcctcagtgggggatcgggtcagttttacttgtcaagcttcacaggatatcaacaacttccttaattggtatcagcagaagccaggaaaagcacccaagctgctcatctatgatgcctcaaatttggagacgggtgttcccagtcgattctctgggtcagggtccgggaccgactttacgtttacgatctcctctctgcagcccgaagacatcgccacatactattgtcaacagtacggcaacttgcctttcacatttgggggcgggactaaggttgaaatcaagaggctcgaggacctgaagaacgtgttcccacctgaggtggccgtgttcgagcctagcgaggccgagatcagccacacccagaaagccaccctcgtgtgcctggctaccggcttctaccccgaccatgtggaactgtcttggtgggtcaacggcaaagaggtgcacagcggcgtgtgtaccgacccccagccactgaaagaacagcccgccctgaacgacagccggtactgcctgagcagcagactgagagtgtccgccaccttctggcagaacccccggaaccacttcagatgccaggtgcagttctacggcctgagcgagaacgacgagtggacccaggacagagccaagcccgtgacccagatcgtgtctgccgaagcctggggcagagccgattgcggctttaccagcgagagctaccagcagggcgtgctgagcgccaccatcctgtacgagatcctgctgggcaaggccaccctgtacgccgtgctggtgtctgccctggtgctgatggctatggtcaagcggaaggacagccggggaagggccaagcgatctggatctggagcaacaaacttctcactactcaaacaagcaggtgacgtggaggagaatcccgggcctactagtatggactggatttggcgcatccttttccttgtcggcgctgctaccggcgcgcattccttcgaacaggtacagctgcaggaatctgggcccggacttgtcaagccaagtcagacactttctcttacatgtaccgtgagcggcggaagtataagcagtggaggcttttactggtcttggatacggcagcacccaggcaaaggcttggagtggattggatacattcatcattcaggatctacacactataatccatcccttaagtcccgggtcaccattagcattgatacgtctaagaatctgttcagtctcaggctgtcctccgtcactgctgccgacacagccgtgtactactgcgcctccttggtttactgcggaggcgactgttatagcggctttgattattgggggcaggggaccctcgtaaccgtgagctctacgcgtatccagaaccctgatcctgccgtgtaccagctgcgggatagcaagagcagcgacaagagcgtgtgtctgttcaccgacttcgacagccagaccaacgtgtcccagagcaaggactccgacgtgtacatcaccgataagtgcgtgctggacatgcggagcatggacttcaagagcaactccgccgtggcctggtccaacaagtccgatttcgcctgcgccaacgccttcaacaacagcattatccccgaggacacattcttcccaagccccgagagcagctgcgacgtgaagctggtggaaaagagcttcgagacagacaccaacctgaacttccagaacctgagcgtgatcggcttcagaatcctgctgctgaaagtggccggctttaacctgctgatgaccctgcggctgtggtccagc

SEQ ID NO: 2012 - DNA, 2268 bp, Artificial Sequence
  Synthetic Polynucloetide
atggccttaccagtgaccgccttgctcctgccgctggccttgctgctccacgccgccaggccggaagtgcagctggttgaatctggcggaggactggttcagcctggcggatctctgagactgtcttgtgccgccagcggcttcagcttcagcgacttttggatgagctgggtccgacaggcccctggcaaaggacttgaatgggtcgccacaatcagccaggccggcagcgagaaggactacgtggactctgtgaagggcagattcaccatcagccgggacaacgccaagaagtccctgtacctccagatgaacagcctgagagccgaggacaccgccgtgtactattgtgcctctggcgtgtacagcttcgactacagaggccagggcaccctggtcacagtctcttctggtaccggcggaggcggatctggcggcggaggtagcggtggcggaggatctgaattcgacattcagatgacacagagccctagcagcctgagcgcctctgtgggagacagagtgaccatcacatgcaagagcagccagagcgtgctgtactccagcaatcagaagaactacctggcctggttccagcagaagcctggcaaggctcctaagctgctgatctactgggccagcaccagagaaagcggcgtgccaagcagattttctggcagcggctctggcaccgacttcaccctgacaatatccagcctccagcctgaggacttcgccacctacttttgccaccagtacctgagcagctacacattcggacagggcaccaaggtggaaatcaagcggctcgaggacctgaagaacgtgttcccacctgaggtggccgtgttcgagcctagcgaggccgagatcagccacacccagaaagccaccctcgtgtgcctggctaccggcttctaccccgaccatgtggaactgtcttggtgggtcaacggcaaagaggtgcacagcggcgtgtgtaccgacccccagccactgaaagaacagcccgccctgaacgacagccggtactgcctgagcagcagactgagagtgtccgccaccttctggcagaacccccggaaccacttcagatgccaggtgcagttctacggcctgagcgagaacgacgagtggacccaggacagagccaagcccgtgacccagatcgtgtctgccgaagcctggggcagagccgattgcggctttaccagcgagagctaccagcagggcgtgctgagcgccaccatcctgtacgagatcctgctgggcaaggccaccctgtacgccgtgctggtgtctgccctggtgctgatggctatggtcaagcggaaggacagccggggaagggccaagcgatctggatctggagcaacaaacttctcactactcaaacaagcaggtgacgtggaggagaatcccgggcctactagtatggactggatttggcgcatccttttccttgtcggcgctgctaccggcgcgcattccttcgaagaggtgcagctggttgaatctggcggaggactggttcagcctggcggatctctgagactgtcttgtgccgccagcggctacaccttcaccacctattggatgcactgggtccgacaggcccctggcaaaggacttgagtgggtcggatatatcaggcccagcaccggctacacagagtacaaccagaagttcaaggaccgcttcaccatcagcgccgacaccagcaagaataccgcctacctccagatgaacagcctgagagccgaggacaccgccgtgtactactgtgccagatccagatggctgctggactattggggccagggcacactggttacagtttctacgcgtatccagaaccctgatcctgccgtgtaccagctgcgggatagcaagagcagcgacaagagcgtgtgtctgttcaccgacttcgacagccagaccaacgtgtcccagagcaaggactccgacgtgtacatcaccgataagtgcgtgctggacatgcggagcatggacttcaagagcaactccgccgtggcctggtccaacaagtccgatttcgcctgcgccaacgccttcaacaacagcattatccccgaggacacattcttcccaagccccgagagcagctgcgacgtgaagctggtggaaaagagcttcgagacagacaccaacctgaacttccagaacctgagcgtgatcggcttcagaatcctgctgctgaaagtggccggctttaacctgctgatgaccctgcggctgtggtccagc

SEQ ID NO: 2013 - DNA, 2259 bp, Artificial Sequence
  Synthetic Polynucloetide
atggccttaccagtgaccgccttgctcctgccgctggccttgctgctccacgccgccaggccggaagtgcagctggttgaatctggcggaggactggttcagcctggcggatctctgagactgtcttgtgccgccagcggcttcagcttcagcgacttttggatgagctgggtccgacaggcccctggcaaaggacttgaatgggtcgccacaatcagccaggccggcagcgagaaggactacgtggactctgtgaagggcagattcaccatcagccgggacaacgccaagaagtccctgtacctccagatgaacagcctgagagccgaggacaccgccgtgtactattgtgcctctggcgtgtacagcttcgactacagaggccagggcaccctggtcacagtctcttctggtaccggcggaggcggatctggcggcggaggtagcggtggcggaggatctgaattcgacatccagatgacacagagccctagcagcctgtctgccagcgtgggagacagagtgaccatcacctgtagagccagccaggacatcagcaactacctgaactggtatcagcagaagcccggcaaggcccctaagctgctgatctactacaccagcagactgcacagcggcgtgcccagcagattttctggctctggcagcggcaccgacttcaccctgacaatatctagcctccagcctgaggacttcgccacctactattgccagcagggcaacaccctgccttacacatttggacagggcaccaaggtggaaatcaagagactcgaggacctgaagaacgtgttcccacctgaggtggccgtgttcgagcctagcgaggccgagatcagccacacccagaaagccaccctcgtgtgcctggctaccggcttctaccccgaccatgtggaactgtcttggtgggtcaacggcaaagaggtgcacagcggcgtgtgtaccgacccccagccactgaaagaacagcccgccctgaacgacagccggtactgcctgagcagcagactgagagtgtccgccaccttctggcagaacccccggaaccacttcagatgccaggtgcagttctacggcctgagcgagaacgacgagtggacccaggacagagccaagcccgtgacccagatcgtgtctgccgaagcctggggcagagccgattgcggctttaccagcgagagctaccagcagggcgtgctgagcgccaccatcctgtacgagatcctgctgggcaaggccaccctgtacgccgtgctggtgtctgccctggtgctgatggctatggtcaagcggaaggacagccggggaagggccaagcgatctggatctggagcaacaaacttctcactactcaaacaagcaggtgacgtggaggagaatcccgggcctactagtatggactggatttggcgcatccttttccttgtcggcgctgctaccggcgcgcattccttcgaagaagtgcagctggttgaatcaggtggcggcctggttcaacctggcggatctctgagactgagctgtgccgccagcggcttcaccttcagcgactactttatgagctgggtccgacaggcccctggcaaaggacttgaatgggtcgccaccatcagcaatggcggcacctacacttactaccccgacagcgtgaagggcagattcaccatctccagagacaacagcaagaacaccctgtacctccagatgaactccctgagagccgaggacaccgccgtgtactactgcgccagattcgacggctacatcttcgactattggggccagggcaccctggtcacagtctcttctacgcgtatccagaaccctgatcctgccgtgtaccagctgcgggatagcaagagcagcgacaagagcgtgtgtctgttcaccgacttcgacagccagaccaacgtgtcccagagcaaggactccgacgtgtacatcaccgataagtgcgtgctggacatgcggagcatggacttcaagagcaactccgccgtggcctggtccaacaagtccgatttcgcctgcgccaacgccttcaacaacagcattatccccgaggacacattcttcccaagccccgagagcagctgcgacgtgaagctggtggaaaagagcttcgagacagacaccaacctgaacttccagaacctgagcgtgatcggcttcagaatcctgctgctgaaagtggccggctttaacctgctgatgaccctgcggctgtggtccagc

SEQ ID NO: 2014 - DNA, 2274 bp, Artificial Sequence
  Synthetic Polynucloetide
atggccttaccagtgaccgccttgctcctgccgctggccttgctgctccacgccgccaggccggaagtgcagctggttgaatctggcggaggactggttcagcctggcggatctctgagactgtcttgtgccgccagcggcttcagcttcagcgacttttggatgagctgggtccgacaggcccctggcaaaggacttgaatgggtcgccacaatcagccaggccggcagcgagaaggactacgtggactctgtgaagggcagattcaccatcagccgggacaacgccaagaagtccctgtacctccagatgaacagcctgagagccgaggacaccgccgtgtactattgtgcctctggcgtgtacagcttcgactacagaggccagggcaccctggtcacagtctcttctggtaccggcggaggcggatctggcggcggaggtagcggtggcggaggatctgaattcgacatccagatgacacagactacatcctccctgtctgcctctctgggagacagagtcaccatcagttgcagggcaagtcaggacattagtaagtacctgaactggtatcagcagaaaccagatggaactgttaaactcctgatctaccatacatcaagattacactcaggagtcccatcaaggttcagtggcagtgggtctggaacagattattctctcaccattagcaacctggagcaagaagatattgccacttacttttgccaacagggtaatacgcttccgtacacgttcggaggggggaccaagctggagatcacactcgagatccagaaccctgatcctgccgtgtaccagctgcgggatagcaagagcagcgacaagagcgtgtgtctgttcaccgacttcgacagccagaccaacgtgtcccagagcaaggactccgacgtgtacatcaccgataagtgcgtgctggacatgcggagcatggacttcaagagcaactccgccgtggcctggtccaacaagtccgatttcgcctgcgccaacgccttcaacaacagcattatccccgaggacacattcttcccaagccccgagagcagctgcgacgtgaagctggtggaaaagagcttcgagacagacaccaacctgaacttccagaacctgagcgtgatcggcttcagaatcctgctgctgaaagtggccggctttaacctgctgatgaccctgcggctgtggtccagccgcgccaagagaagcggatctggcgtgaagcagaccctgaatttcgacctgctgaagctggctggcgacgtggaatccaacccaggccctactagtatggactggatttggcgcatccttttccttgtcggcgctgctaccggcgcgcattccttcgaagtgaaactgcaggagtcaggacctggcctggtggcgccctcacagagcctgtccgtcacatgcactgtctcaggggtctcattacccgactatggtgtaagctggattcgccagcctccacgaaagggtctggagtggctgggagtaatatggggtagtgaaaccacatactataattcagctctcaaatccagactgaccatcatcaaggacaactccaagagccaagttttcttaaaaatgaacagtctgcaaactgatgacacagccatttactactgtgccaaacattattactacggtggtagctatgctatggactactggggccaaggaacctcagtcaccgtctcctcaacgcgtgaggacctgaagaacgtgttcccacctgaggtggccgtgttcgagcctagcgaggccgagatcagccacacccagaaagccaccctcgtgtgcctggctaccggcttctaccccgaccatgtggaactgtcttggtgggtcaacggcaaagaggtgcacagcggcgtgtgtaccgacccccagccactgaaagaacagcccgccctgaacgacagccggtactgcctgagcagcagactgagagtgtccgccaccttctggcagaacccccggaaccacttcagatgccaggtgcagttctacggcctgagcgagaacgacgagtggacccaggacagagccaagcccgtgacccagatcgtgtctgccgaagcctggggcagagccgattgcggctttaccagcgagagctaccagcagggcgtgctgagcgccaccatcctgtacgagatcctgctgggcaaggccaccctgtacgccgtgctggtgtctgccctggtgctgatggctatggtcaagcggaaggacagccgggga

SEQ ID NO: 2015 - DNA, 2277 bp, Artificial Sequence
  Synthetic Polynucloetide
atggccttaccagtgaccgccttgctcctgccgctggccttgctgctccacgccgccaggccggaagtgcagctggttgaatctggcggaggactggttcagcctggcggatctctgagactgtcttgtgccgccagcggcttcagcttcagcgacttttggatgagctgggtccgacaggcccctggcaaaggacttgaatgggtcgccacaatcagccaggccggcagcgagaaggactacgtggactctgtgaagggcagattcaccatcagccgggacaacgccaagaagtccctgtacctccagatgaacagcctgagagccgaggacaccgccgtgtactattgtgcctctggcgtgtacagcttcgactacagaggccagggcaccctggtcacagtctcttctggtaccggcggaggcggatctggcggcggaggtagcggtggcggaggatctgaattcgagatcgtgatgacccagagccctgccaccctgtctctgagccctggcgaaagagccaccctgagctgtagagccagccaggacatcagcaagtacctgaactggtatcagcagaagcccggccaggcccccagactgctgatctaccacaccagcagactgcacagcggcatccccgccagattttctggctctggcagcggcaccgactacaccctgacaatcagcagcctccagcccgaggacttcgccgtgtacttctgtcagcaaggcaacaccctgccctacaccttcggccagggcaccaagctggaaatcaagctcgagatccagaaccctgatcctgccgtgtaccagctgcgggatagcaagagcagcgacaagagcgtgtgtctgttcaccgacttcgacagccagaccaacgtgtcccagagcaaggactccgacgtgtacatcaccgataagtgcgtgctggacatgcggagcatggacttcaagagcaactccgccgtggcctggtccaacaagtccgatttcgcctgcgccaacgccttcaacaacagcattatccccgaggacacattcttcccaagccccgagagcagctgcgacgtgaagctggtggaaaagagcttcgagacagacaccaacctgaacttccagaacctgagcgtgatcggcttcagaatcctgctgctgaaagtggccggctttaacctgctgatgaccctgcggctgtggtccagccgcgccaagagaagcggatctggcgtgaagcagaccctgaatttcgacctgctgaagctggctggcgacgtggaatccaacccaggccctactagtatggactggatttggcgcatccttttccttgtcggcgctgctaccggcgcgcattccttcgaacaggtgcaactccaggaatctggccctggcctcgtgaagcccagcgagacactgagcctgacctgtaccgtgtccggcgtgtccctgcctgactatggcgtgtcctggatcagacagccccctggcaagggcctggaatggatcggagtgatttggggcagcgaaaccacctactacaacagctccctgaagtccagagtgaccatctccaaggacaactccaagaaccaggtgtccctgaagctgagcagcgtgacagccgccgacaccgccgtgtattactgcgccaagcactactactacggcggcagctacgctatggactactggggccagggaaccctcgtgaccgtgtctagtacgcgtgaggacctgaagaacgtgttcccacctgaggtggccgtgttcgagcctagcgaggccgagatcagccacacccagaaagccaccctcgtgtgcctggctaccggcttctaccccgaccatgtggaactgtcttggtgggtcaacggcaaagaggtgcacagcggcgtgtgtaccgacccccagccactgaaagaacagcccgccctgaacgacagccggtactgcctgagcagcagactgagagtgtccgccaccttctggcagaacccccggaaccacttcagatgccaggtgcagttctacggcctgagcgagaacgacgagtggacccaggacagagccaagcccgtgacccagatcgtgtctgccgaagcctggggcagagccgattgcggctttaccagcgagagctaccagcagggcgtgctgagcgccaccatcctgtacgagatcctgctgggcaaggccaccctgtacgccgtgctggtgtctgccctggtgctgatggctatggtcaagcggaaggacagccgggga

SEQ ID NO: 2016 - DNA, 2280 bp, Artificial Sequence
  Synthetic Polynucloetide
atggccttaccagtgaccgccttgctcctgccgctggccttgctgctccacgccgccaggccggaagtgcagctggttgaatctggcggaggactggttcagcctggcggatctctgagactgtcttgtgccgccagcggcttcagcttcagcgacttttggatgagctgggtccgacaggcccctggcaaaggacttgaatgggtcgccacaatcagccaggccggcagcgagaaggactacgtggactctgtgaagggcagattcaccatcagccgggacaacgccaagaagtccctgtacctccagatgaacagcctgagagccgaggacaccgccgtgtactattgtgcctctggcgtgtacagcttcgactacagaggccagggcaccctggtcacagtctcttctggtaccggcggaggcggatctggcggcggaggtagcggtggcggaggatctgaattcgacgagatcgtgctgacacagagccccgccaccctgtcactgtctccaggcgaaagagccaccctgagctgtagcgccagcagcagcgtgtcctacatgcactggtatcagcagaagcccggccaggcccccagactgctgatctacgataccagcaagctggcctccggcatccccgccagattttctggcagcggctccggcaccgacttcaccctgacaatcagcagcctggaacccgaggacgtggccgtgtactactgttttcaaggcagcgtgtaccccttcaccttcggccagggcaccaagctggaaatcaagagactcgagatccagaaccctgatcctgccgtgtaccagctgcgggatagcaagagcagcgacaagagcgtgtgtctgttcaccgacttcgacagccagaccaacgtgtcccagagcaaggactccgacgtgtacatcaccgataagtgcgtgctggacatgcggagcatggacttcaagagcaactccgccgtggcctggtccaacaagtccgatttcgcctgcgccaacgccttcaacaacagcattatccccgaggacacattcttcccaagccccgagagcagctgcgacgtgaagctggtggaaaagagcttcgagacagacaccaacctgaacttccagaacctgagcgtgatcggcttcagaatcctgctgctgaaagtggccggctttaacctgctgatgaccctgcggctgtggtccagccgcgccaagagaagcggatctggcgtgaagcagaccctgaatttcgacctgctgaagctggctggcgacgtggaatccaacccaggccctactagtatggactggatttggcgcatccttttccttgtcggcgctgctaccggcgcgcattccttcgaacaggtgcagctccaggaatctggccctggcctcgtgaagcctagccagaccctgagcctgacctgtaccgtgtctggcggcagcatcagcacaagcggcatgggcgtgggctggatcagacagcaccctggcaagggcctggaatggatcggccacatttggtgggacgacgacaagcggtacaaccccgccctgaagtccagagtgaccatcagcgtggacaccagcaagaaccagttcagcctgaagctgagcagcgtgacagccgccgataccgccgtgtattattgcgcccggatggaactgtggtcctactacttcgactactggggccagggaaccctcgtgaccgtgtctagtacgcgtgaggacctgaagaacgtgttcccacctgaggtggccgtgttcgagcctagcgaggccgagatcagccacacccagaaagccaccctcgtgtgcctggctaccggcttctaccccgaccatgtggaactgtcttggtgggtcaacggcaaagaggtgcacagcggcgtgtgtaccgacccccagccactgaaagaacagcccgccctgaacgacagccggtactgcctgagcagcagactgagagtgtccgccaccttctggcagaacccccggaaccacttcagatgccaggtgcagttctacggcctgagcgagaacgacgagtggacccaggacagagccaagcccgtgacccagatcgtgtctgccgaagcctggggcagagccgattgcggctttaccagcgagagctaccagcagggcgtgctgagcgccaccatcctgtacgagatcctgctgggcaaggccaccctgtacgccgtgctggtgtctgccctggtgctgatggctatggtcaagcggaaggacagccgggga

SEQ ID NO: 2017 - DNA, 2274 bp, Artificial Sequence
  Synthetic Polynucloetide
atggccttaccagtgaccgccttgctcctgccgctggccttgctgctccacgccgccaggccggaagtgcagctggttgaatctggcggaggactggttcagcctggcggatctctgagactgtcttgtgccgccagcggcttcagcttcagcgacttttggatgagctgggtccgacaggcccctggcaaaggacttgaatgggtcgccacaatcagccaggccggcagcgagaaggactacgtggactctgtgaagggcagattcaccatcagccgggacaacgccaagaagtccctgtacctccagatgaacagcctgagagccgaggacaccgccgtgtactattgtgcctctggcgtgtacagcttcgactacagaggccagggcaccctggtcacagtctcttctggtaccggcggaggcggatctggcggcggaggtagcggtggcggaggatctgaattcgactacatccacgtgacacagagccctagcagcctgtccgtgtccatcggcgatagagtgaccatcaactgccagacctctcaaggcgtgggcagcgacctgcactggtatcagcacaaacctggcagagcccctaagctgctgatccaccatgccagctctgtggaagatggcgtgcccagcagattttccggcaccggatttcacaccagcttcaacctgacaatcaacgacctccaggccgacgacatcggcacctactactgtcaagtgctccagagcttcggcagaggcagcagactggatacaaaactcgagatccagaaccctgatcctgccgtgtaccagctgcgggatagcaagagcagcgacaagagcgtgtgtctgttcaccgacttcgacagccagaccaacgtgtcccagagcaaggactccgacgtgtacatcaccgataagtgcgtgctggacatgcggagcatggacttcaagagcaactccgccgtggcctggtccaacaagtccgatttcgcctgcgccaacgccttcaacaacagcattatccccgaggacacattcttcccaagccccgagagcagctgcgacgtgaagctggtggaaaagagcttcgagacagacaccaacctgaacttccagaacctgagcgtgatcggcttcagaatcctgctgctgaaagtggccggctttaacctgctgatgaccctgcggctgtggtccagccgcgccaagagaagcggatctggcgtgaagcagaccctgaatttcgacctgctgaagctggctggcgacgtggaatccaacccaggccctactagtatggactggatttggcgcatccttttccttgtcggcgctgctaccggcgcgcattccttcgaaagggcacacctggtgcagtctggcaccgccatgaagaaacctggcgcttccgtcagagtgtcctgtcagacaagcggctacaccttcacagcccacatcctgttctggttcagacaggccccaggcagaggactggaatgggtcggatggatcaagccccagtacggggccgtgaatttcggcggaggcttcagagacagagtgaccctgaccagggacgtgtaccgggaaatcgcctacatggacatccggggcctgaagcctgatgacaccgccgtgtactactgcgccagggatagaagctacggcgacagctcttgggctctcgatgcttggggacagggcacaacagtggtggtgtctgctacgcgtgaggacctgaagaacgtgttcccacctgaggtggccgtgttcgagcctagcgaggccgagatcagccacacccagaaagccaccctcgtgtgcctggctaccggcttctaccccgaccatgtggaactgtcttggtgggtcaacggcaaagaggtgcacagcggcgtgtgtaccgacccccagccactgaaagaacagcccgccctgaacgacagccggtactgcctgagcagcagactgagagtgtccgccaccttctggcagaacccccggaaccacttcagatgccaggtgcagttctacggcctgagcgagaacgacgagtggacccaggacagagccaagcccgtgacccagatcgtgtctgccgaagcctggggcagagccgattgcggctttaccagcgagagctaccagcagggcgtgctgagcgccaccatcctgtacgagatcctgctgggcaaggccaccctgtacgccgtgctggtgtctgccctggtgctgatggctatggtcaagcggaaggacagccgggga

SEQ ID NO: 2018 - DNA, 2304 bp, Artificial Sequence
  Synthetic Polynucloetide
atggccttaccagtgaccgccttgctcctgccgctggccttgctgctccacgccgccaggccggaagtgcagctggttgaatctggcggaggactggttcagcctggcggatctctgagactgtcttgtgccgccagcggcttcagcttcagcgacttttggatgagctgggtccgacaggcccctggcaaaggacttgaatgggtcgccacaatcagccaggccggcagcgagaaggactacgtggactctgtgaagggcagattcaccatcagccgggacaacgccaagaagtccctgtacctccagatgaacagcctgagagccgaggacaccgccgtgtactattgtgcctctggcgtgtacagcttcgactacagaggccagggcaccctggtcacagtctcttctggtaccggcggaggcggatctggcggcggaggtagcggtggcggaggatctgaattcgacgtgcagatgatccagacccccgatagcctggccgtgtccctgggacagagagccaccatctcttgcagagccagcgagagcgtggacaactacggcatcagcttcatgcactggtatcagcagaagcccggccagagccccaagctgctgatctacagagcctccaacctggaaagcggcatccccgccagattttccggcagcggcagcagaaccgacttcaccctgaccatcaaccccgtggaaaccgacgacgtggcaacctactactgccagcagaacaacaaggacccccccacctttggcggaggcaccaagctggaaatcaagctcgagatccagaaccctgatcctgccgtgtaccagctgcgggatagcaagagcagcgacaagagcgtgtgtctgttcaccgacttcgacagccagaccaacgtgtcccagagcaaggactccgacgtgtacatcaccgataagtgcgtgctggacatgcggagcatggacttcaagagcaactccgccgtggcctggtccaacaagtccgatttcgcctgcgccaacgccttcaacaacagcattatccccgaggacacattcttcccaagccccgagagcagctgcgacgtgaagctggtggaaaagagcttcgagacagacaccaacctgaacttccagaacctgagcgtgatcggcttcagaatcctgctgctgaaagtggccggctttaacctgctgatgaccctgcggctgtggtccagccgcgccaagagaagcggatctggcgtgaagcagaccctgaatttcgacctgctgaagctggctggcgacgtggaatccaacccaggccctactagtatggactggatttggcgcatccttttccttgtcggcgctgctaccggcgcgcattccttcgaagggggaggcggctctcaggtgcaactccagcagtctggcgctgagcttgtgaagcctggggccagcgtgaagattagctgcaaggccagcggctacgccttcagcagctactggatgaactgggtcaagcagcggcctggcaagggcctggaatggatcggccaaatctaccccggcgacggcgacaccacctacaacggcaagttcaagggcaaggccaccctgacagccgacaagagcagcagcaccgtgtacatgcaactgaacagcctgaccagcgaggacagcgccgtgtacttctgcgtgcggtactactacggcagctccggctacttcgactattggggccagggcaccacactgaccgtgtcctctacgcgtgaggacctgaagaacgtgttcccacctgaggtggccgtgttcgagcctagcgaggccgagatcagccacacccagaaagccaccctcgtgtgcctggctaccggcttctaccccgaccatgtggaactgtcttggtgggtcaacggcaaagaggtgcacagcggcgtgtgtaccgacccccagccactgaaagaacagcccgccctgaacgacagccggtactgcctgagcagcagactgagagtgtccgccaccttctggcagaacccccggaaccacttcagatgccaggtgcagttctacggcctgagcgagaacgacgagtggacccaggacagagccaagcccgtgacccagatcgtgtctgccgaagcctggggcagagccgattgcggctttaccagcgagagctaccagcagggcgtgctgagcgccaccatcctgtacgagatcctgctgggcaaggccaccctgtacgccgtgctggtgtctgccctggtgctgatggctatggtcaagcggaaggacagccgggga

SEQ ID NO: 2019 - DNA, 2277 bp, Artificial Sequence
  Synthetic Polynucloetide
atggccttaccagtgaccgccttgctcctgccgctggccttgctgctccacgccgccaggccggaagtgcagctggttgaatctggcggaggactggttcagcctggcggatctctgagactgtcttgtgccgccagcggcttcagcttcagcgacttttggatgagctgggtccgacaggcccctggcaaaggacttgaatgggtcgccacaatcagccaggccggcagcgagaaggactacgtggactctgtgaagggcagattcaccatcagccgggacaacgccaagaagtccctgtacctccagatgaacagcctgagagccgaggacaccgccgtgtactattgtgcctctggcgtgtacagcttcgactacagaggccagggcaccctggtcacagtctcttctggtaccggcggaggcggatctggcggcggaggtagcggtggcggaggatctgaattcgacgtgcagatgatccagacccccagcagcctgtctgccagcctgggcgatagagtgaccatcagctgtcgggccagccaggacatcggcaactacctgaactggtatcagcagaaacccgacggcaccgtgaagctgctgatctactacaccagcagactgcacagcggcgtgcccagcagattttctggcagcggctctggcaccgagtacagcctgaccatctccaacctggaacaggaagatattgctacctacttctgtcagcaaggcagcgccctgccccctacatttggcggcggaacaaagctggaaatcaacctcgagatccagaaccctgatcctgccgtgtaccagctgcgggatagcaagagcagcgacaagagcgtgtgtctgttcaccgacttcgacagccagaccaacgtgtcccagagcaaggactccgacgtgtacatcaccgataagtgcgtgctggacatgcggagcatggacttcaagagcaactccgccgtggcctggtccaacaagtccgatttcgcctgcgccaacgccttcaacaacagcattatccccgaggacacattcttcccaagccccgagagcagctgcgacgtgaagctggtggaaaagagcttcgagacagacaccaacctgaacttccagaacctgagcgtgatcggcttcagaatcctgctgctgaaagtggccggctttaacctgctgatgaccctgcggctgtggtccagccgcgccaagagaagcggatctggcgtgaagcagaccctgaatttcgacctgctgaagctggctggcgacgtggaatccaacccaggccctactagtatggactggatttggcgcatccttttccttgtcggcgctgctaccggcgcgcattccttcgaagctctccagctccagcagtctggcgcagaactcgtgcggcctggcgcttctgtgaccctgagctgtaaagccagcggctacaccttcaccgactacgagatgcactgggtcaagcagacccctgtgcacggcctggaatggatcggagccatcgaccctgagacaggcggcaccgcctacaaccagaagttcgagggcaaggccatcctgaccgccgacaagagcagcagcacagcctacatggaactgcggagcctgacctccgaggacagccccgtgtactactgtgccagacggcggtactacggcagcagctccttcgactattggggccagggcaccaccctgaccgtgtctagtacgcgtgaggacctgaagaacgtgttcccacctgaggtggccgtgttcgagcctagcgaggccgagatcagccacacccagaaagccaccctcgtgtgcctggctaccggcttctaccccgaccatgtggaactgtcttggtgggtcaacggcaaagaggtgcacagcggcgtgtgtaccgacccccagccactgaaagaacagcccgccctgaacgacagccggtactgcctgagcagcagactgagagtgtccgccaccttctggcagaacccccggaaccacttcagatgccaggtgcagttctacggcctgagcgagaacgacgagtggacccaggacagagccaagcccgtgacccagatcgtgtctgccgaagcctggggcagagccgattgcggctttaccagcgagagctaccagcagggcgtgctgagcgccaccatcctgtacgagatcctgctgggcaaggccaccctgtacgccgtgctggtgtctgccctggtgctgatggctatggtcaagcggaaggacagccgggga

SEQ ID NO: 2020 - DNA, 2289 bp, Artificial Sequence
  Synthetic Polynucloetide
atggccttaccagtgaccgccttgctcctgccgctggccttgctgctccacgccgccaggccggaagtgcagctggttgaatctggcggaggactggttcagcctggcggatctctgagactgtcttgtgccgccagcggcttcagcttcagcgacttttggatgagctgggtccgacaggcccctggcaaaggacttgaatgggtcgccacaatcagccaggccggcagcgagaaggactacgtggactctgtgaagggcagattcaccatcagccgggacaacgccaagaagtccctgtacctccagatgaacagcctgagagccgaggacaccgccgtgtactattgtgcctctggcgtgtacagcttcgactacagaggccagggcaccctggtcacagtctcttctggtaccggcggaggcggatctggcggcggaggtagcggtggcggaggatctgaattcgacatcgtcctgacccagtccccagccagcctggcggtgtccctgggtcaacgagctaccatttcctgcagagcctctaagtccgtatccacttccggctatagttacctgcattggtaccaacagaaaccagggcagccacccaagctgctcatctatctggcctcaaacctggagtccggcgtgcccgccagattctccggaagtgggagcggcaccgactttacattgaacatccacccagtcgaagaggaagatgctgccacttattactgtcagcactccagggagctgccatttacatttggctctggcacaaaactggagatcaaactcgagatccagaaccctgatcctgccgtgtaccagctgcgggatagcaagagcagcgacaagagcgtgtgtctgttcaccgacttcgacagccagaccaacgtgtcccagagcaaggactccgacgtgtacatcaccgataagtgcgtgctggacatgcggagcatggacttcaagagcaactccgccgtggcctggtccaacaagtccgatttcgcctgcgccaacgccttcaacaacagcattatccccgaggacacattcttcccaagccccgagagcagctgcgacgtgaagctggtggaaaagagcttcgagacagacaccaacctgaacttccagaacctgagcgtgatcggcttcagaatcctgctgctgaaagtggccggctttaacctgctgatgaccctgcggctgtggtccagccgcgccaagagaagcggatctggcgtgaagcagaccctgaatttcgacctgctgaagctggctggcgacgtggaatccaacccaggccctactagtatggactggatttggcgcatccttttccttgtcggcgctgctaccggcgcgcattccttcgaacaggttcagctggtcgagtccgggggaggtctggtacagccgggtggcagcctcaagctgtcatgtgccgcatctggttttgactttagcaggtattggatgagctgggtccgccaggccccgggcaagggacttgagtggattggagaaataaaccctacttccagcacaatcaacttcacaccttctttgaaagataaggtttttatctctcgggataacgctaaaaacacactgtacttgcagatgtctaaggtgcgaagcgaagacaccgccctctattattgcgcccggggtaattactaccgctatggggatgcgatggactattgggggcaaggtacctccgtcacggtctcaacgcgtgaggacctgaagaacgtgttcccacctgaggtggccgtgttcgagcctagcgaggccgagatcagccacacccagaaagccaccctcgtgtgcctggctaccggcttctaccccgaccatgtggaactgtcttggtgggtcaacggcaaagaggtgcacagcggcgtgtgtaccgacccccagccactgaaagaacagcccgccctgaacgacagccggtactgcctgagcagcagactgagagtgtccgccaccttctggcagaacccccggaaccacttcagatgccaggtgcagttctacggcctgagcgagaacgacgagtggacccaggacagagccaagcccgtgacccagatcgtgtctgccgaagcctggggcagagccgattgcggctttaccagcgagagctaccagcagggcgtgctgagcgccaccatcctgtacgagatcctgctgggcaaggccaccctgtacgccgtgctggtgtctgccctggtgctgatggctatggtcaagcggaaggacagccgggga

SEQ ID NO: 2021 - DNA, 2283 bp, Artificial Sequence
  Synthetic Polynucloetide
atggccttaccagtgaccgccttgctcctgccgctggccttgctgctccacgccgccaggccggaagtgcagctggttgaatctggcggaggactggttcagcctggcggatctctgagactgtcttgtgccgccagcggcttcagcttcagcgacttttggatgagctgggtccgacaggcccctggcaaaggacttgaatgggtcgccacaatcagccaggccggcagcgagaaggactacgtggactctgtgaagggcagattcaccatcagccgggacaacgccaagaagtccctgtacctccagatgaacagcctgagagccgaggacaccgccgtgtactattgtgcctctggcgtgtacagcttcgactacagaggccagggcaccctggtcacagtctcttctggtaccggcggaggcggatctggcggcggaggtagcggtggcggaggatctgaattcgacatccagatgacccagagccctagctcactgagcgccagcgtgggcgacagggtgaccattacctgctccgccagccaggacatcagcaactacctgaactggtaccagcagaagcccggcaaggcccccaagctgctgatctactacacctccaacctgcactccggcgtgcccagcaggttcagcggaagcggcagcggcaccgatttcaccctgaccatctccagcctgcagcccgaggacttcgccacctactactgccagcagtacaggaagctcccctggactttcggccagggcaccaaactggagatcaagcgtctcgagatccagaaccctgatcctgccgtgtaccagctgcgggatagcaagagcagcgacaagagcgtgtgtctgttcaccgacttcgacagccagaccaacgtgtcccagagcaaggactccgacgtgtacatcaccgataagtgcgtgctggacatgcggagcatggacttcaagagcaactccgccgtggcctggtccaacaagtccgatttcgcctgcgccaacgccttcaacaacagcattatccccgaggacacattcttcccaagccccgagagcagctgcgacgtgaagctggtggaaaagagcttcgagacagacaccaacctgaacttccagaacctgagcgtgatcggcttcagaatcctgctgctgaaagtggccggctttaacctgctgatgaccctgcggctgtggtccagccgcgccaagagaagcggatctggcgtgaagcagaccctgaatttcgacctgctgaagctggctggcgacgtggaatccaacccaggccctactagtatggactggatttggcgcatccttttccttgtcggcgctgctaccggcgcgcattccttcgaacaggtgcagctggtccagagcggcgccgaagtgaagaagcccggcagctccgtgaaagtgagctgcaaggccagcggcggcaccttcagcaactactggatgcactgggtgaggcaggcccccggacagggcctggagtggatgggcgccacctacaggggccacagcgacacctactacaaccagaagttcaagggccgggtgaccatcaccgccgacaagagcaccagcaccgcctacatggaactgagcagcctcaggagcgaggacaccgctgtgtattactgcgccaggggcgccatctacgacggctacgacgtgctggacaactggggccagggcacactggtgaccgtgtccagcacgcgtgaggacctgaagaacgtgttcccacctgaggtggccgtgttcgagcctagcgaggccgagatcagccacacccagaaagccaccctcgtgtgcctggctaccggcttctaccccgaccatgtggaactgtcttggtgggtcaacggcaaagaggtgcacagcggcgtgtgtaccgacccccagccactgaaagaacagcccgccctgaacgacagccggtactgcctgagcagcagactgagagtgtccgccaccttctggcagaacccccggaaccacttcagatgccaggtgcagttctacggcctgagcgagaacgacgagtggacccaggacagagccaagcccgtgacccagatcgtgtctgccgaagcctggggcagagccgattgcggctttaccagcgagagctaccagcagggcgtgctgagcgccaccatcctgtacgagatcctgctgggcaaggccaccctgtacgccgtgctggtgtctgccctggtgctgatggctatggtcaagcggaaggacagccgggga

SEQ ID NO: 2022 - DNA, 2283 bp, Artificial Sequence
  Synthetic Polynucloetide
atggccttaccagtgaccgccttgctcctgccgctggccttgctgctccacgccgccaggccggaagtgcagctggttgaatctggcggaggactggttcagcctggcggatctctgagactgtcttgtgccgccagcggcttcagcttcagcgacttttggatgagctgggtccgacaggcccctggcaaaggacttgaatgggtcgccacaatcagccaggccggcagcgagaaggactacgtggactctgtgaagggcagattcaccatcagccgggacaacgccaagaagtccctgtacctccagatgaacagcctgagagccgaggacaccgccgtgtactattgtgcctctggcgtgtacagcttcgactacagaggccagggcaccctggtcacagtctcttctggtaccggcggaggcggatctggcggcggaggtagcggtggcggaggatctgaattcgacatcgtgctgacacagagccctgccaccctgtctctgagccctggcgatagagccaccatcagctgtagagccagcgagagcgtgaccatcctgggcagccacctgatctactggtatcagcagaagcccggccagccccccagactgctgattcagctggcctccaatgtgcagaccggcgtgccagccagattttccggcagcggcagcagaaccgacttcaccctgaccatcagcagcgtggaacccgaggacttcgccgtgtactactgcctccagagccggaccatccccagaacattcggccagggcaccaagctggaaatcaagagactcgagatccagaaccctgatcctgccgtgtaccagctgcgggatagcaagagcagcgacaagagcgtgtgtctgttcaccgacttcgacagccagaccaacgtgtcccagagcaaggactccgacgtgtacatcaccgataagtgcgtgctggacatgcggagcatggacttcaagagcaactccgccgtggcctggtccaacaagtccgatttcgcctgcgccaacgccttcaacaacagcattatccccgaggacacattcttcccaagccccgagagcagctgcgacgtgaagctggtggaaaagagcttcgagacagacaccaacctgaacttccagaacctgagcgtgatcggcttcagaatcctgctgctgaaagtggccggctttaacctgctgatgaccctgcggctgtggtccagccgcgccaagagaagcggatctggcgtgaagcagaccctgaatttcgacctgctgaagctggctggcgacgtggaatccaacccaggccctactagtatggactggatttggcgcatccttttccttgtcggcgctgctaccggcgcgcattccttcgaacaggtgcagctggtgcagtctggccccgaagtgaagaaacccggcgagtccgtgaagatcagctgcaaggccagcggctacaccttccggcactacagcatgaactgggtcaagcaggccccaggccagggcctgaagtggatgggcagaatcaacaccgagagcggcgtgcccatctacgccgacgacttcaagggccggttcagcttcaccgtggacaccagcgccagcaccgcctacctggaaatctccagcctgaccagcgaggataccgccgtgtatttctgctccaacgactacctgtacagcctggatttctggggccagggaaccaccctgacagtgtcctctacgcgtgaggacctgaagaacgtgttcccacctgaggtggccgtgttcgagcctagcgaggccgagatcagccacacccagaaagccaccctcgtgtgcctggctaccggcttctaccccgaccatgtggaactgtcttggtgggtcaacggcaaagaggtgcacagcggcgtgtgtaccgacccccagccactgaaagaacagcccgccctgaacgacagccggtactgcctgagcagcagactgagagtgtccgccaccttctggcagaacccccggaaccacttcagatgccaggtgcagttctacggcctgagcgagaacgacgagtggacccaggacagagccaagcccgtgacccagatcgtgtctgccgaagcctggggcagagccgattgcggctttaccagcgagagctaccagcagggcgtgctgagcgccaccatcctgtacgagatcctgctgggcaaggccaccctgtacgccgtgctggtgtctgccctggtgctgatggctatggtcaagcggaaggacagccgggga

SEQ ID NO: 2023 - DNA, 2286 bp, Artificial Sequence
  Synthetic Polynucloetide
atggccttaccagtgaccgccttgctcctgccgctggccttgctgctccacgccgccaggccggaagtgcagctggttgaatctggcggaggactggttcagcctggcggatctctgagactgtcttgtgccgccagcggcttcagcttcagcgacttttggatgagctgggtccgacaggcccctggcaaaggacttgaatgggtcgccacaatcagccaggccggcagcgagaaggactacgtggactctgtgaagggcagattcaccatcagccgggacaacgccaagaagtccctgtacctccagatgaacagcctgagagccgaggacaccgccgtgtactattgtgcctctggcgtgtacagcttcgactacagaggccagggcaccctggtcacagtctcttctggtaccggcggaggcggatctggcggcggaggtagcggtggcggaggatctgaattccagtctgtgctgacacagcctcctagtgtgtctggcgctcctggacagagagtgaccatcagctgtacaggcagcagcagcaatatcggagccggctttgacgtgcactggtatcagcagctgcctggcacagcccctaaactgctgatctacggcaacagcaacagacccagcggcgtgcccgatagattttccggctctaagagcggcacaagcgccagcctggctattactggactccaggccgaggacgaggccgactactactgtcagagctacgacagcagcctgagcggctacgttttcggcaccggcaccaaagtgacagtgcttggtctcgagatccagaaccctgatcctgccgtgtaccagctgcgggatagcaagagcagcgacaagagcgtgtgtctgttcaccgacttcgacagccagaccaacgtgtcccagagcaaggactccgacgtgtacatcaccgataagtgcgtgctggacatgcggagcatggacttcaagagcaactccgccgtggcctggtccaacaagtccgatttcgcctgcgccaacgccttcaacaacagcattatccccgaggacacattcttcccaagccccgagagcagctgcgacgtgaagctggtggaaaagagcttcgagacagacaccaacctgaacttccagaacctgagcgtgatcggcttcagaatcctgctgctgaaagtggccggctttaacctgctgatgaccctgcggctgtggtccagccgcgccaagagaagcggatctggcgtgaagcagaccctgaatttcgacctgctgaagctggctggcgacgtggaatccaacccaggccctactagtatggactggatttggcgcatccttttccttgtcggcgctgctaccggcgcgcattccttcgaacaagttcagctggttcagagcggagccgaagtgaagaaacctggggcctctgtgaaggtgtcctgcaaggcttccggctacacctttaccgattactacatgcactgggtccgacaggctcccggccaaagacttgaatggatgggctggatcaaccccaacagcggcggcacaaattacgcccagaagttccaggaccggatcaccgtgaccagagacaccagctccaacaccggctacatggaactgacccggctgagatccgatgacaccgccgtgtactactgcgctagaagcccttactccggcgtgctggataagtggggacagggcacactggtcaccgtgtcatctacgcgtgaggacctgaagaacgtgttcccacctgaggtggccgtgttcgagcctagcgaggccgagatcagccacacccagaaagccaccctcgtgtgcctggctaccggcttctaccccgaccatgtggaactgtcttggtgggtcaacggcaaagaggtgcacagcggcgtgtgtaccgacccccagccactgaaagaacagcccgccctgaacgacagccggtactgcctgagcagcagactgagagtgtccgccaccttctggcagaacccccggaaccacttcagatgccaggtgcagttctacggcctgagcgagaacgacgagtggacccaggacagagccaagcccgtgacccagatcgtgtctgccgaagcctggggcagagccgattgcggctttaccagcgagagctaccagcagggcgtgctgagcgccaccatcctgtacgagatcctgctgggcaaggccaccctgtacgccgtgctggtgtctgccctggtgctgatggctatggtcaagcggaaggacagccgggga

SEQ ID NO: 2024 - DNA, 2277 bp, Artificial Sequence
  Synthetic Polynucloetide
atggccttaccagtgaccgccttgctcctgccgctggccttgctgctccacgccgccaggccggaagtgcagctggttgaatctggcggaggactggttcagcctggcggatctctgagactgtcttgtgccgccagcggcttcagcttcagcgacttttggatgagctgggtccgacaggcccctggcaaaggacttgaatgggtcgccacaatcagccaggccggcagcgagaaggactacgtggactctgtgaagggcagattcaccatcagccgggacaacgccaagaagtccctgtacctccagatgaacagcctgagagccgaggacaccgccgtgtactattgtgcctctggcgtgtacagcttcgactacagaggccagggcaccctggtcacagtctcttctggtaccggcggaggcggatctggcggcggaggtagcggtggcggaggatctgaattccaggctgttctgacacagcctccatctgcctctggcacacctggacagagagtgaccatctcctgtagcggcagcagcagcaacatcggcagctacaccgtgtcctggtatcagcagctccctggaacagcccctaagttcctgatctacagcaacaaccagcggcctagcggcgtgcccgatagattttctggcagcaagagcggcacaagcgccagcctggctatttctggactccagtctgaggacgaggccgactactattgtgccgcctgggacgatagcctgaacggctatgtgtttggcaccggcaccaaagtgacagtgcttggtctcgagatccagaaccctgatcctgccgtgtaccagctgcgggatagcaagagcagcgacaagagcgtgtgtctgttcaccgacttcgacagccagaccaacgtgtcccagagcaaggactccgacgtgtacatcaccgataagtgcgtgctggacatgcggagcatggacttcaagagcaactccgccgtggcctggtccaacaagtccgatttcgcctgcgccaacgccttcaacaacagcattatccccgaggacacattcttcccaagccccgagagcagctgcgacgtgaagctggtggaaaagagcttcgagacagacaccaacctgaacttccagaacctgagcgtgatcggcttcagaatcctgctgctgaaagtggccggctttaacctgctgatgaccctgcggctgtggtccagccgcgccaagagaagcggatctggcgtgaagcagaccctgaatttcgacctgctgaagctggctggcgacgtggaatccaacccaggccctactagtatggactggatttggcgcatccttttccttgtcggcgctgctaccggcgcgcattccttcgaagttcaactggttcagagcggagccgaagtgaagaagcctggcgagagcctgaagattagctgcaaaggcagcggctacgacttcaccacctactggatcggctgggtccgacagatgcctggcaaaggactggaatggatgggcatcatctaccccggcgacagcgacaccagatacagccctagcgttagaggccgcgtgaccatcagcgccgacaagtctatcaacaccgcctacctccagtggtccagcctggaagcctctgacaccgccatgtactactgcgccagaatgtggaccttcagccaggatggatggggccagggaacactggtcacagtgtcatctacgcgtgaggacctgaagaacgtgttcccacctgaggtggccgtgttcgagcctagcgaggccgagatcagccacacccagaaagccaccctcgtgtgcctggctaccggcttctaccccgaccatgtggaactgtcttggtgggtcaacggcaaagaggtgcacagcggcgtgtgtaccgacccccagccactgaaagaacagcccgccctgaacgacagccggtactgcctgagcagcagactgagagtgtccgccaccttctggcagaacccccggaaccacttcagatgccaggtgcagttctacggcctgagcgagaacgacgagtggacccaggacagagccaagcccgtgacccagatcgtgtctgccgaagcctggggcagagccgattgcggctttaccagcgagagctaccagcagggcgtgctgagcgccaccatcctgtacgagatcctgctgggcaaggccaccctgtacgccgtgctggtgtctgccctggtgctgatggctatggtcaagcggaaggacagccgggga

SEQ ID NO: 2025 - DNA, 2286 bp, Artificial Sequence
  Synthetic Polynucloetide
atggccttaccagtgaccgccttgctcctgccgctggccttgctgctccacgccgccaggccggaagtgcagctggttgaatctggcggaggactggttcagcctggcggatctctgagactgtcttgtgccgccagcggcttcagcttcagcgacttttggatgagctgggtccgacaggcccctggcaaaggacttgaatgggtcgccacaatcagccaggccggcagcgagaaggactacgtggactctgtgaagggcagattcaccatcagccgggacaacgccaagaagtccctgtacctccagatgaacagcctgagagccgaggacaccgccgtgtactattgtgcctctggcgtgtacagcttcgactacagaggccagggcaccctggtcacagtctcttctggtaccggcggaggcggatctggcggcggaggtagcggtggcggaggatctgaattcgacatcgtgatgacccagagccccgatagcctggccgtgtctctgggagagagagccaccatcaactgcaagagcagccagagcatcctgtacagcagcaaccagaagaactacctggcctggtatcagcagaagcccggccagagccctaagctgctgatctactgggccagcaccagagaaagcggcgtgcccgatagattcagcggcagcggctctggcaccgacttcaccctgaccatcagttctcttcaggccgaggacgtggccgtgtactactgccaccagtacatcagctcctacaccttcggccagggcaccaagctggaaatcaagctcgagatccagaaccctgatcctgccgtgtaccagctgcgggatagcaagagcagcgacaagagcgtgtgtctgttcaccgacttcgacagccagaccaacgtgtcccagagcaaggactccgacgtgtacatcaccgataagtgcgtgctggacatgcggagcatggacttcaagagcaactccgccgtggcctggtccaacaagtccgatttcgcctgcgccaacgccttcaacaacagcattatccccgaggacacattcttcccaagccccgagagcagctgcgacgtgaagctggtggaaaagagcttcgagacagacaccaacctgaacttccagaacctgagcgtgatcggcttcagaatcctgctgctgaaagtggccggctttaacctgctgatgaccctgcggctgtggtccagccgcgccaagagaagcggatctggcgtgaagcagaccctgaatttcgacctgctgaagctggctggcgacgtggaatccaacccaggccctactagtatggactggatttggcgcatccttttccttgtcggcgctgctaccggcgcgcattccttcgaacaggtgcagctggtgcagtctggcgctgaagtgaagaaacctggggccagcgtgaaggtgtcctgcaaggccagcggctacacctttgccagccagtggatgcactggatgagacaggcccctggacagggcctggaatggatcggctggatcaaccccggcaacgtgaacaccaagtacaacgagaagttcaagggcagagccaccctgacagtggacaccagcaccaacaccgcctacatggaactgagcagcctgcggagcgaggacaccgccgtgtattattgcgccagaagcacctggtacagacccctggattattggggccagggaacccttgtgaccgtgtcctctacgcgtgaggacctgaagaacgtgttcccacctgaggtggccgtgttcgagcctagcgaggccgagatcagccacacccagaaagccaccctcgtgtgcctggctaccggcttctaccccgaccatgtggaactgtcttggtgggtcaacggcaaagaggtgcacagcggcgtgtgtaccgacccccagccactgaaagaacagcccgccctgaacgacagccggtactgcctgagcagcagactgagagtgtccgccaccttctggcagaacccccggaaccacttcagatgccaggtgcagttctacggcctgagcgagaacgacgagtggacccaggacagagccaagcccgtgacccagatcgtgtctgccgaagcctggggcagagccgattgcggctttaccagcgagagctaccagcagggcgtgctgagcgccaccatcctgtacgagatcctgctgggcaaggccaccctgtacgccgtgctggtgtctgccctggtgctgatggctatggtcaagcggaaggacagccgggga

SEQ ID NO: 2026 - DNA, 2286 bp, Artificial Sequence
  Synthetic Polynucloetide
atggccttaccagtgaccgccttgctcctgccgctggccttgctgctccacgccgccaggccggaagtgcagctggttgaatctggcggaggactggttcagcctggcggatctctgagactgtcttgtgccgccagcggcttcagcttcagcgacttttggatgagctgggtccgacaggcccctggcaaaggacttgaatgggtcgccacaatcagccaggccggcagcgagaaggactacgtggactctgtgaagggcagattcaccatcagccgggacaacgccaagaagtccctgtacctccagatgaacagcctgagagccgaggacaccgccgtgtactattgtgcctctggcgtgtacagcttcgactacagaggccagggcaccctggtcacagtctcttctggtaccggcggaggcggatctggcggcggaggtagcggtggcggaggatctgaattcgaccacatcgtgctgacccagagccctagcagcctgtctgccagcctgggcgacagagtgaccatcagctgtagagccagccaggacatcagcacctacctgaactggtatcagcagaaacccgacggcaccgtgaagctgctgatcttctacaccagcagactgcacgccggggtgcccagcagattttctggcagcggctctggcacccaccacagcctgaccatctccaacctggaacaggaagatattgctacctacttctgtcagcaaggcaacagcctgcccttcaccttcggcagcggcaccaagctggaaatcaagagactcgagatccagaaccctgatcctgccgtgtaccagctgcgggatagcaagagcagcgacaagagcgtgtgtctgttcaccgacttcgacagccagaccaacgtgtcccagagcaaggactccgacgtgtacatcaccgataagtgcgtgctggacatgcggagcatggacttcaagagcaactccgccgtggcctggtccaacaagtccgatttcgcctgcgccaacgccttcaacaacagcattatccccgaggacacattcttcccaagccccgagagcagctgcgacgtgaagctggtggaaaagagcttcgagacagacaccaacctgaacttccagaacctgagcgtgatcggcttcagaatcctgctgctgaaagtggccggctttaacctgctgatgaccctgcggctgtggtccagccgcgccaagagaagcggatctggcgtgaagcagaccctgaatttcgacctgctgaagctggctggcgacgtggaatccaacccaggccctactagtatggactggatttggcgcatccttttccttgtcggcgctgctaccggcgcgcattccttcgaacaggtgcagctgaaagagagcggccctgagctggaaaagcctggggccagcgtgaagattagctgcaaggccagcggctacagcttcaccgcctacagcatgaactgggtcaagcagaacaacggcatgagcctggaatggatcggcagcatcgacccctactacggcgacaccaaatacgcccagaagttcaagggcaaggccaccctgaccgtggataaggccagcagcaccgcctacctccagctgaagtctctgaccagcgaggacagcgccgtgtactactgcgccagacggatgattaccaccggcgactggtacttcgacgtgtggggagccggaaccaccgtgacagtgtctagcacgcgtgaggacctgaagaacgtgttcccacctgaggtggccgtgttcgagcctagcgaggccgagatcagccacacccagaaagccaccctcgtgtgcctggctaccggcttctaccccgaccatgtggaactgtcttggtgggtcaacggcaaagaggtgcacagcggcgtgtgtaccgacccccagccactgaaagaacagcccgccctgaacgacagccggtactgcctgagcagcagactgagagtgtccgccaccttctggcagaacccccggaaccacttcagatgccaggtgcagttctacggcctgagcgagaacgacgagtggacccaggacagagccaagcccgtgacccagatcgtgtctgccgaagcctggggcagagccgattgcggctttaccagcgagagctaccagcagggcgtgctgagcgccaccatcctgtacgagatcctgctgggcaaggccaccctgtacgccgtgctggtgtctgccctggtgctgatggctatggtcaagcggaaggacagccgggga

SEQ ID NO: 2027 - DNA, 2286 bp, Artificial Sequence; identical to SEQ ID NO: 2026
  Synthetic Polynucloetide

SEQ ID NO: 2028 - DNA, 2286 bp, Artificial Sequence
  Synthetic Polynucloetide
atggccttaccagtgaccgccttgctcctgccgctggccttgctgctccacgccgccaggccggaagtgcagctggttgaatctggcggaggactggttcagcctggcggatctctgagactgtcttgtgccgccagcggcttcagcttcagcgacttttggatgagctgggtccgacaggcccctggcaaaggacttgaatgggtcgccacaatcagccaggccggcagcgagaaggactacgtggactctgtgaagggcagattcaccatcagccgggacaacgccaagaagtccctgtacctccagatgaacagcctgagagccgaggacaccgccgtgtactattgtgcctctggcgtgtacagcttcgactacagaggccagggcaccctggtcacagtctcttctggtaccggcggaggcggatctggcggcggaggtagcggtggcggaggatctgaattcgacgagatcgtgctgacacagagccctgccaccctgtctctgagccctggcgaaagagccaccctgagctgtagagccagccagagcgtgtccagctacctggcctggtatcagcagaagcccggccaggctccccggctgctgatctacgatgccagcaatagagccaccggcatccccgccagattttccggctctggcagcggcaccgacttcaccctgaccatcagctccctggaacccgaggacttcgccgtgtactactgccagcagcggagcaactggcccatcacattcggccagggcacccggctggaaatcaaactcgagatccagaaccctgatcctgccgtgtaccagctgcgggatagcaagagcagcgacaagagcgtgtgtctgttcaccgacttcgacagccagaccaacgtgtcccagagcaaggactccgacgtgtacatcaccgataagtgcgtgctggacatgcggagcatggacttcaagagcaactccgccgtggcctggtccaacaagtccgatttcgcctgcgccaacgccttcaacaacagcattatccccgaggacacattcttcccaagccccgagagcagctgcgacgtgaagctggtggaaaagagcttcgagacagacaccaacctgaacttccagaacctgagcgtgatcggcttcagaatcctgctgctgaaagtggccggctttaacctgctgatgaccctgcggctgtggtccagccgcgccaagagaagcggatctggcgtgaagcagaccctgaatttcgacctgctgaagctggctggcgacgtggaatccaacccaggccctactagtatggactggatttggcgcatccttttccttgtcggcgctgctaccggcgcgcattccttcgaagaagtgcagctggtggaatcaggcggcggactggtgcagcctggcagaagcctgagactgagctgtgccgccagcggcttcaccttcaacgactacgccatgcactgggtgcgccaggcccctggaaaaggactggaatgggtgtccacaatcagctggaacagcggcagcatcggctacgccgatagcgtgaagggccggttcaccatcagccgggacaacgccaagaagtccctgtacctccagatgaacagcctgcgggccgaggacacagccctgtactattgcgccaaggacatccagtacggcaactactactacggcatggacgtgtggggccagggaaccaccgtgaccgtgtcatctacgcgtgaggacctgaagaacgtgttcccacctgaggtggccgtgttcgagcctagcgaggccgagatcagccacacccagaaagccaccctcgtgtgcctggctaccggcttctaccccgaccatgtggaactgtcttggtgggtcaacggcaaagaggtgcacagcggcgtgtgtaccgacccccagccactgaaagaacagcccgccctgaacgacagccggtactgcctgagcagcagactgagagtgtccgccaccttctggcagaacccccggaaccacttcagatgccaggtgcagttctacggcctgagcgagaacgacgagtggacccaggacagagccaagcccgtgacccagatcgtgtctgccgaagcctggggcagagccgattgcggctttaccagcgagagctaccagcagggcgtgctgagcgccaccatcctgtacgagatcctgctgggcaaggccaccctgtacgccgtgctggtgtctgccctggtgctgatggctatggtcaagcggaaggacagccgggga

SEQ ID NO: 2029 - DNA, 2292 bp, Artificial Sequence
  Synthetic Polynucloetide
atggccttaccagtgaccgccttgctcctgccgctggccttgctgctccacgccgccaggccggaagtgcagctggttgaatctggcggaggactggttcagcctggcggatctctgagactgtcttgtgccgccagcggcttcagcttcagcgacttttggatgagctgggtccgacaggcccctggcaaaggacttgaatgggtcgccacaatcagccaggccggcagcgagaaggactacgtggactctgtgaagggcagattcaccatcagccgggacaacgccaagaagtccctgtacctccagatgaacagcctgagagccgaggacaccgccgtgtactattgtgcctctggcgtgtacagcttcgactacagaggccagggcaccctggtcacagtctcttctggtaccggcggaggcggatctggcggcggaggtagcggtggcggaggatctgaattcgacatcgtgatgacccagacccccctgagcctgcctgtgacacctggcgagcctgccagcatctcctgcagaagcagcaagagcctgctgcacagcaacggcatcacctacctgtactggtatctgcagaaacccggccagagcccccaactgctgatctaccagatgagcaacctggtgtccggcgtgcccgacagattttctggcagcggctccggcaccgacttcaccctgaagatcagccgggtggaagccgaggacgtgggcgtgtactactgcgcccagaacctggaactgccctacacctttggcggcggaacaaaggtggaaatcaagcggctcgagatccagaaccctgatcctgccgtgtaccagctgcgggatagcaagagcagcgacaagagcgtgtgtctgttcaccgacttcgacagccagaccaacgtgtcccagagcaaggactccgacgtgtacatcaccgataagtgcgtgctggacatgcggagcatggacttcaagagcaactccgccgtggcctggtccaacaagtccgatttcgcctgcgccaacgccttcaacaacagcattatccccgaggacacattcttcccaagccccgagagcagctgcgacgtgaagctggtggaaaagagcttcgagacagacaccaacctgaacttccagaacctgagcgtgatcggcttcagaatcctgctgctgaaagtggccggctttaacctgctgatgaccctgcggctgtggtccagccgcgccaagagaagcggatctggcgtgaagcagaccctgaatttcgacctgctgaagctggctggcgacgtggaatccaacccaggccctactagtatggactggatttggcgcatccttttccttgtcggcgctgctaccggcgcgcattccttcgaacaggtgcaactggtgcagagcggagccgaagtgaaaaagcccggcagcagcgtgaaggtgtcctgcaaggccagcggctacgccttcagctactcctggatcaactgggtgcgccaggcccctggacagggcctggaatggatgggcagaatcttccccggcgacggcgacaccgactacaacggcaagttcaagggcagagtgaccatcaccgccgacaagagcaccagcaccgcctacatggaactgagcagcctgcggagcgaggataccgccgtgtactattgtgccagaaacgtgttcgacggctactggctggtgtactggggccagggaacacttgtgaccgtgtccagcacgcgtgaggacctgaagaacgtgttcccacctgaggtggccgtgttcgagcctagcgaggccgagatcagccacacccagaaagccaccctcgtgtgcctggctaccggcttctaccccgaccatgtggaactgtcttggtgggtcaacggcaaagaggtgcacagcggcgtgtgtaccgacccccagccactgaaagaacagcccgccctgaacgacagccggtactgcctgagcagcagactgagagtgtccgccaccttctggcagaacccccggaaccacttcagatgccaggtgcagttctacggcctgagcgagaacgacgagtggacccaggacagagccaagcccgtgacccagatcgtgtctgccgaagcctggggcagagccgattgcggctttaccagcgagagctaccagcagggcgtgctgagcgccaccatcctgtacgagatcctgctgggcaaggccaccctgtacgccgtgctggtgtctgccctggtgctgatggctatggtcaagcggaaggacagccgggga

SEQ ID NO: 2030 - DNA, 2295 bp, Artificial Sequence
  Synthetic Polynucloetide
atggccttaccagtgaccgccttgctcctgccgctggccttgctgctccacgccgccaggccggaagtgcagctggttgaatctggcggaggactggttcagcctggcggatctctgagactgtcttgtgccgccagcggcttcagcttcagcgacttttggatgagctgggtccgacaggcccctggcaaaggacttgaatgggtcgccacaatcagccaggccggcagcgagaaggactacgtggactctgtgaagggcagattcaccatcagccgggacaacgccaagaagtccctgtacctccagatgaacagcctgagagccgaggacaccgccgtgtactattgtgcctctggcgtgtacagcttcgactacagaggccagggcaccctggtcacagtctcttctggtaccggcggaggcggatctggcggcggaggtagcggtggcggaggatctgaattcgacatccagatgacccagagccccagcagcctgtctgccagcgtgggcgacagagtgaccatcacctgtcggagcagccagagcatcgtgcactccgtgggcaacaccttcctggaatggtatcagcagaagcccggcaaggcccccaagctgctgatctacaaggtgtccaacagattcagcggcgtgcccagcaggtttagcggctctggcagcggcaccgacttcaccctgaccatctctagcctccagcccgaggacttcgccacctactactgttttcaaggcagccagttcccctacaccttcggccagggaacaaaggtggaaatcaagcggctcgagatccagaaccctgatcctgccgtgtaccagctgcgggatagcaagagcagcgacaagagcgtgtgtctgttcaccgacttcgacagccagaccaacgtgtcccagagcaaggactccgacgtgtacatcaccgataagtgcgtgctggacatgcggagcatggacttcaagagcaactccgccgtggcctggtccaacaagtccgatttcgcctgcgccaacgccttcaacaacagcattatccccgaggacacattcttcccaagccccgagagcagctgcgacgtgaagctggtggaaaagagcttcgagacagacaccaacctgaacttccagaacctgagcgtgatcggcttcagaatcctgctgctgaaagtggccggctttaacctgctgatgaccctgcggctgtggtccagccgcgccaagagaagcggatctggcgtgaagcagaccctgaatttcgacctgctgaagctggctggcgacgtggaatccaacccaggccctactagtatggactggatttggcgcatccttttccttgtcggcgctgctaccggcgcgcattccttcgaagaagtgcaactggtggaaagcggaggcggcctggtgcagcctggcggatctctgagactgagctgtgccgccagcggctacgagttcagccggtcctggatgaactgggtgcgccaggcccctggcaagggactggaatgggtgggaagaatctaccccggcgacggcgacaccaactacagcggcaagttcaagggccggttcaccatcagcgccgacaccagcaagaacaccgcctacctccagatgaacagcctgcgggccgaggataccgccgtgtactactgtgccagagatggcagctcctgggactggtacttcgacgtgtggggacagggaacccttgtgaccgtgtccagcacgcgtgaggacctgaagaacgtgttcccacctgaggtggccgtgttcgagcctagcgaggccgagatcagccacacccagaaagccaccctcgtgtgcctggctaccggcttctaccccgaccatgtggaactgtcttggtgggtcaacggcaaagaggtgcacagcggcgtgtgtaccgacccccagccactgaaagaacagcccgccctgaacgacagccggtactgcctgagcagcagactgagagtgtccgccaccttctggcagaacccccggaaccacttcagatgccaggtgcagttctacggcctgagcgagaacgacgagtggacccaggacagagccaagcccgtgacccagatcgtgtctgccgaagcctggggcagagccgattgcggctttaccagcgagagctaccagcagggcgtgctgagcgccaccatcctgtacgagatcctgctgggcaaggccaccctgtacgccgtgctggtgtctgccctggtgctgatggctatggtcaagcggaaggacagccgggga

SEQ ID NO: 2031 - DNA, 2289 bp, Artificial Sequence
  Synthetic Polynucloetide
atggccttaccagtgaccgccttgctcctgccgctggccttgctgctccacgccgccaggccggaagtgcagctggttgaatctggcggaggactggttcagcctggcggatctctgagactgtcttgtgccgccagcggcttcagcttcagcgacttttggatgagctgggtccgacaggcccctggcaaaggacttgaatgggtcgccacaatcagccaggccggcagcgagaaggactacgtggactctgtgaagggcagattcaccatcagccgggacaacgccaagaagtccctgtacctccagatgaacagcctgagagccgaggacaccgccgtgtactattgtgcctctggcgtgtacagcttcgactacagaggccagggcaccctggtcacagtctcttctggtaccggcggaggcggatctggcggcggaggtagcggtggcggaggatctgaattcgacatccagatgacccagagccccagcagcctgtctgccagcgtgggcgacagagtgaccatcacctgtagagccagccagaccatctggtcctacctgaactggtatcagcagaggcccggcaaggcccccaacctgctgatctatgccgccagctctctccagagcggcgtgcccagcagattttccggcagaggcagcggcaccgacttcaccctgaccatcagttccttgcaggccgaggacttcgccacctactactgccagcagagctacagcatcccccagattttcggccagggcaccaagctggaaatcaagctcgagatccagaaccctgatcctgccgtgtaccagctgcgggatagcaagagcagcgacaagagcgtgtgtctgttcaccgacttcgacagccagaccaacgtgtcccagagcaaggactccgacgtgtacatcaccgataagtgcgtgctggacatgcggagcatggacttcaagagcaactccgccgtggcctggtccaacaagtccgatttcgcctgcgccaacgccttcaacaacagcattatccccgaggacacattcttcccaagccccgagagcagctgcgacgtgaagctggtggaaaagagcttcgagacagacaccaacctgaacttccagaacctgagcgtgatcggcttcagaatcctgctgctgaaagtggccggctttaacctgctgatgaccctgcggctgtggtccagccgcgccaagagaagcggatctggcgtgaagcagaccctgaatttcgacctgctgaagctggctggcgacgtggaatccaacccaggccctactagtatggactggatttggcgcatccttttccttgtcggcgctgctaccggcgcgcattccttcgaacaggtgcagctccagcagtctggacccggcctcgtgaagcctagccagacactgagcctgacctgcgccatcagcggcgatagcgtgtccagcaatagcgccgcctggaactggatcagacagtccccctctcggggcctggaatggctgggccggacctactaccgcagcaagtggtacaacgactacgccgtgtccgtgaagtcccggatcaccatcaaccccgacaccagcaagaaccagttctccttgcaactgaacagcgtgacccccgaggacaccgccgtgtactactgcgccagagaagtgaccggcgacctggaagatgccttcgacatctggggccagggaacaatggtcacagtgtccagcacgcgtgaggacctgaagaacgtgttcccacctgaggtggccgtgttcgagcctagcgaggccgagatcagccacacccagaaagccaccctcgtgtgcctggctaccggcttctaccccgaccatgtggaactgtcttggtgggtcaacggcaaagaggtgcacagcggcgtgtgtaccgacccccagccactgaaagaacagcccgccctgaacgacagccggtactgcctgagcagcagactgagagtgtccgccaccttctggcagaacccccggaaccacttcagatgccaggtgcagttctacggcctgagcgagaacgacgagtggacccaggacagagccaagcccgtgacccagatcgtgtctgccgaagcctggggcagagccgattgcggctttaccagcgagagctaccagcagggcgtgctgagcgccaccatcctgtacgagatcctgctgggcaaggccaccctgtacgccgtgctggtgtctgccctggtgctgatggctatggtcaagcggaaggacagccgggga

SEQ ID NO: 2032 - DNA, 2268 bp, Artificial Sequence
  Synthetic Polynucloetide
atggccttaccagtgaccgccttgctcctgccgctggccttgctgctccacgccgccaggccggaagtgcagctggttgaatctggcggaggactggttcagcctggcggatctctgagactgtcttgtgccgccagcggcttcagcttcagcgacttttggatgagctgggtccgacaggcccctggcaaaggacttgaatgggtcgccacaatcagccaggccggcagcgagaaggactacgtggactctgtgaagggcagattcaccatcagccgggacaacgccaagaagtccctgtacctccagatgaacagcctgagagccgaggacaccgccgtgtactattgtgcctctggcgtgtacagcttcgactacagaggccagggcaccctggtcacagtctcttctggtaccggcggaggcggatctggcggcggaggtagcggtggcggaggatctgaattcgacatccagatgacccagagccccgccaccatcgagaacacaagcctgtctgccagcgtgggcgacagagtgaccatcacctgtagagccagccagggcatcagctcttggctgacctggtatcagcagaagcccgagaaggcccccaagagcctgatctacgccgccagctctctgcagtctggcgtgcccagcagattttccggcagcggctctggcaccgacttcaccctgacaatcagcagcctgcagcccgaggacttcgccacctactactgccagcagtacgacagctaccccatcaccttcggccagggcacccggctggaaatcaagctcgagatccagaaccctgatcctgccgtgtaccagctgcgggatagcaagagcagcgacaagagcgtgtgtctgttcaccgacttcgacagccagaccaacgtgtcccagagcaaggactccgacgtgtacatcaccgataagtgcgtgctggacatgcggagcatggacttcaagagcaactccgccgtggcctggtccaacaagtccgatttcgcctgcgccaacgccttcaacaacagcattatccccgaggacacattcttcccaagccccgagagcagctgcgacgtgaagctggtggaaaagagcttcgagacagacaccaacctgaacttccagaacctgagcgtgatcggcttcagaatcctgctgctgaaagtggccggctttaacctgctgatgaccctgcggctgtggtccagccgcgccaagagaagcggatctggcgtgaagcagaccctgaatttcgacctgctgaagctggctggcgacgtggaatccaacccaggccctactagtatggactggatttggcgcatccttttccttgtcggcgctgctaccggcgcgcattccttcgaacaggtgcaactgcagcagtggggagccggactgctgaagcctagcgagacactgagcctgacctgcgccgtgtacggcggcagcttcagcgcctactattggagctggatcagacagccccctggcaagggcctggaatggatcggcgacatcaatcacggcggaggcaccaactacaaccccagcctgaagtcccgcgtgaccatctccgtggacaccagcaagaaccagttctccctgaagctgaacagcgtgacagccgccgacacagccgtgtactactgtgccagcctgaccgcctattggggccagggatctcttgtgaccgtgtccagcacgcgtgaggacctgaagaacgtgttcccacctgaggtggccgtgttcgagcctagcgaggccgagatcagccacacccagaaagccaccctcgtgtgcctggctaccggcttctaccccgaccatgtggaactgtcttggtgggtcaacggcaaagaggtgcacagcggcgtgtgtaccgacccccagccactgaaagaacagcccgccctgaacgacagccggtactgcctgagcagcagactgagagtgtccgccaccttctggcagaacccccggaaccacttcagatgccaggtgcagttctacggcctgagcgagaacgacgagtggacccaggacagagccaagcccgtgacccagatcgtgtctgccgaagcctggggcagagccgattgcggctttaccagcgagagctaccagcagggcgtgctgagcgccaccatcctgtacgagatcctgctgggcaaggccaccctgtacgccgtgctggtgtctgccctggtgctgatggctatggtcaagcggaaggacagccgggga

SEQ ID NO: 2033 - DNA, 2283 bp, Artificial Sequence
  Synthetic Polynucloetide
atggccttaccagtgaccgccttgctcctgccgctggccttgctgctccacgccgccaggccggaagtgcagctggttgaatctggcggaggactggttcagcctggcggatctctgagactgtcttgtgccgccagcggcttcagcttcagcgacttttggatgagctgggtccgacaggcccctggcaaaggacttgaatgggtcgccacaatcagccaggccggcagcgagaaggactacgtggactctgtgaagggcagattcaccatcagccgggacaacgccaagaagtccctgtacctccagatgaacagcctgagagccgaggacaccgccgtgtactattgtgcctctggcgtgtacagcttcgactacagaggccagggcaccctggtcacagtctcttctggtaccggcggaggcggatctggcggcggaggtagcggtggcggaggatctgaattcgacgagatcgtgctgacccagagccctgatagcctggccgtgtctctgggcgagagagccaccatcaactgcaaggccagccagagcgtggacttcgacggcgacagctacctgaactggtatcagcagaagcccggccagccccccaaggtgctgatctatgccgccagcacactgcagagcggcgtgcccagcagattttctggcagcggctccggcaccgacttcaccctgaccatcaacagcctggaagccgaggacgccgccacctactactgccagcagagcaacgaggacccctggacctttggcggcggaacaaaggtggaaatcaagctcgagatccagaaccctgatcctgccgtgtaccagctgcgggatagcaagagcagcgacaagagcgtgtgtctgttcaccgacttcgacagccagaccaacgtgtcccagagcaaggactccgacgtgtacatcaccgataagtgcgtgctggacatgcggagcatggacttcaagagcaactccgccgtggcctggtccaacaagtccgatttcgcctgcgccaacgccttcaacaacagcattatccccgaggacacattcttcccaagccccgagagcagctgcgacgtgaagctggtggaaaagagcttcgagacagacaccaacctgaacttccagaacctgagcgtgatcggcttcagaatcctgctgctgaaagtggccggctttaacctgctgatgaccctgcggctgtggtccagccgcgccaagagaagcggatctggcgtgaagcagaccctgaatttcgacctgctgaagctggctggcgacgtggaatccaacccaggccctactagtatggactggatttggcgcatccttttccttgtcggcgctgctaccggcgcgcattccttcgaacaggtgcaactggtgcagtccggcgctgaagtgaagaaacctggggccagcgtgaaggtgtcctgcaaggtgtccggctacacctttaccgactactacattacctgggtgcgccaggcccctggacaggccctggaatggatgggctggatctaccccggcagcggcaacaccaagtacagccagaagttccagggcagattcgtgttcagcgtggacaccagcgccagcaccgcctacctgcaactgtctagcctgaaggccgaagataccgccgtgtactactgcgccaactacggcaactattggttcgcctattggggccagggaacccttgtgaccgtgtcctctacgcgtgaggacctgaagaacgtgttcccacctgaggtggccgtgttcgagcctagcgaggccgagatcagccacacccagaaagccaccctcgtgtgcctggctaccggcttctaccccgaccatgtggaactgtcttggtgggtcaacggcaaagaggtgcacagcggcgtgtgtaccgacccccagccactgaaagaacagcccgccctgaacgacagccggtactgcctgagcagcagactgagagtgtccgccaccttctggcagaacccccggaaccacttcagatgccaggtgcagttctacggcctgagcgagaacgacgagtggacccaggacagagccaagcccgtgacccagatcgtgtctgccgaagcctggggcagagccgattgcggctttaccagcgagagctaccagcagggcgtgctgagcgccaccatcctgtacgagatcctgctgggcaaggccaccctgtacgccgtgctggtgtctgccctggtgctgatggctatggtcaagcggaaggacagccgggga

SEQ ID NO: 2034 - DNA, 2274 bp, Artificial Sequence
  Synthetic Polynucloetide
atggccttaccagtgaccgccttgctcctgccgctggccttgctgctccacgccgccaggccggaagtgcagctggttgaatctggcggaggactggttcagcctggcggatctctgagactgtcttgtgccgccagcggcttcagcttcagcgacttttggatgagctgggtccgacaggcccctggcaaaggacttgaatgggtcgccacaatcagccaggccggcagcgagaaggactacgtggactctgtgaagggcagattcaccatcagccgggacaacgccaagaagtccctgtacctccagatgaacagcctgagagccgaggacaccgccgtgtactattgtgcctctggcgtgtacagcttcgactacagaggccagggcaccctggtcacagtctcttctggtaccggcggaggcggatctggcggcggaggtagcggtggcggaggatctgaattcgacatccagatgacccagagccccagcagcctgtctgccagcgtgggcgacagagtgaccatcacctgtagagccagccagggcatcagctcttggctggcctggtatcagcagaagcccgagaaggcccccaagagcctgatctacgccgcctctagtctccagagcggcgtgcccagcagattttctggcagcggctccggcaccgacttcaccctgacaatcagctccctccagcccgaggacttcgccacctactactgccagcagtacaacagctaccctcccacctttggcggaggcaccaaggtggaaatcaagctcgagatccagaaccctgatcctgccgtgtaccagctgcgggatagcaagagcagcgacaagagcgtgtgtctgttcaccgacttcgacagccagaccaacgtgtcccagagcaaggactccgacgtgtacatcaccgataagtgcgtgctggacatgcggagcatggacttcaagagcaactccgccgtggcctggtccaacaagtccgatttcgcctgcgccaacgccttcaacaacagcattatccccgaggacacattcttcccaagccccgagagcagctgcgacgtgaagctggtggaaaagagcttcgagacagacaccaacctgaacttccagaacctgagcgtgatcggcttcagaatcctgctgctgaaagtggccggctttaacctgctgatgaccctgcggctgtggtccagccgcgccaagagaagcggatctggcgtgaagcagaccctgaatttcgacctgctgaagctggctggcgacgtggaatccaacccaggccctactagtatggactggatttggcgcatccttttccttgtcggcgctgctaccggcgcgcattccttcgaagaagtgcaactggtgcagtctggcggagggctggtgcatcctgggggaagcctgagactgagctgtgccggctctggcttcgccttcagcagcagcaccatgcactggatcagacaggcccctggcaagggcctggaatggatcagcctgatcggaagcggagggggcatctactacggcgacagcgtgaagggccggttcaccatcagccgggacaacgccaagaacagcctgtacctccagatgaactccctgcgggccgaggacatggccgtgtactattgtgtgcggggctacttcgactgggtggactacttcgattactggggccagggcaccctcgtgaccgtgtcatctacgcgtgaggacctgaagaacgtgttcccacctgaggtggccgtgttcgagcctagcgaggccgagatcagccacacccagaaagccaccctcgtgtgcctggctaccggcttctaccccgaccatgtggaactgtcttggtgggtcaacggcaaagaggtgcacagcggcgtgtgtaccgacccccagccactgaaagaacagcccgccctgaacgacagccggtactgcctgagcagcagactgagagtgtccgccaccttctggcagaacccccggaaccacttcagatgccaggtgcagttctacggcctgagcgagaacgacgagtggacccaggacagagccaagcccgtgacccagatcgtgtctgccgaagcctggggcagagccgattgcggctttaccagcgagagctaccagcagggcgtgctgagcgccaccatcctgtacgagatcctgctgggcaaggccaccctgtacgccgtgctggtgtctgccctggtgctgatggctatggtcaagcggaaggacagccgggga

SEQ ID NO: 2035 - DNA, 2304 bp, Artificial Sequence
  Synthetic Polynucloetide
atggccttaccagtgaccgccttgctcctgccgctggccttgctgctccacgccgccaggccggaagtgcagctggttgaatctggcggaggactggttcagcctggcggatctctgagactgtcttgtgccgccagcggcttcagcttcagcgacttttggatgagctgggtccgacaggcccctggcaaaggacttgaatgggtcgccacaatcagccaggccggcagcgagaaggactacgtggactctgtgaagggcagattcaccatcagccgggacaacgccaagaagtccctgtacctccagatgaacagcctgagagccgaggacaccgccgtgtactattgtgcctctggcgtgtacagcttcgactacagaggccagggcaccctggtcacagtctcttctggtaccggcggaggcggatctggcggcggaggtagcggtggcggaggatctgaattcgacgacatcgtgatgacacagtcaccagatagcctcaccgtctccctgggggagcggaccaccattaattgtaaatccagccaaagcgtgctggactcaagcaagaacaagaatagcctcgcctggtatcagcagaagcccggtcagcctccaaagctgctgctttcttgggcctccaccagagagtccgggattcctgataggtttagtggttcaggctccggcacagattttactctgaccattgattctctccagccagaggattctgcaacttattactgccagcaaagcgcccactttcctataacttttggccagggaacccgacttgaaatcaagctcgagatccagaaccctgatcctgccgtgtaccagctgcgggatagcaagagcagcgacaagagcgtgtgtctgttcaccgacttcgacagccagaccaacgtgtcccagagcaaggactccgacgtgtacatcaccgataagtgcgtgctggacatgcggagcatggacttcaagagcaactccgccgtggcctggtccaacaagtccgatttcgcctgcgccaacgccttcaacaacagcattatccccgaggacacattcttcccaagccccgagagcagctgcgacgtgaagctggtggaaaagagcttcgagacagacaccaacctgaacttccagaacctgagcgtgatcggcttcagaatcctgctgctgaaagtggccggctttaacctgctgatgaccctgcggctgtggtccagccgcgccaagagaagcggatctggcgtgaagcagaccctgaatttcgacctgctgaagctggctggcgacgtggaatccaacccaggccctactagtatggactggatttggcgcatccttttccttgtcggcgctgctaccggcgcgcattccttcgaacaggtgcagctggtgcagagcggtgccgaagtgaagaaaccaggtgcatccgttaaagtttcatgtaaggctagtggatataccttcaccaattacggaatgaactgggtgaaacaggcccctggccagggactgaagtggatggggtggattaacacctacaccggggagccgacttatgcagacgactttaaggggcgggtcacgatgacctccgacacctccaccagtaccgcctacctggagctgcacaaccttaggtcagacgataccgccgtgtattactgtgcccgatggtcttggtccgacggatactatgtctacttcgactattggggccaggggaccacagttaccgtgtcctctacgcgtgaggacctgaagaacgtgttcccacctgaggtggccgtgttcgagcctagcgaggccgagatcagccacacccagaaagccaccctcgtgtgcctggctaccggcttctaccccgaccatgtggaactgtcttggtgggtcaacggcaaagaggtgcacagcggcgtgtgtaccgacccccagccactgaaagaacagcccgccctgaacgacagccggtactgcctgagcagcagactgagagtgtccgccaccttctggcagaacccccggaaccacttcagatgccaggtgcagttctacggcctgagcgagaacgacgagtggacccaggacagagccaagcccgtgacccagatcgtgtctgccgaagcctggggcagagccgattgcggctttaccagcgagagctaccagcagggcgtgctgagcgccaccatcctgtacgagatcctgctgggcaaggccaccctgtacgccgtgctggtgtctgccctggtgctgatggctatggtcaagcggaaggacagccgggga

SEQ ID NO: 2036 - DNA, 2292 bp, Artificial Sequence
  Synthetic Polynucloetide
atggccttaccagtgaccgccttgctcctgccgctggccttgctgctccacgccgccaggccggaagtgcagctggttgaatctggcggaggactggttcagcctggcggatctctgagactgtcttgtgccgccagcggcttcagcttcagcgacttttggatgagctgggtccgacaggcccctggcaaaggacttgaatgggtcgccacaatcagccaggccggcagcgagaaggactacgtggactctgtgaagggcagattcaccatcagccgggacaacgccaagaagtccctgtacctccagatgaacagcctgagagccgaggacaccgccgtgtactattgtgcctctggcgtgtacagcttcgactacagaggccagggcaccctggtcacagtctcttctggtaccggcggaggcggatctggcggcggaggtagcggtggcggaggatctgaattcgacgagatcgtgctgacacagagccctggaagcctggccgtgtctcctggcgagcgcgtgacaatgagctgcaagagcagccagagcgtgttcttcagcagctcccagaagaactacctggcctggtatcagcagatccccggccagagccccagactgctgatctactgggccagcaccagagaaagcggcgtgcccgatagattcaccggcagcggctctggcaccgacttcaccctgacaatcagcagcgtgcagcccgaggacctggctatctactactgccaccagtacctgagcagccggaccttcggccagggcaccaagctggaaatcaagagactcgagatccagaaccctgatcctgccgtgtaccagctgcgggatagcaagagcagcgacaagagcgtgtgtctgttcaccgacttcgacagccagaccaacgtgtcccagagcaaggactccgacgtgtacatcaccgataagtgcgtgctggacatgcggagcatggacttcaagagcaactccgccgtggcctggtccaacaagtccgatttcgcctgcgccaacgccttcaacaacagcattatccccgaggacacattcttcccaagccccgagagcagctgcgacgtgaagctggtggaaaagagcttcgagacagacaccaacctgaacttccagaacctgagcgtgatcggcttcagaatcctgctgctgaaagtggccggctttaacctgctgatgaccctgcggctgtggtccagccgcgccaagagaagcggatctggcgtgaagcagaccctgaatttcgacctgctgaagctggctggcgacgtggaatccaacccaggccctactagtatggactggatttggcgcatccttttccttgtcggcgctgctaccggcgcgcattccttcgaacaggtgcaactgcagcagcctggcgctgaggtcgtgaagccaggcgcttccgtgaagatgtcctgcaaggccagcggctacaccttcaccagctactacatccactggatcaagcagacccctggacagggcctggaatgggtgggagtgatctaccccggcaacgacgacatcagctacaaccagaagttccagggcaaggccaccctgaccgccgacaagtctagcaccaccgcctacatgcaactgtccagcctgaccagcgaggacagcgccgtgtactactgcgccagagaagtgcggctgcggtacttcgatgtgtggggccagggaaccaccgtgaccgtgtcatctacgcgtgaggacctgaagaacgtgttcccacctgaggtggccgtgttcgagcctagcgaggccgagatcagccacacccagaaagccaccctcgtgtgcctggctaccggcttctaccccgaccatgtggaactgtcttggtgggtcaacggcaaagaggtgcacagcggcgtgtgtaccgacccccagccactgaaagaacagcccgccctgaacgacagccggtactgcctgagcagcagactgagagtgtccgccaccttctggcagaacccccggaaccacttcagatgccaggtgcagttctacggcctgagcgagaacgacgagtggacccaggacagagccaagcccgtgacccagatcgtgtctgccgaagcctggggcagagccgattgcggctttaccagcgagagctaccagcagggcgtgctgagcgccaccatcctgtacgagatcctgctgggcaaggccaccctgtacgccgtgctggtgtctgccctggtgctgatggctatggtcaagcggaaggacagccgggga

SEQ ID NO: 2037 - DNA, 2304 bp, Artificial Sequence
  Synthetic Polynucloetide
atggccttaccagtgaccgccttgctcctgccgctggccttgctgctccacgccgccaggccggaagtgcagctggttgaatctggcggaggactggttcagcctggcggatctctgagactgtcttgtgccgccagcggcttcagcttcagcgacttttggatgagctgggtccgacaggcccctggcaaaggacttgaatgggtcgccacaatcagccaggccggcagcgagaaggactacgtggactctgtgaagggcagattcaccatcagccgggacaacgccaagaagtccctgtacctccagatgaacagcctgagagccgaggacaccgccgtgtactattgtgcctctggcgtgtacagcttcgactacagaggccagggcaccctggtcacagtctcttctggtaccggcggaggcggatctggcggcggaggtagcggtggcggaggatctgaattcgatgtgctgctgacccagagccctctgagcctgcctgtgacactgggacagcctgccagcatctcctgtcggagcagccagaccatcgtgcacagcaacggcaacacctacctggaatggttccagcagcggccaggccagagccccagactgctgatctaccaggtgtccaacagattcagcggcgtgcccgacagattctccggcagcggctctggcaccgacttcaccctgaagatcagccgggtggaagccgaggacgtgggcgtgtactactgttttcaaggcagccacgtgccccggacctttggcggaggaacaaaggtggaaatcaagagagccctcgagatccagaaccctgatcctgccgtgtaccagctgcgggatagcaagagcagcgacaagagcgtgtgtctgttcaccgacttcgacagccagaccaacgtgtcccagagcaaggactccgacgtgtacatcaccgataagtgcgtgctggacatgcggagcatggacttcaagagcaactccgccgtggcctggtccaacaagtccgatttcgcctgcgccaacgccttcaacaacagcattatccccgaggacacattcttcccaagccccgagagcagctgcgacgtgaagctggtggaaaagagcttcgagacagacaccaacctgaacttccagaacctgagcgtgatcggcttcagaatcctgctgctgaaagtggccggctttaacctgctgatgaccctgcggctgtggtccagccgcgccaagagaagcggatctggcgtgaagcagaccctgaatttcgacctgctgaagctggctggcgacgtggaatccaacccaggccctactagtatggactggatttggcgcatccttttccttgtcggcgctgctaccggcgcgcattccttcgaacagatccaactggtgcagagcggcagcgagctgaagaaacctggggccagcgtgaaggtgtcctgcaaggccagcggctacacctttaccaactacggcatgaactgggtgcgccaggcccctggacagggcctgaaatggatgggctggatcaacaccaacaccggcgagcctaagtacgccgaagagttcaagggcagattcgccctgagcctggacaccagcgtgtccacagcctacctccagatcaacagcctgaaggccgaggataccgccgtgtacttctgcgccagaggctacggcaactacgccagaggggcttggctggcctattggggccagggaacactcgtgaccgtgtcctctacgcgtgaggacctgaagaacgtgttcccacctgaggtggccgtgttcgagcctagcgaggccgagatcagccacacccagaaagccaccctcgtgtgcctggctaccggcttctaccccgaccatgtggaactgtcttggtgggtcaacggcaaagaggtgcacagcggcgtgtgtaccgacccccagccactgaaagaacagcccgccctgaacgacagccggtactgcctgagcagcagactgagagtgtccgccaccttctggcagaacccccggaaccacttcagatgccaggtgcagttctacggcctgagcgagaacgacgagtggacccaggacagagccaagcccgtgacccagatcgtgtctgccgaagcctggggcagagccgattgcggctttaccagcgagagctaccagcagggcgtgctgagcgccaccatcctgtacgagatcctgctgggcaaggccaccctgtacgccgtgctggtgtctgccctggtgctgatggctatggtcaagcggaaggacagccgggga

SEQ ID NO: 2038 - DNA, 2259 bp, Artificial Sequence
  Synthetic Polynucloetide
atggccttaccagtgaccgccttgctcctgccgctggccttgctgctccacgccgccaggccggaagtgcagctggttgaatctggcggaggactggttcagcctggcggatctctgagactgtcttgtgccgccagcggcttcagcttcagcgacttttggatgagctgggtccgacaggcccctggcaaaggacttgaatgggtcgccacaatcagccaggccggcagcgagaaggactacgtggactctgtgaagggcagattcaccatcagccgggacaacgccaagaagtccctgtacctccagatgaacagcctgagagccgaggacaccgccgtgtactattgtgcctctggcgtgtacagcttcgactacagaggccagggcaccctggtcacagtctcttctggtaccggcggaggcggatctggcggcggaggtagcggtggcggaggatctgaattcgacgagatcgtgctgacacagagccctgccacactctctctgagccctggcgaaagagccaccctgagctgtagcgccagcagcagcatcaactacatctactggctccagcagaagcccggccaggcccccagaatcctgatctacctgaccagcaacctggcctccggcgtgccagccagattttctggcagcggctccggcaccgacttcaccctgacaatcagcagcctggaacccgaggacttcgccgtgtactactgcctccagtggtccagcaaccccctgacctttggcggaggcaccaaggtggaaatcaagctcgagatccagaaccctgatcctgccgtgtaccagctgcgggatagcaagagcagcgacaagagcgtgtgtctgttcaccgacttcgacagccagaccaacgtgtcccagagcaaggactccgacgtgtacatcaccgataagtgcgtgctggacatgcggagcatggacttcaagagcaactccgccgtggcctggtccaacaagtccgatttcgcctgcgccaacgccttcaacaacagcattatccccgaggacacattcttcccaagccccgagagcagctgcgacgtgaagctggtggaaaagagcttcgagacagacaccaacctgaacttccagaacctgagcgtgatcggcttcagaatcctgctgctgaaagtggccggctttaacctgctgatgaccctgcggctgtggtccagccgcgccaagagaagcggatctggcgtgaagcagaccctgaatttcgacctgctgaagctggctggcgacgtggaatccaacccaggccctactagtatggactggatttggcgcatccttttccttgtcggcgctgctaccggcgcgcattccttcgaagaagtgcaactggtggaaagcgggggaggacttgtgaagcctggcggctctctgagactgagctgtgccgcctctggcttcaccttcagcagctacgacatgagctgggtgcgccaggctcctggcaagggactggaatgggtgtccaccatcagcagcggcggcagctacacctactacctggacagcatcaagggccggttcaccatctccagagacaacgccaagaacagcctgtacctccagatgaactccctgcgggccgaggacacagccgtgtattattgcgccagacagggcctggattactggggcagaggcacccttgtgaccgtgtcctctacgcgtgaggacctgaagaacgtgttcccacctgaggtggccgtgttcgagcctagcgaggccgagatcagccacacccagaaagccaccctcgtgtgcctggctaccggcttctaccccgaccatgtggaactgtcttggtgggtcaacggcaaagaggtgcacagcggcgtgtgtaccgacccccagccactgaaagaacagcccgccctgaacgacagccggtactgcctgagcagcagactgagagtgtccgccaccttctggcagaacccccggaaccacttcagatgccaggtgcagttctacggcctgagcgagaacgacgagtggacccaggacagagccaagcccgtgacccagatcgtgtctgccgaagcctggggcagagccgattgcggctttaccagcgagagctaccagcagggcgtgctgagcgccaccatcctgtacgagatcctgctgggcaaggccaccctgtacgccgtgctggtgtctgccctggtgctgatggctatggtcaagcggaaggacagccgggga

SEQ ID NO: 2039 - DNA, 2286 bp, Artificial Sequence
  Synthetic Polynucloetide
atggccttaccagtgaccgccttgctcctgccgctggccttgctgctccacgccgccaggccggaagtgcagctggttgaatctggcggaggactggttcagcctggcggatctctgagactgtcttgtgccgccagcggcttcagcttcagcgacttttggatgagctgggtccgacaggcccctggcaaaggacttgaatgggtcgccacaatcagccaggccggcagcgagaaggactacgtggactctgtgaagggcagattcaccatcagccgggacaacgccaagaagtccctgtacctccagatgaacagcctgagagccgaggacaccgccgtgtactattgtgcctctggcgtgtacagcttcgactacagaggccagggcaccctggtcacagtctcttctggtaccggcggaggcggatctggcggcggaggtagcggtggcggaggatctgaattcgacatcgtgatgacccagagccccgatagcctggccgtgtctctgggagagagagccaccatcaactgccgggccagcaagagcgtgtccaccagcggctacagcttcatgcactggtatcagcagaagcccggccagccccccaagctgctgatctacctggcctccaacctggaaagcggcgtgcccgatagattcagcggcagcggctctggcaccgacttcaccctgaccatcagttctcttcaggccgaggacgtggccgtgtactactgccagcacagcagagaggtgccctggacattcggccagggcacaaaggtggaaatcaagcggctcgagatccagaaccctgatcctgccgtgtaccagctgcgggatagcaagagcagcgacaagagcgtgtgtctgttcaccgacttcgacagccagaccaacgtgtcccagagcaaggactccgacgtgtacatcaccgataagtgcgtgctggacatgcggagcatggacttcaagagcaactccgccgtggcctggtccaacaagtccgatttcgcctgcgccaacgccttcaacaacagcattatccccgaggacacattcttcccaagccccgagagcagctgcgacgtgaagctggtggaaaagagcttcgagacagacaccaacctgaacttccagaacctgagcgtgatcggcttcagaatcctgctgctgaaagtggccggctttaacctgctgatgaccctgcggctgtggtccagccgcgccaagagaagcggatctggcgtgaagcagaccctgaatttcgacctgctgaagctggctggcgacgtggaatccaacccaggccctactagtatggactggatttggcgcatccttttccttgtcggcgctgctaccggcgcgcattccttcgaacaggtgcagctggtgcagtctggggccgaagtgaagaaacctggggccagcgtgaaggtgtcctgcaaggccagcggatacacctttaccaactacggcatgaactgggtgcgccaggcccctggacagggcctggaatggatgggctggatcaacacctacaccggcgagcccacatacgccgacgccttcaagggcagattcgccttcagcctggacaccagcacctccaccgcctacctccagatcaacagcctgcggagcgacgacaccgccgtgtattattgcgccagagattacggcgactacgggatggactattggggccagggaaccaccgtgaccgtgtcctctacgcgtgaggacctgaagaacgtgttcccacctgaggtggccgtgttcgagcctagcgaggccgagatcagccacacccagaaagccaccctcgtgtgcctggctaccggcttctaccccgaccatgtggaactgtcttggtgggtcaacggcaaagaggtgcacagcggcgtgtgtaccgacccccagccactgaaagaacagcccgccctgaacgacagccggtactgcctgagcagcagactgagagtgtccgccaccttctggcagaacccccggaaccacttcagatgccaggtgcagttctacggcctgagcgagaacgacgagtggacccaggacagagccaagcccgtgacccagatcgtgtctgccgaagcctggggcagagccgattgcggctttaccagcgagagctaccagcagggcgtgctgagcgccaccatcctgtacgagatcctgctgggcaaggccaccctgtacgccgtgctggtgtctgccctggtgctgatggctatggtcaagcggaaggacagccgggga

SEQ ID NO: 2040 - DNA, 2274 bp, Artificial Sequence
  Synthetic Polynucloetide
atggccttaccagtgaccgccttgctcctgccgctggccttgctgctccacgccgccaggccggaagtgcagctggttgaatctggcggaggactggttcagcctggcggatctctgagactgtcttgtgccgccagcggcttcagcttcagcgacttttggatgagctgggtccgacaggcccctggcaaaggacttgaatgggtcgccacaatcagccaggccggcagcgagaaggactacgtggactctgtgaagggcagattcaccatcagccgggacaacgccaagaagtccctgtacctccagatgaacagcctgagagccgaggacaccgccgtgtactattgtgcctctggcgtgtacagcttcgactacagaggccagggcaccctggtcacagtctcttctggtaccggcggaggcggatctggcggcggaggtagcggtggcggaggatctgaattcgacatcgtgatgacccagacccccctgaccctgagcgtgacaatcggacagcctgccagcatctcctgcaagagcagccagagcctgctggacagcgacggcaagacctacctgaactggctgctgcagaggccaggccagagccccgagagactgatctacctggtgtccaagctggactccggcgtgcccgatagattcacaggcagcggctccggcaccgacttcaccctgaagatcagccgggtggaagccgaggacctgggcgtgtactgttgttggcagggcacccacttcccttacaccttcggcggagggaccaaggtggaaatcaagggcctcgagatccagaaccctgatcctgccgtgtaccagctgcgggatagcaagagcagcgacaagagcgtgtgtctgttcaccgacttcgacagccagaccaacgtgtcccagagcaaggactccgacgtgtacatcaccgataagtgcgtgctggacatgcggagcatggacttcaagagcaactccgccgtggcctggtccaacaagtccgatttcgcctgcgccaacgccttcaacaacagcattatccccgaggacacattcttcccaagccccgagagcagctgcgacgtgaagctggtggaaaagagcttcgagacagacaccaacctgaacttccagaacctgagcgtgatcggcttcagaatcctgctgctgaaagtggccggctttaacctgctgatgaccctgcggctgtggtccagccgcgccaagagaagcggatctggcgtgaagcagaccctgaatttcgacctgctgaagctggctggcgacgtggaatccaacccaggccctactagtatggactggatttggcgcatccttttccttgtcggcgctgctaccggcgcgcattccttcgaacaggtgcaactgcagcagcctggcgctgaacttgtgcggccaggcgcctctgtgaagctgagctgtaaagccagcggctacaccttcaccagctactggatgaactgggtcaagcagcgcccaggccagggcctggaatggatcggaatgatcgaccccagcgacagcgagacacactacaaccacatcttcaaggacaaggccaccctgaccgtggacaagtccagcagcacagcctacctgcaactgtccagcctgaccagcgaggacagcgccgtgtactactgcgcccggaacctgtatctgtggggccagggaacaagcgtgaccgtgtctagcacgcgtgaggacctgaagaacgtgttcccacctgaggtggccgtgttcgagcctagcgaggccgagatcagccacacccagaaagccaccctcgtgtgcctggctaccggcttctaccccgaccatgtggaactgtcttggtgggtcaacggcaaagaggtgcacagcggcgtgtgtaccgacccccagccactgaaagaacagcccgccctgaacgacagccggtactgcctgagcagcagactgagagtgtccgccaccttctggcagaacccccggaaccacttcagatgccaggtgcagttctacggcctgagcgagaacgacgagtggacccaggacagagccaagcccgtgacccagatcgtgtctgccgaagcctggggcagagccgattgcggctttaccagcgagagctaccagcagggcgtgctgagcgccaccatcctgtacgagatcctgctgggcaaggccaccctgtacgccgtgctggtgtctgccctggtgctgatggctatggtcaagcggaaggacagccgggga

SEQ ID NO: 2041 - DNA, 2298 bp, Artificial Sequence
  Synthetic Polynucloetide
atggccttaccagtgaccgccttgctcctgccgctggccttgctgctccacgccgccaggccggaagtgcagctggttgaatctggcggaggactggttcagcctggcggatctctgagactgtcttgtgccgccagcggcttcagcttcagcgacttttggatgagctgggtccgacaggcccctggcaaaggacttgaatgggtcgccacaatcagccaggccggcagcgagaaggactacgtggactctgtgaagggcagattcaccatcagccgggacaacgccaagaagtccctgtacctccagatgaacagcctgagagccgaggacaccgccgtgtactattgtgcctctggcgtgtacagcttcgactacagaggccagggcaccctggtcacagtctcttctggtaccggcggaggcggatctggcggcggaggtagcggtggcggaggatctgaattcgacatcgtgatgacccagagccccgatagcctggccgtgtctctgggagagagagccaccatcaactgcgagagcagccagagcctgctgaacagcggcaaccagaagaactacctgacctggtatcagcagaagcccggccagccccccaagcccctgatctattgggccagcaccagagaaagcggcgtgcccgatagattcagcggcagcggaagcggcaccgacttcaccctgaccatcagttctcttcaggccgaggacgtggccgtgtactactgccagaacgactacagctacccctacaccttcggccagggcaccaagctggaaatcaagagactcgagatccagaaccctgatcctgccgtgtaccagctgcgggatagcaagagcagcgacaagagcgtgtgtctgttcaccgacttcgacagccagaccaacgtgtcccagagcaaggactccgacgtgtacatcaccgataagtgcgtgctggacatgcggagcatggacttcaagagcaactccgccgtggcctggtccaacaagtccgatttcgcctgcgccaacgccttcaacaacagcattatccccgaggacacattcttcccaagccccgagagcagctgcgacgtgaagctggtggaaaagagcttcgagacagacaccaacctgaacttccagaacctgagcgtgatcggcttcagaatcctgctgctgaaagtggccggctttaacctgctgatgaccctgcggctgtggtccagccgcgccaagagaagcggatctggcgtgaagcagaccctgaatttcgacctgctgaagctggctggcgacgtggaatccaacccaggccctactagtatggactggatttggcgcatccttttccttgtcggcgctgctaccggcgcgcattccttcgaagaagtgcagctggtgcagtctggggccgaagtgaagaagcctggcgagagcctgaagatcagctgcaagggcagcggctacagcttcaccgactactacatgaagtgggccagacagatgcccggcaagggcctggaatggatgggcgacatcatccccagcaacggggccaccttctacaaccagaaattcaagggccaagtgaccatctccgccgacaagagcatcagcaccacctacctccagtggtccagcctgaaggccagcgacaccgccatgtactattgcgccagaagccatctgctgcgggccagttggttcgcctattggggccagggaacaatggtcacagtgtccagcacgcgtgaggacctgaagaacgtgttcccacctgaggtggccgtgttcgagcctagcgaggccgagatcagccacacccagaaagccaccctcgtgtgcctggctaccggcttctaccccgaccatgtggaactgtcttggtgggtcaacggcaaagaggtgcacagcggcgtgtgtaccgacccccagccactgaaagaacagcccgccctgaacgacagccggtactgcctgagcagcagactgagagtgtccgccaccttctggcagaacccccggaaccacttcagatgccaggtgcagttctacggcctgagcgagaacgacgagtggacccaggacagagccaagcccgtgacccagatcgtgtctgccgaagcctggggcagagccgattgcggctttaccagcgagagctaccagcagggcgtgctgagcgccaccatcctgtacgagatcctgctgggcaaggccaccctgtacgccgtgctggtgtctgccctggtgctgatggctatggtcaagcggaaggacagccgggga

SEQ ID NO: 2042 - DNA, 2283 bp, Artificial Sequence
  Synthetic Polynucloetide
atggccttaccagtgaccgccttgctcctgccgctggccttgctgctccacgccgccaggccggaagtgcagctggttgaatctggcggaggactggttcagcctggcggatctctgagactgtcttgtgccgccagcggcttcagcttcagcgacttttggatgagctgggtccgacaggcccctggcaaaggacttgaatgggtcgccacaatcagccaggccggcagcgagaaggactacgtggactctgtgaagggcagattcaccatcagccgggacaacgccaagaagtccctgtacctccagatgaacagcctgagagccgaggacaccgccgtgtactattgtgcctctggcgtgtacagcttcgactacagaggccagggcaccctggtcacagtctcttctggtaccggcggaggcggatctggcggcggaggtagcggtggcggaggatctgaattcgacatccagatgacccagtctaccagttccctgagtgcatccctcggagacagggtgacgatcagttgcagcgcaagccaagggatcaataactatctgaactggtatcagcagaaaccggacggaacagtcgaactcctgatttattacaccagcacccttcagagtggcgtcccttcccggttcagtggctccggaagcgggaccgattactccctgaccatttctaatctggagccagaggacataggaacgtattattgccagcagtatagtaaactgccacgaacttttggaggggggacgaaactggagatcaaactcgagatccagaaccctgatcctgccgtgtaccagctgcgggatagcaagagcagcgacaagagcgtgtgtctgttcaccgacttcgacagccagaccaacgtgtcccagagcaaggactccgacgtgtacatcaccgataagtgcgtgctggacatgcggagcatggacttcaagagcaactccgccgtggcctggtccaacaagtccgatttcgcctgcgccaacgccttcaacaacagcattatccccgaggacacattcttcccaagccccgagagcagctgcgacgtgaagctggtggaaaagagcttcgagacagacaccaacctgaacttccagaacctgagcgtgatcggcttcagaatcctgctgctgaaagtggccggctttaacctgctgatgaccctgcggctgtggtccagccgcgccaagagaagcggatctggcgtgaagcagaccctgaatttcgacctgctgaagctggctggcgacgtggaatccaacccaggccctactagtatggactggatttggcgcatccttttccttgtcggcgctgctaccggcgcgcattccttcgaacaggtgcaactccagcagtccggaagcgagcttatgatgccaggggcatcagtgaagatcagctgcaaggctactggctacaccttctctaattactggatagagtgggttaaacaaaggccagggcacggcctggaatggatcggcgagatcctgcctgggacaggccgaaccatttataacgagaagttcaaaggcaaggctactttcaccgcagatataagctctaatacagtgcaaatgcagctctcttccctgacaagtgaggatagtgccgtgtattattgcgcacgaagagattactatggaaatttttattacgctatggattattggggtcaaggaacaagtgtgaccgttagcagcacgcgtgaggacctgaagaacgtgttcccacctgaggtggccgtgttcgagcctagcgaggccgagatcagccacacccagaaagccaccctcgtgtgcctggctaccggcttctaccccgaccatgtggaactgtcttggtgggtcaacggcaaagaggtgcacagcggcgtgtgtaccgacccccagccactgaaagaacagcccgccctgaacgacagccggtactgcctgagcagcagactgagagtgtccgccaccttctggcagaacccccggaaccacttcagatgccaggtgcagttctacggcctgagcgagaacgacgagtggacccaggacagagccaagcccgtgacccagatcgtgtctgccgaagcctggggcagagccgattgcggctttaccagcgagagctaccagcagggcgtgctgagcgccaccatcctgtacgagatcctgctgggcaaggccaccctgtacgccgtgctggtgtctgccctggtgctgatggctatggtcaagcggaaggacagccgggga

SEQ ID NO: 2043 - DNA, 2268 bp, Artificial Sequence
  Synthetic Polynucloetide
atggccttaccagtgaccgccttgctcctgccgctggccttgctgctccacgccgccaggccggaagtgcagctggttgaatctggcggaggactggttcagcctggcggatctctgagactgtcttgtgccgccagcggcttcagcttcagcgacttttggatgagctgggtccgacaggcccctggcaaaggacttgaatgggtcgccacaatcagccaggccggcagcgagaaggactacgtggactctgtgaagggcagattcaccatcagccgggacaacgccaagaagtccctgtacctccagatgaacagcctgagagccgaggacaccgccgtgtactattgtgcctctggcgtgtacagcttcgactacagaggccagggcaccctggtcacagtctcttctggtaccggcggaggcggatctggcggcggaggtagcggtggcggaggatctgaattcgacatccagatgacccagagccctgccagcctgtccgtgtctgtgggcgagacagtgaccatcacctgtcgggccagcgagaacatctacagcaacctggcctggtatcagcagaagcagggcaagagcccccaactgctggtgtacgccgccaccaatctggccgatggcgtgcccagcagattttccggctctggcagcggcacccagtacagcctgaagatcaacagcctccagagcgaggacttcggcagctactactgccagcacttctggggcacctggacctttggaggaggcaccaccctggaaatcaagctcgagatccagaaccctgatcctgccgtgtaccagctgcgggatagcaagagcagcgacaagagcgtgtgtctgttcaccgacttcgacagccagaccaacgtgtcccagagcaaggactccgacgtgtacatcaccgataagtgcgtgctggacatgcggagcatggacttcaagagcaactccgccgtggcctggtccaacaagtccgatttcgcctgcgccaacgccttcaacaacagcattatccccgaggacacattcttcccaagccccgagagcagctgcgacgtgaagctggtggaaaagagcttcgagacagacaccaacctgaacttccagaacctgagcgtgatcggcttcagaatcctgctgctgaaagtggccggctttaacctgctgatgaccctgcggctgtggtccagccgcgccaagagaagcggatctggcgtgaagcagaccctgaatttcgacctgctgaagctggctggcgacgtggaatccaacccaggccctactagtatggactggatttggcgcatccttttccttgtcggcgctgctaccggcgcgcattccttcgaagaagtgcaactccagcagagcggccctgagcttgtgaagcctggcgcttccgtgaagatgagctgcaaggccagcggctacaccttcaccgactactacatgaagtggatgaagcagagccacggcaagtccctggaatggatcggcgacatcaaccccaacaacggcggcaccacctacaaccagaagttcaagggcaaggccaccctgaccgtggacaagagcagcagcaccgcctacatgcaactgaacagcctgaccagcgaggacagcgccgtgtactactgcgccagagactacggctacggctatttcgactactggggccagggcacaaccctgacagtgtcctctacgcgtgaggacctgaagaacgtgttcccacctgaggtggccgtgttcgagcctagcgaggccgagatcagccacacccagaaagccaccctcgtgtgcctggctaccggcttctaccccgaccatgtggaactgtcttggtgggtcaacggcaaagaggtgcacagcggcgtgtgtaccgacccccagccactgaaagaacagcccgccctgaacgacagccggtactgcctgagcagcagactgagagtgtccgccaccttctggcagaacccccggaaccacttcagatgccaggtgcagttctacggcctgagcgagaacgacgagtggacccaggacagagccaagcccgtgacccagatcgtgtctgccgaagcctggggcagagccgattgcggctttaccagcgagagctaccagcagggcgtgctgagcgccaccatcctgtacgagatcctgctgggcaaggccaccctgtacgccgtgctggtgtctgccctggtgctgatggctatggtcaagcggaaggacagccgggga

SEQ ID NO: 2044 - DNA, 2277 bp, Artificial Sequence
  Synthetic Polynucloetide
atggccttaccagtgaccgccttgctcctgccgctggccttgctgctccacgccgccaggccggaagtgcagctggttgaatctggcggaggactggttcagcctggcggatctctgagactgtcttgtgccgccagcggcttcagcttcagcgacttttggatgagctgggtccgacaggcccctggcaaaggacttgaatgggtcgccacaatcagccaggccggcagcgagaaggactacgtggactctgtgaagggcagattcaccatcagccgggacaacgccaagaagtccctgtacctccagatgaacagcctgagagccgaggacaccgccgtgtactattgtgcctctggcgtgtacagcttcgactacagaggccagggcaccctggtcacagtctcttctggtaccggcggaggcggatctggcggcggaggtagcggtggcggaggatctgaattcgagatcgtgctgacacagagccctggcaccctgagcctgtctccaggcgaaagagccacactgagctgtcgggcctctcagagcgtgggaggctacctggcttggtatcagcagaagccaggccaggcccccagactgctgatctacgacgccagcaatcgggccacaggcatccccgccagattttctggcagcggctccggcaccgacttcaccctgacaatcagcagcctggaacccgaggacttcgccgtgtactactgccagcagcggaacaactggccccccatgtacacattcggccagggcaccaagctggaaatcaagagactcgagatccagaaccctgatcctgccgtgtaccagctgcgggatagcaagagcagcgacaagagcgtgtgtctgttcaccgacttcgacagccagaccaacgtgtcccagagcaaggactccgacgtgtacatcaccgataagtgcgtgctggacatgcggagcatggacttcaagagcaactccgccgtggcctggtccaacaagtccgatttcgcctgcgccaacgccttcaacaacagcattatccccgaggacacattcttcccaagccccgagagcagctgcgacgtgaagctggtggaaaagagcttcgagacagacaccaacctgaacttccagaacctgagcgtgatcggcttcagaatcctgctgctgaaagtggccggctttaacctgctgatgaccctgcggctgtggtccagccgcgccaagagaagcggatctggcgtgaagcagaccctgaatttcgacctgctgaagctggctggcgacgtggaatccaacccaggccctactagtatggactggatttggcgcatccttttccttgtcggcgctgctaccggcgcgcattccttcgaacaggtgcaactggtgcagagcggagccgaagtgaagaaacccggcagcagcgtgaaggtgtcctgcaaggcttccggcggcaccttcagcagctacgccatttcttgggtgcgccaggctcctggacagggcctggaatggatgggcggcatcatccctatcctgggcaccgccaactacgcccagaaattccagggcagagtgaccatcaccgccgacgagagcaccagcaccgcctacatggaactgagcagcctgcggagcgaggacacagccgtgtattattgcgccagatggggcggaggggccttcgacatttggggccagggaacaatggtcaccgtgtccagcacgcgtgaggacctgaagaacgtgttcccacctgaggtggccgtgttcgagcctagcgaggccgagatcagccacacccagaaagccaccctcgtgtgcctggctaccggcttctaccccgaccatgtggaactgtcttggtgggtcaacggcaaagaggtgcacagcggcgtgtgtaccgacccccagccactgaaagaacagcccgccctgaacgacagccggtactgcctgagcagcagactgagagtgtccgccaccttctggcagaacccccggaaccacttcagatgccaggtgcagttctacggcctgagcgagaacgacgagtggacccaggacagagccaagcccgtgacccagatcgtgtctgccgaagcctggggcagagccgattgcggctttaccagcgagagctaccagcagggcgtgctgagcgccaccatcctgtacgagatcctgctgggcaaggccaccctgtacgccgtgctggtgtctgccctggtgctgatggctatggtcaagcggaaggacagccgggga

SEQ ID NO: 2045 - DNA, 2262 bp, Artificial Sequence
  Synthetic Polynucloetide
atggccttaccagtgaccgccttgctcctgccgctggccttgctgctccacgccgccaggccggaagtgcagctggttgaatctggcggaggactggttcagcctggcggatctctgagactgtcttgtgccgccagcggcttcagcttcagcgacttttggatgagctgggtccgacaggcccctggcaaaggacttgaatgggtcgccacaatcagccaggccggcagcgagaaggactacgtggactctgtgaagggcagattcaccatcagccgggacaacgccaagaagtccctgtacctccagatgaacagcctgagagccgaggacaccgccgtgtactattgtgcctctggcgtgtacagcttcgactacagaggccagggcaccctggtcacagtctcttctggtaccggcggaggcggatctggcggcggaggtagcggtggcggaggatctgaattccagatcgtgctgacacagagccctgccctgatgagcgccagccctggcgagaaagtgaccatgacctgtagcgccagcagcagcgtgcgctacatgtactggtatcagcagaagcccagaagcagccccaagccctggattcacctgaccagcaatctggcctctggcgtgcccgctagattttccggctctggcagcggcaccagctacagcctgaccatcagcagcatggaagccgaggacgccgccacctactactgccagcagtggtccagccaccccttcacatttggctccggcaccaagctggaaatcaagctcgagatccagaaccctgatcctgccgtgtaccagctgcgggatagcaagagcagcgacaagagcgtgtgtctgttcaccgacttcgacagccagaccaacgtgtcccagagcaaggactccgacgtgtacatcaccgataagtgcgtgctggacatgcggagcatggacttcaagagcaactccgccgtggcctggtccaacaagtccgatttcgcctgcgccaacgccttcaacaacagcattatccccgaggacacattcttcccaagccccgagagcagctgcgacgtgaagctggtggaaaagagcttcgagacagacaccaacctgaacttccagaacctgagcgtgatcggcttcagaatcctgctgctgaaagtggccggctttaacctgctgatgaccctgcggctgtggtccagccgcgccaagagaagcggatctggcgtgaagcagaccctgaatttcgacctgctgaagctggctggcgacgtggaatccaacccaggccctactagtatggactggatttggcgcatccttttccttgtcggcgctgctaccggcgcgcattccttcgaagatgtgcaactccaggaaagcggccctggccttgtgaagcctagccagagcctgtccctgacctgtaccgtgaccggcttcagcatcaccagcgactactcttggaactggatcagacagttccctggcaacaaactggaatggatgggctacatcagctactccggccacacctcctacaaccccagcctggaaagccggatctccatcaccagagacaccagcaagaaccagttcttcttgcaactgaacagcgtgaccaccgaggataccgccacatattactgtaccagaggcaactgggacgtggtgtactggggccagggcacacttgtgaccgtgtctgctacgcgtgaggacctgaagaacgtgttcccacctgaggtggccgtgttcgagcctagcgaggccgagatcagccacacccagaaagccaccctcgtgtgcctggctaccggcttctaccccgaccatgtggaactgtcttggtgggtcaacggcaaagaggtgcacagcggcgtgtgtaccgacccccagccactgaaagaacagcccgccctgaacgacagccggtactgcctgagcagcagactgagagtgtccgccaccttctggcagaacccccggaaccacttcagatgccaggtgcagttctacggcctgagcgagaacgacgagtggacccaggacagagccaagcccgtgacccagatcgtgtctgccgaagcctggggcagagccgattgcggctttaccagcgagagctaccagcagggcgtgctgagcgccaccatcctgtacgagatcctgctgggcaaggccaccctgtacgccgtgctggtgtctgccctggtgctgatggctatggtcaagcggaaggacagccgggga

SEQ ID NO: 2046 - DNA, 2292 bp, Artificial Sequence
  Synthetic Polynucloetide
atggccttaccagtgaccgccttgctcctgccgctggccttgctgctccacgccgccaggccggaagtgcagctggttgaatctggcggaggactggttcagcctggcggatctctgagactgtcttgtgccgccagcggcttcagcttcagcgacttttggatgagctgggtccgacaggcccctggcaaaggacttgaatgggtcgccacaatcagccaggccggcagcgagaaggactacgtggactctgtgaagggcagattcaccatcagccgggacaacgccaagaagtccctgtacctccagatgaacagcctgagagccgaggacaccgccgtgtactattgtgcctctggcgtgtacagcttcgactacagaggccagggcaccctggtcacagtctcttctggtaccggcggaggcggatctggcggcggaggtagcggtggcggaggatctgaattcgacgtcgtgatgacccagagccctctgagcctgcctgtgacactgggacagcctgccagcatctcctgtcggagcagccagagcatcgtgcacagcgacggcaacacctacctggaatggtatcagcagcggccaggccagagccccagacggctgatctacaaggtgtccaacagattcagcggcgtgcccgacagattctccggcagcggctctggcaccgacttcaccctgaagatcagcagagtggaagccgaggacgtgggcgtgtactactgttttcaaggcagccacgccccctggacctttggcggaggaacaaaggtggaaatcaagctcgagatccagaaccctgatcctgccgtgtaccagctgcgggatagcaagagcagcgacaagagcgtgtgtctgttcaccgacttcgacagccagaccaacgtgtcccagagcaaggactccgacgtgtacatcaccgataagtgcgtgctggacatgcggagcatggacttcaagagcaactccgccgtggcctggtccaacaagtccgatttcgcctgcgccaacgccttcaacaacagcattatccccgaggacacattcttcccaagccccgagagcagctgcgacgtgaagctggtggaaaagagcttcgagacagacaccaacctgaacttccagaacctgagcgtgatcggcttcagaatcctgctgctgaaagtggccggctttaacctgctgatgaccctgcggctgtggtccagccgcgccaagagaagcggatctggcgtgaagcagaccctgaatttcgacctgctgaagctggctggcgacgtggaatccaacccaggccctactagtatggactggatttggcgcatccttttccttgtcggcgctgctaccggcgcgcattccttcgaagaagtgcaactggtggaatcaggcggcggactggtgcagcctggcggatctctgagactgagctgtgccgccagcggcttcaccttcagcagctacggaatgcactgggtgcgccaggcccctggcaaaggactggaatgggtggcctacatcaccaccagaagcagcaccatctactacgccgacagcgtgaagggccggttcaccatctccagagacaacgccaagaacagcctgtacctccagatgaactccctgcgggccgaggacaccgccgtgtactattgcaccagagagcccctgaccggctactacgctatggactattggggccagggcaccagcgtgaccgtgtctagtacgcgtgaggacctgaagaacgtgttcccacctgaggtggccgtgttcgagcctagcgaggccgagatcagccacacccagaaagccaccctcgtgtgcctggctaccggcttctaccccgaccatgtggaactgtcttggtgggtcaacggcaaagaggtgcacagcggcgtgtgtaccgacccccagccactgaaagaacagcccgccctgaacgacagccggtactgcctgagcagcagactgagagtgtccgccaccttctggcagaacccccggaaccacttcagatgccaggtgcagttctacggcctgagcgagaacgacgagtggacccaggacagagccaagcccgtgacccagatcgtgtctgccgaagcctggggcagagccgattgcggctttaccagcgagagctaccagcagggcgtgctgagcgccaccatcctgtacgagatcctgctgggcaaggccaccctgtacgccgtgctggtgtctgccctggtgctgatggctatggtcaagcggaaggacagccgggga

SEQ ID NO: 2047 - DNA, 2268 bp, Artificial Sequence
  Synthetic Polynucloetide
atggccttaccagtgaccgccttgctcctgccgctggccttgctgctccacgccgccaggccggaagtgcagctggttgaatctggcggaggactggttcagcctggcggatctctgagactgtcttgtgccgccagcggcttcagcttcagcgacttttggatgagctgggtccgacaggcccctggcaaaggacttgaatgggtcgccacaatcagccaggccggcagcgagaaggactacgtggactctgtgaagggcagattcaccatcagccgggacaacgccaagaagtccctgtacctccagatgaacagcctgagagccgaggacaccgccgtgtactattgtgcctctggcgtgtacagcttcgactacagaggccagggcaccctggtcacagtctcttctggtaccggcggaggcggatctggcggcggaggtagcggtggcggaggatctgaattcgacatccagatgacccagagccccagcagcctgtctgccagcgtgggcgacagagtgaccatcacctgtagagccagccagagcatcagcctgtggctgaactggtatcagcagaagcccggcaaggcccccaagctgctgatctacgccgccagcacactccagagcggcgtgccaagcagattttccggcagcggctccggcaccgacttcaccctgacaatcagctccctccagcccgaggacttcgccacctactactgccagcagtactacaccagcccctacaccttcggccagggcaccaaggtggaaatcaagagactcgagatccagaaccctgatcctgccgtgtaccagctgcgggatagcaagagcagcgacaagagcgtgtgtctgttcaccgacttcgacagccagaccaacgtgtcccagagcaaggactccgacgtgtacatcaccgataagtgcgtgctggacatgcggagcatggacttcaagagcaactccgccgtggcctggtccaacaagtccgatttcgcctgcgccaacgccttcaacaacagcattatccccgaggacacattcttcccaagccccgagagcagctgcgacgtgaagctggtggaaaagagcttcgagacagacaccaacctgaacttccagaacctgagcgtgatcggcttcagaatcctgctgctgaaagtggccggctttaacctgctgatgaccctgcggctgtggtccagccgcgccaagagaagcggatctggcgtgaagcagaccctgaatttcgacctgctgaagctggctggcgacgtggaatccaacccaggccctactagtatggactggatttggcgcatccttttccttgtcggcgctgctaccggcgcgcattccttcgaacaggtgcaactgctggaatctggcggcggactggtgcagcctggcggatctctgagactgagctgtgccgccagcggcttcaccttcagcagctacgccatgagctgggtgcgccaggcccctggaaaaggactggaatgggtgtccgtgatccggtccagcggcagcagcacctattacgccgatagcgtgaagggccggttcaccatcagccgggacaacagcaagaacaccctgtacctccagatgaacagcctgcgggccgaggacaccgccgtgtactattgtgctaggggaggcggctacttcgactactggggccagggaacactcgtgaccgtgtcctctacgcgtgaggacctgaagaacgtgttcccacctgaggtggccgtgttcgagcctagcgaggccgagatcagccacacccagaaagccaccctcgtgtgcctggctaccggcttctaccccgaccatgtggaactgtcttggtgggtcaacggcaaagaggtgcacagcggcgtgtgtaccgacccccagccactgaaagaacagcccgccctgaacgacagccggtactgcctgagcagcagactgagagtgtccgccaccttctggcagaacccccggaaccacttcagatgccaggtgcagttctacggcctgagcgagaacgacgagtggacccaggacagagccaagcccgtgacccagatcgtgtctgccgaagcctggggcagagccgattgcggctttaccagcgagagctaccagcagggcgtgctgagcgccaccatcctgtacgagatcctgctgggcaaggccaccctgtacgccgtgctggtgtctgccctggtgctgatggctatggtcaagcggaaggacagccgggga

SEQ ID NO: 2048 - DNA, 2277 bp, Artificial Sequence
  Synthetic Polynucloetide
atggccttaccagtgaccgccttgctcctgccgctggccttgctgctccacgccgccaggccggaagtgcagctggttgaatctggcggaggactggttcagcctggcggatctctgagactgtcttgtgccgccagcggcttcagcttcagcgacttttggatgagctgggtccgacaggcccctggcaaaggacttgaatgggtcgccacaatcagccaggccggcagcgagaaggactacgtggactctgtgaagggcagattcaccatcagccgggacaacgccaagaagtccctgtacctccagatgaacagcctgagagccgaggacaccgccgtgtactattgtgcctctggcgtgtacagcttcgactacagaggccagggcaccctggtcacagtctcttctggtaccggcggaggcggatctggcggcggaggtagcggtggcggaggatctgaattcgacatccagatgacccagagccccagcagcctgtctgccagcgtgggcgacagagtgaccatcacctgtagagccagccagagcatcagcagctacctgaactggtatcagcagaagcccggcaaggcccccaaactgctgatctacgccgtgtccacactccagagcggcgtgcccagcagattttctggcagcggctccggcaccgacttcaccctgacaatcagctccctccagcccgaggacttcgccacctactactgtcagcagagcggcaccttccctcccaccacatttggacagggcaccaaggtggaaatcaagagactcgagatccagaaccctgatcctgccgtgtaccagctgcgggatagcaagagcagcgacaagagcgtgtgtctgttcaccgacttcgacagccagaccaacgtgtcccagagcaaggactccgacgtgtacatcaccgataagtgcgtgctggacatgcggagcatggacttcaagagcaactccgccgtggcctggtccaacaagtccgatttcgcctgcgccaacgccttcaacaacagcattatccccgaggacacattcttcccaagccccgagagcagctgcgacgtgaagctggtggaaaagagcttcgagacagacaccaacctgaacttccagaacctgagcgtgatcggcttcagaatcctgctgctgaaagtggccggctttaacctgctgatgaccctgcggctgtggtccagccgcgccaagagaagcggatctggcgtgaagcagaccctgaatttcgacctgctgaagctggctggcgacgtggaatccaacccaggccctactagtatggactggatttggcgcatccttttccttgtcggcgctgctaccggcgcgcattccttcgaacaggtgcaactgctggaatctggcggcggactggtgcagcctggcggatctctgagactgagctgtgccgccagcggcttcaccttcagcagccacggaatgcactgggtgcgccaggcccctggaaagggactggaatgggtgtccgtgatctccggcagcggcagcaataccggctacgccgatagcgtgaagggccggttcaccatcagccgggacaacagcaagaacaccctgtacctccagatgaacagcctgcgggccgaggacaccgccgtgtactattgtgccagacagtggggcagctacgccttcgattcttggggccagggcaccctcgtgaccgtgtcatctacgcgtgaggacctgaagaacgtgttcccacctgaggtggccgtgttcgagcctagcgaggccgagatcagccacacccagaaagccaccctcgtgtgcctggctaccggcttctaccccgaccatgtggaactgtcttggtgggtcaacggcaaagaggtgcacagcggcgtgtgtaccgacccccagccactgaaagaacagcccgccctgaacgacagccggtactgcctgagcagcagactgagagtgtccgccaccttctggcagaacccccggaaccacttcagatgccaggtgcagttctacggcctgagcgagaacgacgagtggacccaggacagagccaagcccgtgacccagatcgtgtctgccgaagcctggggcagagccgattgcggctttaccagcgagagctaccagcagggcgtgctgagcgccaccatcctgtacgagatcctgctgggcaaggccaccctgtacgccgtgctggtgtctgccctggtgctgatggctatggtcaagcggaaggacagccgggga

SEQ ID NO: 2049 - DNA, 2307 bp, Artificial Sequence
  Synthetic Polynucloetide
atggccttaccagtgaccgccttgctcctgccgctggccttgctgctccacgccgccaggccggaagtgcagctggttgaatctggcggaggactggttcagcctggcggatctctgagactgtcttgtgccgccagcggcttcagcttcagcgacttttggatgagctgggtccgacaggcccctggcaaaggacttgaatgggtcgccacaatcagccaggccggcagcgagaaggactacgtggactctgtgaagggcagattcaccatcagccgggacaacgccaagaagtccctgtacctccagatgaacagcctgagagccgaggacaccgccgtgtactattgtgcctctggcgtgtacagcttcgactacagaggccagggcaccctggtcacagtctcttctggtaccggcggaggcggatctggcggcggaggtagcggtggcggaggatctgaattcgacatcgtgatgagccagagccctagcagcctggccgtgtccgtgggcgagaaagtgaccatgagctgcaagagcagccagtccctgctgcacagcagcaaccagaagaactacctggcctggtatcagcagaagcccggccagtcccccaaggtgctgatctactgggccagcaccagagaaagcggcgtgcccgatagattcaccggcagcggctctggcaccgacttcaccctgaccatcaccagcgtgaagtccgaggacctggctgtgtactactgccagcagtattacagctacccctggaccttcggcggaggcacccggctggaaatcaaaagactcgagatccagaaccctgatcctgccgtgtaccagctgcgggatagcaagagcagcgacaagagcgtgtgtctgttcaccgacttcgacagccagaccaacgtgtcccagagcaaggactccgacgtgtacatcaccgataagtgcgtgctggacatgcggagcatggacttcaagagcaactccgccgtggcctggtccaacaagtccgatttcgcctgcgccaacgccttcaacaacagcattatccccgaggacacattcttcccaagccccgagagcagctgcgacgtgaagctggtggaaaagagcttcgagacagacaccaacctgaacttccagaacctgagcgtgatcggcttcagaatcctgctgctgaaagtggccggctttaacctgctgatgaccctgcggctgtggtccagccgcgccaagagaagcggatctggcgtgaagcagaccctgaatttcgacctgctgaagctggctggcgacgtggaatccaacccaggccctactagtatggactggatttggcgcatccttttccttgtcggcgctgctaccggcgcgcattccttcgaagaagtgcaactccagcagagcgtggccgagcttgtgaagcctggcgcttccgtgaagatgtcctgcaaggtgtccggctacaccctgacagaccacaccatccactggatgaagcagcggcctgagcagggcctggaatggatcggctacatctaccccagggacggcatcaccggctacaacgagaagttcaagggcaaggccacactgaccgccgacaccagcagcagcacagcctacatgcaactgaacagcctgaccagcgaggacagcgccgtgtacttctgtgccagatggggctacagctacagaaactacgcctactactacgactactggggccagggcacaaccctgaccgtgtctagtacgcgtgaggacctgaagaacgtgttcccacctgaggtggccgtgttcgagcctagcgaggccgagatcagccacacccagaaagccaccctcgtgtgcctggctaccggcttctaccccgaccatgtggaactgtcttggtgggtcaacggcaaagaggtgcacagcggcgtgtgtaccgacccccagccactgaaagaacagcccgccctgaacgacagccggtactgcctgagcagcagactgagagtgtccgccaccttctggcagaacccccggaaccacttcagatgccaggtgcagttctacggcctgagcgagaacgacgagtggacccaggacagagccaagcccgtgacccagatcgtgtctgccgaagcctggggcagagccgattgcggctttaccagcgagagctaccagcagggcgtgctgagcgccaccatcctgtacgagatcctgctgggcaaggccaccctgtacgccgtgctggtgtctgccctggtgctgatggctatggtcaagcggaaggacagccgggga

SEQ ID NO: 2050 - DNA, 2298 bp, Artificial Sequence
  Synthetic Polynucloetide
atggccttaccagtgaccgccttgctcctgccgctggccttgctgctccacgccgccaggccggaagtgcagctggttgaatctggcggaggactggttcagcctggcggatctctgagactgtcttgtgccgccagcggcttcagcttcagcgacttttggatgagctgggtccgacaggcccctggcaaaggacttgaatgggtcgccacaatcagccaggccggcagcgagaaggactacgtggactctgtgaagggcagattcaccatcagccgggacaacgccaagaagtccctgtacctccagatgaacagcctgagagccgaggacaccgccgtgtactattgtgcctctggcgtgtacagcttcgactacagaggccagggcaccctggtcacagtctcttctggtaccggcggaggcggatctggcggcggaggtagcggtggcggaggatctgaattcgagatcgtgctgacacagagccctggcaccctgagcctgtctccaggcgaaagagccacactgagctgtcgggccagccagagcgtgtccagctcttacctggcctggtatcagcagaagcccggccaggctccccggctgctgatctacggaacaagcagcagagccaccggcatccccgacagattttctggcagcggctccggcaccgacttcaccctgacaatcagcagactggaacccgaggacttcgccgtgtactactgccagcagtacggcagcagccccttcacctttggcggaggcaccaaggtggaaatcaagagactcgagatccagaaccctgatcctgccgtgtaccagctgcgggatagcaagagcagcgacaagagcgtgtgtctgttcaccgacttcgacagccagaccaacgtgtcccagagcaaggactccgacgtgtacatcaccgataagtgcgtgctggacatgcggagcatggacttcaagagcaactccgccgtggcctggtccaacaagtccgatttcgcctgcgccaacgccttcaacaacagcattatccccgaggacacattcttcccaagccccgagagcagctgcgacgtgaagctggtggaaaagagcttcgagacagacaccaacctgaacttccagaacctgagcgtgatcggcttcagaatcctgctgctgaaagtggccggctttaacctgctgatgaccctgcggctgtggtccagccgcgccaagagaagcggatctggcgtgaagcagaccctgaatttcgacctgctgaagctggctggcgacgtggaatccaacccaggccctactagtatggactggatttggcgcatccttttccttgtcggcgctgctaccggcgcgcattccttcgaacaggtgcaactccaggaatctggccccggactggctaagcccagcgagacactgagcctgacctgtaccgtgtccggcgacagcatcaccagctactactggtcctggatcagacagccccctggcaagggcctggaatggatcggctacatctactacagcggcagcaccaactacaaccccagcctgaagtccagagtgaccatcagcgtggacaccagcaagaaccagttctccctgaagctgagcagcgtgacagccgccgacaccgccgtgtattattgcgccagagatcagcggagaatcgccgctgccggcacccacttttacggcatggatgtgtggggccagggcaccaccgtgaccgtgtcatctacgcgtgaggacctgaagaacgtgttcccacctgaggtggccgtgttcgagcctagcgaggccgagatcagccacacccagaaagccaccctcgtgtgcctggctaccggcttctaccccgaccatgtggaactgtcttggtgggtcaacggcaaagaggtgcacagcggcgtgtgtaccgacccccagccactgaaagaacagcccgccctgaacgacagccggtactgcctgagcagcagactgagagtgtccgccaccttctggcagaacccccggaaccacttcagatgccaggtgcagttctacggcctgagcgagaacgacgagtggacccaggacagagccaagcccgtgacccagatcgtgtctgccgaagcctggggcagagccgattgcggctttaccagcgagagctaccagcagggcgtgctgagcgccaccatcctgtacgagatcctgctgggcaaggccaccctgtacgccgtgctggtgtctgccctggtgctgatggctatggtcaagcggaaggacagccgggga

SEQ ID NO: 2051 - DNA, 2274 bp, Artificial Sequence
  Synthetic Polynucloetide
atggccttaccagtgaccgccttgctcctgccgctggccttgctgctccacgccgccaggccggaagtgcagctggttgaatctggcggaggactggttcagcctggcggatctctgagactgtcttgtgccgccagcggcttcagcttcagcgacttttggatgagctgggtccgacaggcccctggcaaaggacttgaatgggtcgccacaatcagccaggccggcagcgagaaggactacgtggactctgtgaagggcagattcaccatcagccgggacaacgccaagaagtccctgtacctccagatgaacagcctgagagccgaggacaccgccgtgtactattgtgcctctggcgtgtacagcttcgactacagaggccagggcaccctggtcacagtctcttctggtaccggcggaggcggatctggcggcggaggtagcggtggcggaggatctgaattcgacatcctgctgacccagagccccgtgatcctgtccgtgtctcctggcgagagagtgtccttcagctgtcgggccagccagagcatcggcaccaacatccactggtatcagcagcggaccaacggcagccccagactgctgattaagtacgccagcgagtccatcagcggcatccccagcagattttccggcagcggctccggcaccgacttcaccctgagcatcaacagcgtggaaagcgaggacattgccgactactactgccagcagaacaacaactggcccaccaccttcggagccggcaccaagctggaactgaagctcgagatccagaaccctgatcctgccgtgtaccagctgcgggatagcaagagcagcgacaagagcgtgtgtctgttcaccgacttcgacagccagaccaacgtgtcccagagcaaggactccgacgtgtacatcaccgataagtgcgtgctggacatgcggagcatggacttcaagagcaactccgccgtggcctggtccaacaagtccgatttcgcctgcgccaacgccttcaacaacagcattatccccgaggacacattcttcccaagccccgagagcagctgcgacgtgaagctggtggaaaagagcttcgagacagacaccaacctgaacttccagaacctgagcgtgatcggcttcagaatcctgctgctgaaagtggccggctttaacctgctgatgaccctgcggctgtggtccagccgcgccaagagaagcggatctggcgtgaagcagaccctgaatttcgacctgctgaagctggctggcgacgtggaatccaacccaggccctactagtatggactggatttggcgcatccttttccttgtcggcgctgctaccggcgcgcattccttcgaacaggtgcagctgaagcagagcggacctggcctggtgcagcctagccagagcctgtccatcacctgtaccgtgtccggcttcagcctgaccaactacggcgtgcactgggtgcgccagagccctggaaaaggactggaatggctgggagtgatttggagcggcggcaacaccgactacaacacccccttcaccagcagactgtctatcaacaaggacaacagcaagagccaggtgttcttcaagatgaacagcctccagagcaacgacaccgccatctactactgtgctagagccctgacctactatgactacgagttcgcctactggggccagggcacactcgtgacagtgtctgctacgcgtgaggacctgaagaacgtgttcccacctgaggtggccgtgttcgagcctagcgaggccgagatcagccacacccagaaagccaccctcgtgtgcctggctaccggcttctaccccgaccatgtggaactgtcttggtgggtcaacggcaaagaggtgcacagcggcgtgtgtaccgacccccagccactgaaagaacagcccgccctgaacgacagccggtactgcctgagcagcagactgagagtgtccgccaccttctggcagaacccccggaaccacttcagatgccaggtgcagttctacggcctgagcgagaacgacgagtggacccaggacagagccaagcccgtgacccagatcgtgtctgccgaagcctggggcagagccgattgcggctttaccagcgagagctaccagcagggcgtgctgagcgccaccatcctgtacgagatcctgctgggcaaggccaccctgtacgccgtgctggtgtctgccctggtgctgatggctatggtcaagcggaaggacagccgggga

SEQ ID NO: 2052 - DNA, 2253 bp, Artificial Sequence
  Synthetic Polynucloetide
atggccttaccagtgaccgccttgctcctgccgctggccttgctgctccacgccgccaggccggaagtgcagctggttgaatctggcggaggactggttcagcctggcggatctctgagactgtcttgtgccgccagcggcttcagcttcagcgacttttggatgagctgggtccgacaggcccctggcaaaggacttgaatgggtcgccacaatcagccaggccggcagcgagaaggactacgtggactctgtgaagggcagattcaccatcagccgggacaacgccaagaagtccctgtacctccagatgaacagcctgagagccgaggacaccgccgtgtactattgtgcctctggcgtgtacagcttcgactacagaggccagggcaccctggtcacagtctcttctggtaccggcggaggcggatctggcggcggaggtagcggtggcggaggatctgaattcatgacccagagccccaagttcctgctggtgtctgccggcgacagagtgaccctgacatgcaaggccagccagagcgtgaacaacgacgtgtactggtatcagcaggaacccggccagtcccccaagctgctgatctactgggccagcaccagagaaagcggcgtgcccgatagattcaccggcagcggctctggcaccgacttcaccctgacaatcagcagcgtgcaggccgaggacctggccgtgtactactgcaagcagagctacaacctgtacaccttcggcggaggcaccaagctggaaatcaagagactcgagatccagaaccctgatcctgccgtgtaccagctgcgggatagcaagagcagcgacaagagcgtgtgtctgttcaccgacttcgacagccagaccaacgtgtcccagagcaaggactccgacgtgtacatcaccgataagtgcgtgctggacatgcggagcatggacttcaagagcaactccgccgtggcctggtccaacaagtccgatttcgcctgcgccaacgccttcaacaacagcattatccccgaggacacattcttcccaagccccgagagcagctgcgacgtgaagctggtggaaaagagcttcgagacagacaccaacctgaacttccagaacctgagcgtgatcggcttcagaatcctgctgctgaaagtggccggctttaacctgctgatgaccctgcggctgtggtccagccgcgccaagagaagcggatctggcgtgaagcagaccctgaatttcgacctgctgaagctggctggcgacgtggaatccaacccaggccctactagtatggactggatttggcgcatccttttccttgtcggcgctgctaccggcgcgcattccttcgaagaatctggaagaggactggtgcagcctggcggcagcagaaagctgtcttgtgccgccagcggcttcaccttcagcaccagcggaatgcactgggtgcgccaggcccctgagaagggactggaatgggtggcctacatcagctccggcagcaccaccatctaccacgccgataccgtgaagggccggttcaccatcagccgggacaaccccaagaataccctgttcctccagatgaccagcctgcggagcgaggacaccgccatgtactattgctgcgccagaagcggccagttcggcaactacttcgactactggggccagggcaccaccctgaccgtgtcatctacgcgtgaggacctgaagaacgtgttcccacctgaggtggccgtgttcgagcctagcgaggccgagatcagccacacccagaaagccaccctcgtgtgcctggctaccggcttctaccccgaccatgtggaactgtcttggtgggtcaacggcaaagaggtgcacagcggcgtgtgtaccgacccccagccactgaaagaacagcccgccctgaacgacagccggtactgcctgagcagcagactgagagtgtccgccaccttctggcagaacccccggaaccacttcagatgccaggtgcagttctacggcctgagcgagaacgacgagtggacccaggacagagccaagcccgtgacccagatcgtgtctgccgaagcctggggcagagccgattgcggctttaccagcgagagctaccagcagggcgtgctgagcgccaccatcctgtacgagatcctgctgggcaaggccaccctgtacgccgtgctggtgtctgccctggtgctgatggctatggtcaagcggaaggacagccgggga

SEQ ID NO: 2053 - DNA, 2268 bp, Artificial Sequence
  Synthetic Polynucloetide
atggccttaccagtgaccgccttgctcctgccgctggccttgctgctccacgccgccaggccggaagtgcagctggttgaatctggcggaggactggttcagcctggcggatctctgagactgtcttgtgccgccagcggcttcagcttcagcgacttttggatgagctgggtccgacaggcccctggcaaaggacttgaatgggtcgccacaatcagccaggccggcagcgagaaggactacgtggactctgtgaagggcagattcaccatcagccgggacaacgccaagaagtccctgtacctccagatgaacagcctgagagccgaggacaccgccgtgtactattgtgcctctggcgtgtacagcttcgactacagaggccagggcaccctggtcacagtctcttctggtaccggcggaggcggatctggcggcggaggtagcggtggcggaggatctgaattccagagcccatctagcctggctgtgtctgccggcgagaaagtgaccatgagctgcaagagcagccagagcctgctgaacagccggacccggaagaactacctggcctggtatcagcagaagcccggccagagccccaagctgctgatctactgggccagcaccagagaaagcggcgtgcccgatagattcaccggctctggcagcggcaccgacttcaccctgacaatcagcagcgtgcaggccgaggacctggccgtgtactactgcaagcagagcaacctgtacaccttcggcggaggcaccaagctggaaatcaagctcgagatccagaaccctgatcctgccgtgtaccagctgcgggatagcaagagcagcgacaagagcgtgtgtctgttcaccgacttcgacagccagaccaacgtgtcccagagcaaggactccgacgtgtacatcaccgataagtgcgtgctggacatgcggagcatggacttcaagagcaactccgccgtggcctggtccaacaagtccgatttcgcctgcgccaacgccttcaacaacagcattatccccgaggacacattcttcccaagccccgagagcagctgcgacgtgaagctggtggaaaagagcttcgagacagacaccaacctgaacttccagaacctgagcgtgatcggcttcagaatcctgctgctgaaagtggccggctttaacctgctgatgaccctgcggctgtggtccagccgcgccaagagaagcggatctggcgtgaagcagaccctgaatttcgacctgctgaagctggctggcgacgtggaatccaacccaggccctactagtatggactggatttggcgcatccttttccttgtcggcgctgctaccggcgcgcattccttcgaacaggtgcagctggaagagtctggacccgagcttgtgaagcctggggccagcgtgaagctgtcctgtaaagccagcggctacaccttcaccgagtacatcatccactgggtcaagcagcggagcggccagggcctggaatggatcggctggttttaccctggctccggcagcatcaagtacaacgagaagttcaaggacaaggccaccctgaccgccgacaagtccagcagcaccgtgtacatggaactgagcggcctgaccagcgaggacagcgccgtgtatttctgcgccagacacgacggctacagctacttcgactattggggccagggcaccacactgaccgtgtcctctacgcgtgaggacctgaagaacgtgttcccacctgaggtggccgtgttcgagcctagcgaggccgagatcagccacacccagaaagccaccctcgtgtgcctggctaccggcttctaccccgaccatgtggaactgtcttggtgggtcaacggcaaagaggtgcacagcggcgtgtgtaccgacccccagccactgaaagaacagcccgccctgaacgacagccggtactgcctgagcagcagactgagagtgtccgccaccttctggcagaacccccggaaccacttcagatgccaggtgcagttctacggcctgagcgagaacgacgagtggacccaggacagagccaagcccgtgacccagatcgtgtctgccgaagcctggggcagagccgattgcggctttaccagcgagagctaccagcagggcgtgctgagcgccaccatcctgtacgagatcctgctgggcaaggccaccctgtacgccgtgctggtgtctgccctggtgctgatggctatggtcaagcggaaggacagccgggga

SEQ ID NO: 2054 - DNA, 2277 bp, Artificial Sequence
  Synthetic Polynucloetide
atggccttaccagtgaccgccttgctcctgccgctggccttgctgctccacgccgccaggccggaagtgcagctggttgaatctggcggaggactggttcagcctggcggatctctgagactgtcttgtgccgccagcggcttcagcttcagcgacttttggatgagctgggtccgacaggcccctggcaaaggacttgaatgggtcgccacaatcagccaggccggcagcgagaaggactacgtggactctgtgaagggcagattcaccatcagccgggacaacgccaagaagtccctgtacctccagatgaacagcctgagagccgaggacaccgccgtgtactattgtgcctctggcgtgtacagcttcgactacagaggccagggcaccctggtcacagtctcttctggtaccggcggaggcggatctggcggcggaggtagcggtggcggaggatctgaattcgacatccagatgacccagagccccagcagcctgtctgcctctctgggcgagagagtgtccctgacctgtcgggccacacaggaactgagcggctacctgtcttggctgcagcagaagcccgacggcaccatcaagcggctgatctacgccgccagcaccctggatagcggcgtgcccaagagattcagcggcaacagaagcggcagcgactacagcctgaccatcagctccctggaaagcgaggacttcgccgactactactgcctgcagtacgccatctacccctacaccttcggcggaggcaccaagctggaaatcaagctcgagatccagaaccctgatcctgccgtgtaccagctgcgggatagcaagagcagcgacaagagcgtgtgtctgttcaccgacttcgacagccagaccaacgtgtcccagagcaaggactccgacgtgtacatcaccgataagtgcgtgctggacatgcggagcatggacttcaagagcaactccgccgtggcctggtccaacaagtccgatttcgcctgcgccaacgccttcaacaacagcattatccccgaggacacattcttcccaagccccgagagcagctgcgacgtgaagctggtggaaaagagcttcgagacagacaccaacctgaacttccagaacctgagcgtgatcggcttcagaatcctgctgctgaaagtggccggctttaacctgctgatgaccctgcggctgtggtccagccgcgccaagagaagcggatctggcgtgaagcagaccctgaatttcgacctgctgaagctggctggcgacgtggaatccaacccaggccctactagtatggactggatttggcgcatccttttccttgtcggcgctgctaccggcgcgcattccttcgaagaggtgcaactgcagcagtctggccccgagcttgtgaagcctggcgcctccgtgaagatgagctgcaaggccagcggctacacctttaccagctacttcatccactgggtcaagcagaaacccggccagggcctggaatggatcggcttcatcaacccttacaacgacggcagcaagtacaacgagaagttcaagggcaaggccaccctgaccagcgacaagagcagcagcaccgcctacatggaactgtccagcctgacatccgaggacagcgccgtgtactactgcaccagggacgacggctactacggctacgccatggactactggggccagggaacaagcgtcaccgtgtcctctacgcgtgaggacctgaagaacgtgttcccacctgaggtggccgtgttcgagcctagcgaggccgagatcagccacacccagaaagccaccctcgtgtgcctggctaccggcttctaccccgaccatgtggaactgtcttggtgggtcaacggcaaagaggtgcacagcggcgtgtgtaccgacccccagccactgaaagaacagcccgccctgaacgacagccggtactgcctgagcagcagactgagagtgtccgccaccttctggcagaacccccggaaccacttcagatgccaggtgcagttctacggcctgagcgagaacgacgagtggacccaggacagagccaagcccgtgacccagatcgtgtctgccgaagcctggggcagagccgattgcggctttaccagcgagagctaccagcagggcgtgctgagcgccaccatcctgtacgagatcctgctgggcaaggccaccctgtacgccgtgctggtgtctgccctggtgctgatggctatggtcaagcggaaggacagccgggga

SEQ ID NO: 2055 - DNA, 2292 bp, Artificial Sequence
  Synthetic Polynucloetide
atggccttaccagtgaccgccttgctcctgccgctggccttgctgctccacgccgccaggccggaagtgcagctggttgaatctggcggaggactggttcagcctggcggatctctgagactgtcttgtgccgccagcggcttcagcttcagcgacttttggatgagctgggtccgacaggcccctggcaaaggacttgaatgggtcgccacaatcagccaggccggcagcgagaaggactacgtggactctgtgaagggcagattcaccatcagccgggacaacgccaagaagtccctgtacctccagatgaacagcctgagagccgaggacaccgccgtgtactattgtgcctctggcgtgtacagcttcgactacagaggccagggcaccctggtcacagtctcttctggtaccggcggaggcggatctggcggcggaggtagcggtggcggaggatctgaattcgacaccatcgtgctgacacagagccctgcttccctggccgtgtccctgggacagagagccaccatctcttgcagagccagcgagagcgtggacagctacggcaacagcttcatgcactggtatcagcagaagcccggccagccccccaagctgctgatctacctggcctccaacctggaaagcggcgtgcccgccagattttctggcagcggcagcagaaccgacttcaccctgaccatcgaccccgtggaagccgatgatgccgccacctactactgccagcagaacaactacgacccctggaccttcggcggaggcaccaagctggaaatcaagctcgagatccagaaccctgatcctgccgtgtaccagctgcgggatagcaagagcagcgacaagagcgtgtgtctgttcaccgacttcgacagccagaccaacgtgtcccagagcaaggactccgacgtgtacatcaccgataagtgcgtgctggacatgcggagcatggacttcaagagcaactccgccgtggcctggtccaacaagtccgatttcgcctgcgccaacgccttcaacaacagcattatccccgaggacacattcttcccaagccccgagagcagctgcgacgtgaagctggtggaaaagagcttcgagacagacaccaacctgaacttccagaacctgagcgtgatcggcttcagaatcctgctgctgaaagtggccggctttaacctgctgatgaccctgcggctgtggtccagccgcgccaagagaagcggatctggcgtgaagcagaccctgaatttcgacctgctgaagctggctggcgacgtggaatccaacccaggccctactagtatggactggatttggcgcatccttttccttgtcggcgctgctaccggcgcgcattccttcgaagaagtgcaactccagcagagcggccctgagcttgtgaagcctggcgcttccgtgaagatgagctgcaaggccagcggctacaccttcaccagctacgtgatgcactgggtcaagcagaaacctggacagggcctggaatggatcggctacatcaacccctacaacgacggcaccaagtacaacgagaagttcaagggcaaggccaccctgacaagcgacaccagcagcagcaccgcctacatggaactgaacagcctgaccagcgaggacagcgccgtgtacttctgcgccagacccatctacttcgacaacgactacttcgattactggggccagggcaccaccctgaaggtgtcctctacgcgtgaggacctgaagaacgtgttcccacctgaggtggccgtgttcgagcctagcgaggccgagatcagccacacccagaaagccaccctcgtgtgcctggctaccggcttctaccccgaccatgtggaactgtcttggtgggtcaacggcaaagaggtgcacagcggcgtgtgtaccgacccccagccactgaaagaacagcccgccctgaacgacagccggtactgcctgagcagcagactgagagtgtccgccaccttctggcagaacccccggaaccacttcagatgccaggtgcagttctacggcctgagcgagaacgacgagtggacccaggacagagccaagcccgtgacccagatcgtgtctgccgaagcctggggcagagccgattgcggctttaccagcgagagctaccagcagggcgtgctgagcgccaccatcctgtacgagatcctgctgggcaaggccaccctgtacgccgtgctggtgtctgccctggtgctgatggctatggtcaagcggaaggacagccgggga

SEQ ID NO: 2056 - DNA, 2277 bp, Artificial Sequence
  Synthetic Polynucloetide
atggccttaccagtgaccgccttgctcctgccgctggccttgctgctccacgccgccaggccggaagtgcagctggttgaatctggcggaggactggttcagcctggcggatctctgagactgtcttgtgccgccagcggcttcagcttcagcgacttttggatgagctgggtccgacaggcccctggcaaaggacttgaatgggtcgccacaatcagccaggccggcagcgagaaggactacgtggactctgtgaagggcagattcaccatcagccgggacaacgccaagaagtccctgtacctccagatgaacagcctgagagccgaggacaccgccgtgtactattgtgcctctggcgtgtacagcttcgactacagaggccagggcaccctggtcacagtctcttctggtaccggcggaggcggatctggcggcggaggtagcggtggcggaggatctgaattcgacatccagatgacccagagccccagcagcctgtctgccagcgtgggcgacagagtgaccatcacatgcaaggccagccaggacgtgggaatcgccgtggcctggtatcagcagaaacccggcaaggtgcccaagctgctgatctactgggccagcaccagacacaccggcgtgcccgatagattttccggcagcggctccggcaccgacttcaccctgacaatcagctccctccagcccgaggacgtggcaacctactactgccagcagtacagcagctacccctacaccttcggccagggcaccaaggtggaaatcaagagactcgagatccagaaccctgatcctgccgtgtaccagctgcgggatagcaagagcagcgacaagagcgtgtgtctgttcaccgacttcgacagccagaccaacgtgtcccagagcaaggactccgacgtgtacatcaccgataagtgcgtgctggacatgcggagcatggacttcaagagcaactccgccgtggcctggtccaacaagtccgatttcgcctgcgccaacgccttcaacaacagcattatccccgaggacacattcttcccaagccccgagagcagctgcgacgtgaagctggtggaaaagagcttcgagacagacaccaacctgaacttccagaacctgagcgtgatcggcttcagaatcctgctgctgaaagtggccggctttaacctgctgatgaccctgcggctgtggtccagccgcgccaagagaagcggatctggcgtgaagcagaccctgaatttcgacctgctgaagctggctggcgacgtggaatccaacccaggccctactagtatggactggatttggcgcatccttttccttgtcggcgctgctaccggcgcgcattccttcgaagaagtgcaactggtggaatcaggcggcggactggtgcagcctggcggatctctgagactgagctgtgccgccagcggcttcgacttcagccggtactggatgagctgggtgcgccaggcccctggcaaaggactggaatggatcggcgagatcaaccccgacagcagcaccatcaactacgcccccagcctgaaggacaagttcatcatcagccgggacaacgccaagaacagcctgtacctccagatgaactccctgcgggccgaggacaccgccgtgtactattgcgccagacccgacggcaactactggtacttcgacgtgtggggccagggaaccctcgtgaccgtgtcatctacgcgtgaggacctgaagaacgtgttcccacctgaggtggccgtgttcgagcctagcgaggccgagatcagccacacccagaaagccaccctcgtgtgcctggctaccggcttctaccccgaccatgtggaactgtcttggtgggtcaacggcaaagaggtgcacagcggcgtgtgtaccgacccccagccactgaaagaacagcccgccctgaacgacagccggtactgcctgagcagcagactgagagtgtccgccaccttctggcagaacccccggaaccacttcagatgccaggtgcagttctacggcctgagcgagaacgacgagtggacccaggacagagccaagcccgtgacccagatcgtgtctgccgaagcctggggcagagccgattgcggctttaccagcgagagctaccagcagggcgtgctgagcgccaccatcctgtacgagatcctgctgggcaaggccaccctgtacgccgtgctggtgtctgccctggtgctgatggctatggtcaagcggaaggacagccgggga

SEQ ID NO: 2057 - DNA, 2277 bp, Artificial Sequence
  Synthetic Polynucloetide
atggccttaccagtgaccgccttgctcctgccgctggccttgctgctccacgccgccaggccggaagtgcagctggttgaatctggcggaggactggttcagcctggcggatctctgagactgtcttgtgccgccagcggcttcagcttcagcgacttttggatgagctgggtccgacaggcccctggcaaaggacttgaatgggtcgccacaatcagccaggccggcagcgagaaggactacgtggactctgtgaagggcagattcaccatcagccgggacaacgccaagaagtccctgtacctccagatgaacagcctgagagccgaggacaccgccgtgtactattgtgcctctggcgtgtacagcttcgactacagaggccagggcaccctggtcacagtctcttctggtaccggcggaggcggatctggcggcggaggtagcggtggcggaggatctgaattcgacatcgtgatgacccagagccagaagagcatgagcaccagcgtgggcgacagagtgagcatcacctgcaaggccagccaggacgtgatcaccggcgtggcctggtaccagcagaagcccggccagagccccaagctgctgatctacagcgccagctacagatacaccggcgtgcccgacagattcaccggcagcggcagcggcaccgacttcaccttcaccatcagcaacgtgcaggccgaggacctggccgtgtactactgccagcagcactacagcacccccctgaccttcggcgccggcaccaagctggagctgaagctcgagatccagaaccctgatcctgccgtgtaccagctgcgggatagcaagagcagcgacaagagcgtgtgtctgttcaccgacttcgacagccagaccaacgtgtcccagagcaaggactccgacgtgtacatcaccgataagtgcgtgctggacatgcggagcatggacttcaagagcaactccgccgtggcctggtccaacaagtccgatttcgcctgcgccaacgccttcaacaacagcattatccccgaggacacattcttcccaagccccgagagcagctgcgacgtgaagctggtggaaaagagcttcgagacagacaccaacctgaacttccagaacctgagcgtgatcggcttcagaatcctgctgctgaaagtggccggctttaacctgctgatgaccctgcggctgtggtccagccgcgccaagagaagcggatctggcgtgaagcagaccctgaatttcgacctgctgaagctggctggcgacgtggaatccaacccaggccctactagtatggactggatttggcgcatccttttccttgtcggcgctgctaccggcgcgcattccttcgaacaggtgcagctgcagcagcccggcgccgagctggtgagacccggcgccagcgtgaagctgagctgcaaggccagcggctacagcttcaccacctactggatgaactgggtgaagcagagacccggccagggcctggagtggatcggcatgatccaccccagcgacagcgagaccagactgaaccagaagttcaaggacaaggccaccctgaccgtggacaagagcagcagcaccgcctacatgcagctgagcagccccaccagcgaggacagcgccgtgtactactgcgccagaagcaccatgatcgccaccagagccatggactactggggccagggcaccagcgtgaccgtgagcagcacgcgtgaggacctgaagaacgtgttcccacctgaggtggccgtgttcgagcctagcgaggccgagatcagccacacccagaaagccaccctcgtgtgcctggctaccggcttctaccccgaccatgtggaactgtcttggtgggtcaacggcaaagaggtgcacagcggcgtgtgtaccgacccccagccactgaaagaacagcccgccctgaacgacagccggtactgcctgagcagcagactgagagtgtccgccaccttctggcagaacccccggaaccacttcagatgccaggtgcagttctacggcctgagcgagaacgacgagtggacccaggacagagccaagcccgtgacccagatcgtgtctgccgaagcctggggcagagccgattgcggctttaccagcgagagctaccagcagggcgtgctgagcgccaccatcctgtacgagatcctgctgggcaaggccaccctgtacgccgtgctggtgtctgccctggtgctgatggctatggtcaagcggaaggacagccgggga

SEQ ID NO: 2058 - DNA, 2295 bp, Artificial Sequence
  Synthetic Polynucloetide
atggccttaccagtgaccgccttgctcctgccgctggccttgctgctccacgccgccaggccggaagtgcagctggttgaatctggcggaggactggttcagcctggcggatctctgagactgtcttgtgccgccagcggcttcagcttcagcgacttttggatgagctgggtccgacaggcccctggcaaaggacttgaatgggtcgccacaatcagccaggccggcagcgagaaggactacgtggactctgtgaagggcagattcaccatcagccgggacaacgccaagaagtccctgtacctccagatgaacagcctgagagccgaggacaccgccgtgtactattgtgcctctggcgtgtacagcttcgactacagaggccagggcaccctggtcacagtctcttctggtaccggcggaggcggatctggcggcggaggtagcggtggcggaggatctgaattccagagcgtgctgacacagcctccatccgtgtctggcgctccaggccagagagtgaccatctcctgtaccggcagcggcagcaacatcggagccccctacgacgtgtcctggtatcagcaactgcctggcaccgcccccaagctgctgatctaccacaacaacaagcggcccagcggcgtgcccgatagattcagcggctctaagagcggcaccagcgccagcctggctatcactggactccaggccgaggacgaggccgactactactgtgccacagtggaagccggcctgagcggctctgtgtttggcggcggaacaaagctgaccgtgctgggagctctcgagatccagaaccctgatcctgccgtgtaccagctgcgggatagcaagagcagcgacaagagcgtgtgtctgttcaccgacttcgacagccagaccaacgtgtcccagagcaaggactccgacgtgtacatcaccgataagtgcgtgctggacatgcggagcatggacttcaagagcaactccgccgtggcctggtccaacaagtccgatttcgcctgcgccaacgccttcaacaacagcattatccccgaggacacattcttcccaagccccgagagcagctgcgacgtgaagctggtggaaaagagcttcgagacagacaccaacctgaacttccagaacctgagcgtgatcggcttcagaatcctgctgctgaaagtggccggctttaacctgctgatgaccctgcggctgtggtccagccgcgccaagagaagcggatctggcgtgaagcagaccctgaatttcgacctgctgaagctggctggcgacgtggaatccaacccaggccctactagtatggactggatttggcgcatccttttccttgtcggcgctgctaccggcgcgcattccttcgaacaggtgcaactggtgcagagcggagccgaagtgaagaaacctggggccagcgtgaaggtgtcctgcaaggtgtccggctacaccctgaccgagctgagcattcactgggtgcgccaggcccctggcaagggactggaatggatgggcggcttcgaccccgaagagaacgagatcgtgtacgcccagcggttccagggcagagtgacaatgaccgaggacaccagcaccgacaccgcctacatggaactgagcagcctgcggagcgaggataccgccgtgtactactgcgccatcgtgggcagcttcagccctctgacactgggcctgtggggccagggaactatggtcaccgtgtccagcacgcgtgaggacctgaagaacgtgttcccacctgaggtggccgtgttcgagcctagcgaggccgagatcagccacacccagaaagccaccctcgtgtgcctggctaccggcttctaccccgaccatgtggaactgtcttggtgggtcaacggcaaagaggtgcacagcggcgtgtgtaccgacccccagccactgaaagaacagcccgccctgaacgacagccggtactgcctgagcagcagactgagagtgtccgccaccttctggcagaacccccggaaccacttcagatgccaggtgcagttctacggcctgagcgagaacgacgagtggacccaggacagagccaagcccgtgacccagatcgtgtctgccgaagcctggggcagagccgattgcggctttaccagcgagagctaccagcagggcgtgctgagcgccaccatcctgtacgagatcctgctgggcaaggccaccctgtacgccgtgctggtgtctgccctggtgctgatggctatggtcaagcggaaggacagccgggga

SEQ ID NO: 2059 - DNA, 2295 bp, Artificial Sequence
  Synthetic Polynucloetide
atggccttaccagtgaccgccttgctcctgccgctggccttgctgctccacgccgccaggccggaagtgcagctggttgaatctggcggaggactggttcagcctggcggatctctgagactgtcttgtgccgccagcggcttcagcttcagcgacttttggatgagctgggtccgacaggcccctggcaaaggacttgaatgggtcgccacaatcagccaggccggcagcgagaaggactacgtggactctgtgaagggcagattcaccatcagccgggacaacgccaagaagtccctgtacctccagatgaacagcctgagagccgaggacaccgccgtgtactattgtgcctctggcgtgtacagcttcgactacagaggccagggcaccctggtcacagtctcttctggtaccggcggaggcggatctggcggcggaggtagcggtggcggaggatctgaattccagagcgtgctgacacagcctccatccgtgtctggcgctccaggccagagagtgaccatctcctgtaccggcagcggcagcaacatcggagccccctacgacgtgtcctggtatcagcaactgcctggcaccgcccccaagctgctgatctaccacaacaacaagcggcccagcggcgtgcccgatagattcagcggctctaagagcggcaccagcgccagcctggctatcactggactccaggccgaggacgaggccgactactactgccagagctacgacagcagcagcatcagcaccatcttcggcggaggcaccaagctgacagtgctgggagctctcgagatccagaaccctgatcctgccgtgtaccagctgcgggatagcaagagcagcgacaagagcgtgtgtctgttcaccgacttcgacagccagaccaacgtgtcccagagcaaggactccgacgtgtacatcaccgataagtgcgtgctggacatgcggagcatggacttcaagagcaactccgccgtggcctggtccaacaagtccgatttcgcctgcgccaacgccttcaacaacagcattatccccgaggacacattcttcccaagccccgagagcagctgcgacgtgaagctggtggaaaagagcttcgagacagacaccaacctgaacttccagaacctgagcgtgatcggcttcagaatcctgctgctgaaagtggccggctttaacctgctgatgaccctgcggctgtggtccagccgcgccaagagaagcggatctggcgtgaagcagaccctgaatttcgacctgctgaagctggctggcgacgtggaatccaacccaggccctactagtatggactggatttggcgcatccttttccttgtcggcgctgctaccggcgcgcattccttcgaacaggtgcaactggtgcagagcggagccgaagtgaagaaacctggggccagcgtgaaggtgtcctgcaaggtgtccggctacaccctgaccgagctgagcattcactgggtgcgccaggcccctggcaagggactggaatggatgggcggcttcgaccccgaagagaacgagatcgtgtacgcccagcggttccagggcagagtgacaatgaccgaggacaccagcaccgacaccgcctacatggaactgagcagcctgcggagcgaggataccgccgtgtactactgtgccatcgtgggcagcttcagcggaatcgcctacagaccttggggccagggcacaatggtcaccgtgtctagcacgcgtgaggacctgaagaacgtgttcccacctgaggtggccgtgttcgagcctagcgaggccgagatcagccacacccagaaagccaccctcgtgtgcctggctaccggcttctaccccgaccatgtggaactgtcttggtgggtcaacggcaaagaggtgcacagcggcgtgtgtaccgacccccagccactgaaagaacagcccgccctgaacgacagccggtactgcctgagcagcagactgagagtgtccgccaccttctggcagaacccccggaaccacttcagatgccaggtgcagttctacggcctgagcgagaacgacgagtggacccaggacagagccaagcccgtgacccagatcgtgtctgccgaagcctggggcagagccgattgcggctttaccagcgagagctaccagcagggcgtgctgagcgccaccatcctgtacgagatcctgctgggcaaggccaccctgtacgccgtgctggtgtctgccctggtgctgatggctatggtcaagcggaaggacagccgggga

SEQ ID NO: 2060 - DNA, 2259 bp, Artificial Sequence
  Synthetic Polynucloetide
atggccttaccagtgaccgccttgctcctgccgctggccttgctgctccacgccgccaggccggaagtgcagctggttgaatctggcggaggactggttcagcctggcggatctctgagactgtcttgtgccgccagcggcttcagcttcagcgacttttggatgagctgggtccgacaggcccctggcaaaggacttgaatgggtcgccacaatcagccaggccggcagcgagaaggactacgtggactctgtgaagggcagattcaccatcagccgggacaacgccaagaagtccctgtacctccagatgaacagcctgagagccgaggacaccgccgtgtactattgtgcctctggcgtgtacagcttcgactacagaggccagggcaccctggtcacagtctcttctggtaccggcggaggcggatctggcggcggaggtagcggtggcggaggatctgaattcgacatccagatgacccagagccccagcagcctgtctgccagcgtgggcgacagagtgaccatcacctgtagagccagccagggcatcagaaacaacctggcctggtatcagcagaagcccggcaaggcccccaagcggctgatctacgccgccagcaatctccagagcggcgtgcccagcagattcacaggctctggcagcggcaccgagttcaccctgatcgtgtctagcctccagcccgaggacttcgccacctactactgcctccagcaccacagctaccccctgacatctggcggaggcaccaaggtggaactcgagatccagaaccctgatcctgccgtgtaccagctgcgggatagcaagagcagcgacaagagcgtgtgtctgttcaccgacttcgacagccagaccaacgtgtcccagagcaaggactccgacgtgtacatcaccgataagtgcgtgctggacatgcggagcatggacttcaagagcaactccgccgtggcctggtccaacaagtccgatttcgcctgcgccaacgccttcaacaacagcattatccccgaggacacattcttcccaagccccgagagcagctgcgacgtgaagctggtggaaaagagcttcgagacagacaccaacctgaacttccagaacctgagcgtgatcggcttcagaatcctgctgctgaaagtggccggctttaacctgctgatgaccctgcggctgtggtccagccgcgccaagagaagcggatctggcgtgaagcagaccctgaatttcgacctgctgaagctggctggcgacgtggaatccaacccaggccctactagtatggactggatttggcgcatccttttccttgtcggcgctgctaccggcgcgcattccttcgaagaggtgcaggtgctggaaagtggcggaggactggtgcagcctggcggctctctgagactgtcttgtgccgccagcggcttcaccttcagcagctacgccatgagctgggtgcgccaggcccctggaaaaggactggaatgggtgtccgccatcagcggctctggcgggtctaccaactacgccgatagcgtgaagggccggttcaccatcagccgggacaacagcaagaacaccctgtacctccagatgaacagcctgcgggccgaggacaccgccgtgtattattgtgccggcagcagcgggtggagcgagtattggggacagggcaccctcgtgaccgtgtcctctacgcgtgaggacctgaagaacgtgttcccacctgaggtggccgtgttcgagcctagcgaggccgagatcagccacacccagaaagccaccctcgtgtgcctggctaccggcttctaccccgaccatgtggaactgtcttggtgggtcaacggcaaagaggtgcacagcggcgtgtgtaccgacccccagccactgaaagaacagcccgccctgaacgacagccggtactgcctgagcagcagactgagagtgtccgccaccttctggcagaacccccggaaccacttcagatgccaggtgcagttctacggcctgagcgagaacgacgagtggacccaggacagagccaagcccgtgacccagatcgtgtctgccgaagcctggggcagagccgattgcggctttaccagcgagagctaccagcagggcgtgctgagcgccaccatcctgtacgagatcctgctgggcaaggccaccctgtacgccgtgctggtgtctgccctggtgctgatggctatggtcaagcggaaggacagccgggga

SEQ ID NO: 2061 - DNA, 2277 bp, Artificial Sequence
  Synthetic Polynucloetide
atggccttaccagtgaccgccttgctcctgccgctggccttgctgctccacgccgccaggccggaagtgcagctggttgaatctggcggaggactggttcagcctggcggatctctgagactgtcttgtgccgccagcggcttcagcttcagcgacttttggatgagctgggtccgacaggcccctggcaaaggacttgaatgggtcgccacaatcagccaggccggcagcgagaaggactacgtggactctgtgaagggcagattcaccatcagccgggacaacgccaagaagtccctgtacctccagatgaacagcctgagagccgaggacaccgccgtgtactattgtgcctctggcgtgtacagcttcgactacagaggccagggcaccctggtcacagtctcttctggtaccggcggaggcggatctggcggcggaggtagcggtggcggaggatctgaattcgacgagatccagctggtgcagagcggagccgaagtgaagaagcctggcgagagcctgcggatcagctgcaagggcagcggcttcaacatcgaggactactacatccactgggtgcgccagatgcccggcaagggcctggaatggatgggcagaatcgaccccgagaacgacgagactaagtacggccccatcttccagggccacgtgaccatcagcgccgacaccagcatcaacaccgtgtacctccagtggtccagcctgaaggccagcgacaccgccatgtactactgcgcctttagaggcggcgtgtactggggccagggcaccacagtgacagtgtctagcctcgagatccagaaccctgatcctgccgtgtaccagctgcgggatagcaagagcagcgacaagagcgtgtgtctgttcaccgacttcgacagccagaccaacgtgtcccagagcaaggactccgacgtgtacatcaccgataagtgcgtgctggacatgcggagcatggacttcaagagcaactccgccgtggcctggtccaacaagtccgatttcgcctgcgccaacgccttcaacaacagcattatccccgaggacacattcttcccaagccccgagagcagctgcgacgtgaagctggtggaaaagagcttcgagacagacaccaacctgaacttccagaacctgagcgtgatcggcttcagaatcctgctgctgaaagtggccggctttaacctgctgatgaccctgcggctgtggtccagccgcgccaagagaagcggatctggcgtgaagcagaccctgaatttcgacctgctgaagctggctggcgacgtggaatccaacccaggccctactagtatggactggatttggcgcatccttttccttgtcggcgctgctaccggcgcgcattccttcgaagatgtcgtgatgacccagagccccgacagcctggctgtgtctctgggagagagagccaccatcaactgcaagtccagccagtccctgctggacagcgacggcaagacctacctgaactggctccagcagaagcccggccagccccccaagagactgatctccctggtgtccaagctggactccggcgtgcccgatagattttccggctctggcagcggcaccgacttcaccctgacaatcagctcccttcaggccgaggacgtggccgtgtactattgctggcagggcacacacttccccggcacctttggcggaggcaccaaggtggaaatcaagacgcgtgaggacctgaagaacgtgttcccacctgaggtggccgtgttcgagcctagcgaggccgagatcagccacacccagaaagccaccctcgtgtgcctggctaccggcttctaccccgaccatgtggaactgtcttggtgggtcaacggcaaagaggtgcacagcggcgtgtgtaccgacccccagccactgaaagaacagcccgccctgaacgacagccggtactgcctgagcagcagactgagagtgtccgccaccttctggcagaacccccggaaccacttcagatgccaggtgcagttctacggcctgagcgagaacgacgagtggacccaggacagagccaagcccgtgacccagatcgtgtctgccgaagcctggggcagagccgattgcggctttaccagcgagagctaccagcagggcgtgctgagcgccaccatcctgtacgagatcctgctgggcaaggccaccctgtacgccgtgctggtgtctgccctggtgctgatggctatggtcaagcggaaggacagccgggga

SEQ ID NO: 2062 - DNA, 2298 bp, Artificial Sequence
  Synthetic Polynucloetide
atggccttaccagtgaccgccttgctcctgccgctggccttgctgctccacgccgccaggccggaagtgcagctggttgaatctggcggaggactggttcagcctggcggatctctgagactgtcttgtgccgccagcggcttcagcttcagcgacttttggatgagctgggtccgacaggcccctggcaaaggacttgaatgggtcgccacaatcagccaggccggcagcgagaaggactacgtggactctgtgaagggcagattcaccatcagccgggacaacgccaagaagtccctgtacctccagatgaacagcctgagagccgaggacaccgccgtgtactattgtgcctctggcgtgtacagcttcgactacagaggccagggcaccctggtcacagtctcttctggtaccggcggaggcggatctggcggcggaggtagcggtggcggaggatctgaattcgacgagcttgtgatgacccagagccccagcagcctgacagtgacagccggcgagaaagtgaccatgagctgcaagagcagccagagcctgctgaacagcggcaaccagaagaactacctgacctggtatcagcagaagcccggccagccccccaagctgctgatctactgggccagcaccagagaaagcggcgtgcccgatagattcaccggctctggcagcggcaccgacttcaccctgacaatcagcagcgtgcaggccgaggacctggccgtgtactactgccagaacgactacagctaccccctgaccttcggagccggcaccaagctggaaatcaagctcgagatccagaaccctgatcctgccgtgtaccagctgcgggatagcaagagcagcgacaagagcgtgtgtctgttcaccgacttcgacagccagaccaacgtgtcccagagcaaggactccgacgtgtacatcaccgataagtgcgtgctggacatgcggagcatggacttcaagagcaactccgccgtggcctggtccaacaagtccgatttcgcctgcgccaacgccttcaacaacagcattatccccgaggacacattcttcccaagccccgagagcagctgcgacgtgaagctggtggaaaagagcttcgagacagacaccaacctgaacttccagaacctgagcgtgatcggcttcagaatcctgctgctgaaagtggccggctttaacctgctgatgaccctgcggctgtggtccagccgcgccaagagaagcggatctggcgtgaagcagaccctgaatttcgacctgctgaagctggctggcgacgtggaatccaacccaggccctactagtatggactggatttggcgcatccttttccttgtcggcgctgctaccggcgcgcattccttcgaagaagtgcagctgctggaacagtctggcgccgaacttgtgcggcctggcaccagcgtgaagatcagctgtaaagccagcggctacgccttcaccaactactggctgggctgggtcaagcagaggcctggacacggcctggaatggatcggcgacatctttcccggctccggcaacatccactacaacgagaagttcaagggcaaggccaccctgaccgccgacaagtctagcagcaccgcctacatgcagctgtccagcctgacctttgaggacagcgccgtgtatttctgtgcccggctgcggaactgggacgagcccatggattattggggccagggcaccaccgtgaccgtgtctagtacgcgtgaggacctgaagaacgtgttcccacctgaggtggccgtgttcgagcctagcgaggccgagatcagccacacccagaaagccaccctcgtgtgcctggctaccggcttctaccccgaccatgtggaactgtcttggtgggtcaacggcaaagaggtgcacagcggcgtgtgtaccgacccccagccactgaaagaacagcccgccctgaacgacagccggtactgcctgagcagcagactgagagtgtccgccaccttctggcagaacccccggaaccacttcagatgccaggtgcagttctacggcctgagcgagaacgacgagtggacccaggacagagccaagcccgtgacccagatcgtgtctgccgaagcctggggcagagccgattgcggctttaccagcgagagctaccagcagggcgtgctgagcgccaccatcctgtacgagatcctgctgggcaaggccaccctgtacgccgtgctggtgtctgccctggtgctgatggctatggtcaagcggaaggacagccgggga

SEQ ID NO: 2063 - DNA, 2301 bp, Artificial Sequence
  Synthetic Polynucloetide
atggccttaccagtgaccgccttgctcctgccgctggccttgctgctccacgccgccaggccggaagtgcagctggttgaatctggcggaggactggttcagcctggcggatctctgagactgtcttgtgccgccagcggcttcagcttcagcgacttttggatgagctgggtccgacaggcccctggcaaaggacttgaatgggtcgccacaatcagccaggccggcagcgagaaggactacgtggactctgtgaagggcagattcaccatcagccgggacaacgccaagaagtccctgtacctccagatgaacagcctgagagccgaggacaccgccgtgtactattgtgcctctggcgtgtacagcttcgactacagaggccagggcaccctggtcacagtctcttctggtaccggcggaggcggatctggcggcggaggtagcggtggcggaggatctgaattcgacgagctgcagatgacccagagccctagcagcctgtctgccagcgtgggcgacagagtgaccatcacctgtagagccagccagagcatcagcagctacctgaactggtatcagcagaagcccggccagccccccaaactgctgatctactgggccagcaccagagaaagcggcgtgcccgatagattcagcggcagcgagagcggcaccaactacaccctgaccatcagctccctgcagcccgaggacttcgccacctacttttgccagcagagcgacagcctgcccatcacctttggacagggcacccggctggacattcagctcgagatccagaaccctgatcctgccgtgtaccagctgcgggatagcaagagcagcgacaagagcgtgtgtctgttcaccgacttcgacagccagaccaacgtgtcccagagcaaggactccgacgtgtacatcaccgataagtgcgtgctggacatgcggagcatggacttcaagagcaactccgccgtggcctggtccaacaagtccgatttcgcctgcgccaacgccttcaacaacagcattatccccgaggacacattcttcccaagccccgagagcagctgcgacgtgaagctggtggaaaagagcttcgagacagacaccaacctgaacttccagaacctgagcgtgatcggcttcagaatcctgctgctgaaagtggccggctttaacctgctgatgaccctgcggctgtggtccagccgcgccaagagaagcggatctggcgtgaagcagaccctgaatttcgacctgctgaagctggctggcgacgtggaatccaacccaggccctactagtatggactggatttggcgcatccttttccttgtcggcgctgctaccggcgcgcattccttcgaagaggtgcaactgctggaatctgggggcggagtggtgcagcctggcagaagcctgagactgagctgtgccgccagcggcttcaccttcagctcctacggaatgcactgggtgcgccaggcccctggcaaaggactggaatgggtggccgtgatctcctacgacggcagcaacaagtactacgccgacagcgtgaagggccggttcaccatcagccgggacaacagcaagaacaccctgtacctgcagatgaacagcctgcgggccgaggacaccgccgtgtactactgcgccaaggatatgggctggggcagcggctggcggccttactactactacggcatggacgtgtggggccagggcaccaccgtgacagtgtcatctacgcgtgaggacctgaagaacgtgttcccacctgaggtggccgtgttcgagcctagcgaggccgagatcagccacacccagaaagccaccctcgtgtgcctggctaccggcttctaccccgaccatgtggaactgtcttggtgggtcaacggcaaagaggtgcacagcggcgtgtgtaccgacccccagccactgaaagaacagcccgccctgaacgacagccggtactgcctgagcagcagactgagagtgtccgccaccttctggcagaacccccggaaccacttcagatgccaggtgcagttctacggcctgagcgagaacgacgagtggacccaggacagagccaagcccgtgacccagatcgtgtctgccgaagcctggggcagagccgattgcggctttaccagcgagagctaccagcagggcgtgctgagcgccaccatcctgtacgagatcctgctgggcaaggccaccctgtacgccgtgctggtgtctgccctggtgctgatggctatggtcaagcggaaggacagccgggga

SEQ ID NO: 2064 - DNA, 2292 bp, Artificial Sequence
  Synthetic Polynucloetide
atggccttaccagtgaccgccttgctcctgccgctggccttgctgctccacgccgccaggccggaagtgcagctggttgaatctggcggaggactggttcagcctggcggatctctgagactgtcttgtgccgccagcggcttcagcttcagcgacttttggatgagctgggtccgacaggcccctggcaaaggacttgaatgggtcgccacaatcagccaggccggcagcgagaaggactacgtggactctgtgaagggcagattcaccatcagccgggacaacgccaagaagtccctgtacctccagatgaacagcctgagagccgaggacaccgccgtgtactattgtgcctctggcgtgtacagcttcgactacagaggccagggcaccctggtcacagtctcttctggtaccggcggaggcggatctggcggcggaggtagcggtggcggaggatctgaattcgacgacatccaaatgacacagagtccttctagtttgagtgcgagcgtgggggacagggtgaccattacctgcagggccagccagagcataagctcataccttaattggtaccagcaaaaaccaggtaaggcccctaagctcctgatctacgcggcctcttcacttcaatctggggtcccttcccgcttcagtggctccggcagcggcaccgacttcacgctcactatatcaagtctgcagcctgaggatctcgccacctattactgtcaacaaagttattccacccctttcacctttggaccgggcacgaaagtggatattaagctcgagatccagaaccctgatcctgccgtgtaccagctgcgggatagcaagagcagcgacaagagcgtgtgtctgttcaccgacttcgacagccagaccaacgtgtcccagagcaaggactccgacgtgtacatcaccgataagtgcgtgctggacatgcggagcatggacttcaagagcaactccgccgtggcctggtccaacaagtccgatttcgcctgcgccaacgccttcaacaacagcattatccccgaggacacattcttcccaagccccgagagcagctgcgacgtgaagctggtggaaaagagcttcgagacagacaccaacctgaacttccagaacctgagcgtgatcggcttcagaatcctgctgctgaaagtggccggctttaacctgctgatgaccctgcggctgtggtccagccgcgccaagagaagcggatctggcgtgaagcagaccctgaatttcgacctgctgaagctggctggcgacgtggaatccaacccaggccctactagtatggactggatttggcgcatccttttccttgtcggcgctgctaccggcgcgcattccttcgaagtgcacgaggtccagcttgtgcagtccggggcagaggtcaagaagcctggttctagcgtaaaagtgagttgcaaagcctcaggtgggacattttcatcctacgcgatcagttgggttagacaggctcctggtcaagggctggaatggatgggcggaattattccaatcttcggaacagcgaattacgcgcagaagttccagggtagagtaaccatcactgctgacaagtccacctccaccgcatacatggaattgtctagtctccggagcgaggatacggcggtgtattattgtgctacgttcgccctgtttggcttccgcgaacaggctttcgacatctgggggcagggcacgacagtcacggttagtagtacgcgtgaggacctgaagaacgtgttcccacctgaggtggccgtgttcgagcctagcgaggccgagatcagccacacccagaaagccaccctcgtgtgcctggctaccggcttctaccccgaccatgtggaactgtcttggtgggtcaacggcaaagaggtgcacagcggcgtgtgtaccgacccccagccactgaaagaacagcccgccctgaacgacagccggtactgcctgagcagcagactgagagtgtccgccaccttctggcagaacccccggaaccacttcagatgccaggtgcagttctacggcctgagcgagaacgacgagtggacccaggacagagccaagcccgtgacccagatcgtgtctgccgaagcctggggcagagccgattgcggctttaccagcgagagctaccagcagggcgtgctgagcgccaccatcctgtacgagatcctgctgggcaaggccaccctgtacgccgtgctggtgtctgccctggtgctgatggctatggtcaagcggaaggacagccgggga

SEQ ID NO: 2065 - DNA, 2286 bp, Artificial Sequence
  Synthetic Polynucloetide
atggccttaccagtgaccgccttgctcctgccgctggccttgctgctccacgccgccaggccggaagtgcagctggttgaatctggcggaggactggttcagcctggcggatctctgagactgtcttgtgccgccagcggcttcagcttcagcgacttttggatgagctgggtccgacaggcccctggcaaaggacttgaatgggtcgccacaatcagccaggccggcagcgagaaggactacgtggactctgtgaagggcagattcaccatcagccgggacaacgccaagaagtccctgtacctccagatgaacagcctgagagccgaggacaccgccgtgtactattgtgcctctggcgtgtacagcttcgactacagaggccagggcaccctggtcacagtctcttctggtaccggcggaggcggatctggcggcggaggtagcggtggcggaggatctgaattcgacatcgtgctgacccagagccctctgagcctggccgtgtctctgggacagcctgccatcatcagctgcaaggccagccagagcgtgtcctttgccggcacctctctgatgcactggtatcaccagaagcccggccagcagcccagactgctgatctacagagccagcaacctggaagccggcgtgcccgatagattttccggcagcggcagcaagaccgacttcaccctgaccatcagccccgtggaagccgaagatgccgccacctactactgccagcagagcagagagtacccctacaccttcggcggaggcaccaagctggaaatcaagaggctcgagatccagaaccctgatcctgccgtgtaccagctgcgggatagcaagagcagcgacaagagcgtgtgtctgttcaccgacttcgacagccagaccaacgtgtcccagagcaaggactccgacgtgtacatcaccgataagtgcgtgctggacatgcggagcatggacttcaagagcaactccgccgtggcctggtccaacaagtccgatttcgcctgcgccaacgccttcaacaacagcattatccccgaggacacattcttcccaagccccgagagcagctgcgacgtgaagctggtggaaaagagcttcgagacagacaccaacctgaacttccagaacctgagcgtgatcggcttcagaatcctgctgctgaaagtggccggctttaacctgctgatgaccctgcggctgtggtccagccgcgccaagagaagcggatctggcgtgaagcagaccctgaatttcgacctgctgaagctggctggcgacgtggaatccaacccaggccctactagtatggactggatttggcgcatccttttccttgtcggcgctgctaccggcgcgcattccttcgaacaggtccaactggtgcagagcggagccgaggtcgtgaagcctggcgcttccgtgaagattagctgcaaagccagcggctacacctttaccggctactttatgaactgggtcaagcagagccctggccagagcctggaatggatcggcagaatccacccctacgacggcgacaccttctacaaccagaagttccagggcaaggccaccctgacagtggacaagagcagcaacaccgcccacatggaactgctgagcctgaccagcgaggacttcgccgtgtactactgcaccagatacgacggcagccgggctatggactattggggccagggcaccaccgtgaccgtgtctagtacgcgtgaggacctgaagaacgtgttcccacctgaggtggccgtgttcgagcctagcgaggccgagatcagccacacccagaaagccaccctcgtgtgcctggctaccggcttctaccccgaccatgtggaactgtcttggtgggtcaacggcaaagaggtgcacagcggcgtgtgtaccgacccccagccactgaaagaacagcccgccctgaacgacagccggtactgcctgagcagcagactgagagtgtccgccaccttctggcagaacccccggaaccacttcagatgccaggtgcagttctacggcctgagcgagaacgacgagtggacccaggacagagccaagcccgtgacccagatcgtgtctgccgaagcctggggcagagccgattgcggctttaccagcgagagctaccagcagggcgtgctgagcgccaccatcctgtacgagatcctgctgggcaaggccaccctgtacgccgtgctggtgtctgccctggtgctgatggctatggtcaagcggaaggacagccgggga

SEQ ID NO: 2066 - DNA, 2277 bp, Artificial Sequence
  Synthetic Polynucloetide
atggccttaccagtgaccgccttgctcctgccgctggccttgctgctccacgccgccaggccggaagtgcagctggttgaatctggcggaggactggttcagcctggcggatctctgagactgtcttgtgccgccagcggcttcagcttcagcgacttttggatgagctgggtccgacaggcccctggcaaaggacttgaatgggtcgccacaatcagccaggccggcagcgagaaggactacgtggactctgtgaagggcagattcaccatcagccgggacaacgccaagaagtccctgtacctccagatgaacagcctgagagccgaggacaccgccgtgtactattgtgcctctggcgtgtacagcttcgactacagaggccagggcaccctggtcacagtctcttctggtaccggcggaggcggatctggcggcggaggtagcggtggcggaggatctgaattcgacgacgttgtgatgacccagacccccctgagcctgcctgtgacacctggcgaacctgccagcatcagctgtcggagcagccagagcctggtgcacagaaacggcaacacctacctgcactggtatctccagaagcccggccagagccccaagctgctgatccacaaggtgtccaacagattcagcggcgtgcccgacagattctccggcagcggctctggcaccgacttcaccctgaagatcagccgggtggaagccgaggacctgggcgtgtacttctgtagccagagcacccatgtgccccccctgacatttggagccggcaccaagctggaactgaagctcgagatccagaaccctgatcctgccgtgtaccagctgcgggatagcaagagcagcgacaagagcgtgtgtctgttcaccgacttcgacagccagaccaacgtgtcccagagcaaggactccgacgtgtacatcaccgataagtgcgtgctggacatgcggagcatggacttcaagagcaactccgccgtggcctggtccaacaagtccgatttcgcctgcgccaacgccttcaacaacagcattatccccgaggacacattcttcccaagccccgagagcagctgcgacgtgaagctggtggaaaagagcttcgagacagacaccaacctgaacttccagaacctgagcgtgatcggcttcagaatcctgctgctgaaagtggccggctttaacctgctgatgaccctgcggctgtggtccagccgcgccaagagaagcggatctggcgtgaagcagaccctgaatttcgacctgctgaagctggctggcgacgtggaatccaacccaggccctactagtatggactggatttggcgcatccttttccttgtcggcgctgctaccggcgcgcattccttcgaagaagtgcagctggtgcagtctggcgctgaggtggaaaagcctggggccagcgtgaagattagctgcaaggccagcggcagcagcttcaccggctacaacatgaactgggtgcgccagaacatcggcaagagcctggaatggatcggagccatcgacccctactacggcggcaccagctacaaccagaagttcaagggcagagccaccctgaccgtggacaagagcaccagcaccgcctacatgcacctgaagtccctgcggagcgaggacaccgccgtgtactactgtgtgtccggcatggaatattggggccagggcaccagcgtgaccgtgtctagtacgcgtgaggacctgaagaacgtgttcccacctgaggtggccgtgttcgagcctagcgaggccgagatcagccacacccagaaagccaccctcgtgtgcctggctaccggcttctaccccgaccatgtggaactgtcttggtgggtcaacggcaaagaggtgcacagcggcgtgtgtaccgacccccagccactgaaagaacagcccgccctgaacgacagccggtactgcctgagcagcagactgagagtgtccgccaccttctggcagaacccccggaaccacttcagatgccaggtgcagttctacggcctgagcgagaacgacgagtggacccaggacagagccaagcccgtgacccagatcgtgtctgccgaagcctggggcagagccgattgcggctttaccagcgagagctaccagcagggcgtgctgagcgccaccatcctgtacgagatcctgctgggcaaggccaccctgtacgccgtgctggtgtctgccctggtgctgatggctatggtcaagcggaaggacagccgggga

SEQ ID NO: 2067 - DNA, 2271 bp, Artificial Sequence
  Synthetic Polynucloetide
atggccttaccagtgaccgccttgctcctgccgctggccttgctgctccacgccgccaggccggaagtgcagctggttgaatctggcggaggactggttcagcctggcggatctctgagactgtcttgtgccgccagcggcttcagcttcagcgacttttggatgagctgggtccgacaggcccctggcaaaggacttgaatgggtcgccacaatcagccaggccggcagcgagaaggactacgtggactctgtgaagggcagattcaccatcagccgggacaacgccaagaagtccctgtacctccagatgaacagcctgagagccgaggacaccgccgtgtactattgtgcctctggcgtgtacagcttcgactacagaggccagggcaccctggtcacagtctcttctggtaccggcggaggcggatctggcggcggaggtagcggtggcggaggatctgaattcgacgagatcgtgatgacccagacccctgccaccctgtctgtgtctgccggcgagagagtgaccattacctgcaaggccagccagagcgtgtccaacgacgtgacctggtatcagcagaagcccggccaggcccccagactgctgatctacagcgccagcaacagatacagcggcgtgcccgccagattttccggcagcggctacggcaccgagttcaccttcaccatcagcagcgtgcagagcgaggacttcgccgtgtacttctgtcagcaagactacagcagcttcggccagggcaccaagctggaaatcaagaggctcgagatccagaaccctgatcctgccgtgtaccagctgcgggatagcaagagcagcgacaagagcgtgtgtctgttcaccgacttcgacagccagaccaacgtgtcccagagcaaggactccgacgtgtacatcaccgataagtgcgtgctggacatgcggagcatggacttcaagagcaactccgccgtggcctggtccaacaagtccgatttcgcctgcgccaacgccttcaacaacagcattatccccgaggacacattcttcccaagccccgagagcagctgcgacgtgaagctggtggaaaagagcttcgagacagacaccaacctgaacttccagaacctgagcgtgatcggcttcagaatcctgctgctgaaagtggccggctttaacctgctgatgaccctgcggctgtggtccagccgcgccaagagaagcggatctggcgtgaagcagaccctgaatttcgacctgctgaagctggctggcgacgtggaatccaacccaggccctactagtatggactggatttggcgcatccttttccttgtcggcgctgctaccggcgcgcattccttcgaacaggtgcagctggtggaatctggacctggcgtggtgcagcctggcagaagcctgagaatcagctgtgccgtgtccggcttcagcgtgaccaactacggcgtgcactgggtgcgccagccacctggaaaaggactggaatggctgggcgtgatctgggctggcggcatcaccaactacaacagcgccttcatgtcccggctgaccatctccaaggacaacagcaagaacaccgtgtacctccagatgaacagcctgcgggccgaggacaccgccatgtactactgtgcttccagaggcggccactacggctacgccctggattattggggccagggaaccctcgtgaccgtgtcctctacgcgtgaggacctgaagaacgtgttcccacctgaggtggccgtgttcgagcctagcgaggccgagatcagccacacccagaaagccaccctcgtgtgcctggctaccggcttctaccccgaccatgtggaactgtcttggtgggtcaacggcaaagaggtgcacagcggcgtgtgtaccgacccccagccactgaaagaacagcccgccctgaacgacagccggtactgcctgagcagcagactgagagtgtccgccaccttctggcagaacccccggaaccacttcagatgccaggtgcagttctacggcctgagcgagaacgacgagtggacccaggacagagccaagcccgtgacccagatcgtgtctgccgaagcctggggcagagccgattgcggctttaccagcgagagctaccagcagggcgtgctgagcgccaccatcctgtacgagatcctgctgggcaaggccaccctgtacgccgtgctggtgtctgccctggtgctgatggctatggtcaagcggaaggacagccgggga

SEQ ID NO: 2068 - DNA, 2277 bp, Artificial Sequence
  Synthetic Polynucloetide
atggccttaccagtgaccgccttgctcctgccgctggccttgctgctccacgccgccaggccggaagtgcagctggttgaatctggcggaggactggttcagcctggcggatctctgagactgtcttgtgccgccagcggcttcagcttcagcgacttttggatgagctgggtccgacaggcccctggcaaaggacttgaatgggtcgccacaatcagccaggccggcagcgagaaggactacgtggactctgtgaagggcagattcaccatcagccgggacaacgccaagaagtccctgtacctccagatgaacagcctgagagccgaggacaccgccgtgtactattgtgcctctggcgtgtacagcttcgactacagaggccagggcaccctggtcacagtctcttctggtaccggcggaggcggatctggcggcggaggtagcggtggcggaggatctgaattcgacatccagatgacccagaccgccagcagcctgcctgcctctctgggcgacagagtgaccatctcctgtagcgccagccaggacatcagcaactacctgaactggtatcagcagaaacccgacggcaccgtgaagctgctgatcttctacagcagcaacctgcacagcggcgtgcccagcagattttctggcggcggaagcggcaccgactacagcctgaccatcagcaatctggaacccgaggacattgccacctacttttgccaccagtacagcaagctgccctggacctttggcggaggcaccaagctggaaatcaagagactcgagatccagaaccctgatcctgccgtgtaccagctgcgggatagcaagagcagcgacaagagcgtgtgtctgttcaccgacttcgacagccagaccaacgtgtcccagagcaaggactccgacgtgtacatcaccgataagtgcgtgctggacatgcggagcatggacttcaagagcaactccgccgtggcctggtccaacaagtccgatttcgcctgcgccaacgccttcaacaacagcattatccccgaggacacattcttcccaagccccgagagcagctgcgacgtgaagctggtggaaaagagcttcgagacagacaccaacctgaacttccagaacctgagcgtgatcggcttcagaatcctgctgctgaaagtggccggctttaacctgctgatgaccctgcggctgtggtccagccgcgccaagagaagcggatctggcgtgaagcagaccctgaatttcgacctgctgaagctggctggcgacgtggaatccaacccaggccctactagtatggactggatttggcgcatccttttccttgtcggcgctgctaccggcgcgcattccttcgaagaagtgaccctggtggaaagcggcggagacttcgtgaagcctggcggctctctgaaggtgtcctgtgccgccagcggcttcgcctttagccactacgccatgagctgggtgcgccagacccctgccaagagactggaatgggtggcctacatcagcagcggcggctccggcacctactactccgatagcgtgaagggccggttcaccatcagccgggacaacgccaagaacaccctgtacctccagatgcggagcctgcggagcgaggacagcgccatgtatttctgcaccagagtgaagctgggcacctattacttcgactcttggggccagggcaccaccctgaccgtgtcatctacgcgtgaggacctgaagaacgtgttcccacctgaggtggccgtgttcgagcctagcgaggccgagatcagccacacccagaaagccaccctcgtgtgcctggctaccggcttctaccccgaccatgtggaactgtcttggtgggtcaacggcaaagaggtgcacagcggcgtgtgtaccgacccccagccactgaaagaacagcccgccctgaacgacagccggtactgcctgagcagcagactgagagtgtccgccaccttctggcagaacccccggaaccacttcagatgccaggtgcagttctacggcctgagcgagaacgacgagtggacccaggacagagccaagcccgtgacccagatcgtgtctgccgaagcctggggcagagccgattgcggctttaccagcgagagctaccagcagggcgtgctgagcgccaccatcctgtacgagatcctgctgggcaaggccaccctgtacgccgtgctggtgtctgccctggtgctgatggctatggtcaagcggaaggacagccgggga

SEQ ID NO: 2069 - DNA, 2283 bp, Artificial Sequence
  Synthetic Polynucloetide
atggccttaccagtgaccgccttgctcctgccgctggccttgctgctccacgccgccaggccggaagtgcagctggttgaatctggcggaggactggttcagcctggcggatctctgagactgtcttgtgccgccagcggcttcagcttcagcgacttttggatgagctgggtccgacaggcccctggcaaaggacttgaatgggtcgccacaatcagccaggccggcagcgagaaggactacgtggactctgtgaagggcagattcaccatcagccgggacaacgccaagaagtccctgtacctccagatgaacagcctgagagccgaggacaccgccgtgtactattgtgcctctggcgtgtacagcttcgactacagaggccagggcaccctggtcacagtctcttctggtaccggcggaggcggatctggcggcggaggtagcggtggcggaggatctgaattccagttcgtgctgacccagagcccttctgcctctgctgccctgggagcctctgccaagctgacctgtacactgagcagcgcccacaagacctacaccatcgactggtatcagcagcagaagggaaaggcccccagatacctgatccaagtgaagtccgacggcacctacacaaaggccaccggcgtgcccgatagattcagcggcagtagcagcggagccgatagatacctgattatccccagcgtgcaggccgacgacgaggccgattactactgcggcaccgattacaccggcggctacgtgttcggcggaggcacacaactgaccgtgacactcgagatccagaaccctgatcctgccgtgtaccagctgcgggatagcaagagcagcgacaagagcgtgtgtctgttcaccgacttcgacagccagaccaacgtgtcccagagcaaggactccgacgtgtacatcaccgataagtgcgtgctggacatgcggagcatggacttcaagagcaactccgccgtggcctggtccaacaagtccgatttcgcctgcgccaacgccttcaacaacagcattatccccgaggacacattcttcccaagccccgagagcagctgcgacgtgaagctggtggaaaagagcttcgagacagacaccaacctgaacttccagaacctgagcgtgatcggcttcagaatcctgctgctgaaagtggccggctttaacctgctgatgaccctgcggctgtggtccagccgcgccaagagaagcggatctggcgtgaagcagaccctgaatttcgacctgctgaagctggctggcgacgtggaatccaacccaggccctactagtatggactggatttggcgcatccttttccttgtcggcgctgctaccggcgcgcattccttcgaagagcaactgaaagagtctggcggcggactgttcaagcccaccgataccctgaccctgacctgcaccgtgtccggcttcagcctgagctactacggcgtgaactgggtgcgccaggcccctggcaatggcctggaatggatcggcacaatcggcggcagcggcgacacctactatgcctcttgggccaagtccagaagcaccatcatcagaaacaccaacgagaacaccgtgaccctgaagatgaccagcctgacagccgccgacaccgccacctacttttgcgtcagatacgccaacatcggctacgagtatttcaacgtgtggggacccggcaccctcgtgaccgtgtcatctacgcgtgaggacctgaagaacgtgttcccacctgaggtggccgtgttcgagcctagcgaggccgagatcagccacacccagaaagccaccctcgtgtgcctggctaccggcttctaccccgaccatgtggaactgtcttggtgggtcaacggcaaagaggtgcacagcggcgtgtgtaccgacccccagccactgaaagaacagcccgccctgaacgacagccggtactgcctgagcagcagactgagagtgtccgccaccttctggcagaacccccggaaccacttcagatgccaggtgcagttctacggcctgagcgagaacgacgagtggacccaggacagagccaagcccgtgacccagatcgtgtctgccgaagcctggggcagagccgattgcggctttaccagcgagagctaccagcagggcgtgctgagcgccaccatcctgtacgagatcctgctgggcaaggccaccctgtacgccgtgctggtgtctgccctggtgctgatggctatggtcaagcggaaggacagccgggga

SEQ ID NO: 2070 - DNA, 2298 bp, Artificial Sequence
  Synthetic Polynucloetide
atggccttaccagtgaccgccttgctcctgccgctggccttgctgctccacgccgccaggccggaagtgcagctggttgaatctggcggaggactggttcagcctggcggatctctgagactgtcttgtgccgccagcggcttcagcttcagcgacttttggatgagctgggtccgacaggcccctggcaaaggacttgaatgggtcgccacaatcagccaggccggcagcgagaaggactacgtggactctgtgaagggcagattcaccatcagccgggacaacgccaagaagtccctgtacctccagatgaacagcctgagagccgaggacaccgccgtgtactattgtgcctctggcgtgtacagcttcgactacagaggccagggcaccctggtcacagtctcttctggtaccggcggaggcggatctggcggcggaggtagcggtggcggaggatctgaattccagttcgtgctgacccagagcccttctgtgtctgccgccctgggagcctctgccaagctgacctgtacactgagcagcgcccacaagacctacaccatcgactggtatcagcagcagcagggcgaggcccccagatacctgatgcaagtgaagtccgacggcagctacaccaagggcaccggcgtgcccgatagattcagcggcagtagcagcggagccgatagatacctgattatccccagcgtgcaggccgacgacgaggccggatatgtgtgcggcgctgacgacaatggcggctacgtgttcggcggaggcacccaactgacagtgacactcgagatccagaaccctgatcctgccgtgtaccagctgcgggatagcaagagcagcgacaagagcgtgtgtctgttcaccgacttcgacagccagaccaacgtgtcccagagcaaggactccgacgtgtacatcaccgataagtgcgtgctggacatgcggagcatggacttcaagagcaactccgccgtggcctggtccaacaagtccgatttcgcctgcgccaacgccttcaacaacagcattatccccgaggacacattcttcccaagccccgagagcagctgcgacgtgaagctggtggaaaagagcttcgagacagacaccaacctgaacttccagaacctgagcgtgatcggcttcagaatcctgctgctgaaagtggccggctttaacctgctgatgaccctgcggctgtggtccagccgcgccaagagaagcggatctggcgtgaagcagaccctgaatttcgacctgctgaagctggctggcgacgtggaatccaacccaggccctactagtatggactggatttggcgcatccttttccttgtcggcgctgctaccggcgcgcattccttcgaacagagcgtgaaagagtctgagggcggcctgttcaagcccaccgataccctgaccctgacctgcaccgtgtccggcttcagcctgagcagacacgccctgacatgggtgcgccaggcccctggaaatggcctggaatggatcggagccatcgacaacgccggcaccacctactatgcctcttgggccaagtccagaagcaccatcacccggaacaccgacctgcacaccgtgaccctgaagatgaccagcctgaccgccagcgacaccgccacctacttttgcgccagagtgttctacgacatcaacagcggctactacctggacggcatggacctgtggggacctggcacacttgtgaccgtgtccagcacgcgtgaggacctgaagaacgtgttcccacctgaggtggccgtgttcgagcctagcgaggccgagatcagccacacccagaaagccaccctcgtgtgcctggctaccggcttctaccccgaccatgtggaactgtcttggtgggtcaacggcaaagaggtgcacagcggcgtgtgtaccgacccccagccactgaaagaacagcccgccctgaacgacagccggtactgcctgagcagcagactgagagtgtccgccaccttctggcagaacccccggaaccacttcagatgccaggtgcagttctacggcctgagcgagaacgacgagtggacccaggacagagccaagcccgtgacccagatcgtgtctgccgaagcctggggcagagccgattgcggctttaccagcgagagctaccagcagggcgtgctgagcgccaccatcctgtacgagatcctgctgggcaaggccaccctgtacgccgtgctggtgtctgccctggtgctgatggctatggtcaagcggaaggacagccgggga

SEQ ID NO: 2071 - DNA, 2280 bp, Artificial Sequence
  Synthetic Polynucloetide
atggccttaccagtgaccgccttgctcctgccgctggccttgctgctccacgccgccaggccggaagtgcagctggttgaatctggcggaggactggttcagcctggcggatctctgagactgtcttgtgccgccagcggcttcagcttcagcgacttttggatgagctgggtccgacaggcccctggcaaaggacttgaatgggtcgccacaatcagccaggccggcagcgagaaggactacgtggactctgtgaagggcagattcaccatcagccgggacaacgccaagaagtccctgtacctccagatgaacagcctgagagccgaggacaccgccgtgtactattgtgcctctggcgtgtacagcttcgactacagaggccagggcaccctggtcacagtctcttctggtaccggcggaggcggatctggcggcggaggtagcggtggcggaggatctgaattcgacatccagatgacccagagccccagcagcctgtctgccagcgtgggcgacagagtgaccatcacctgtagagccagccagggcatcagctcttggctggcctggtatcagcagaagcccgagaaggcccccaagagcctgatctacgccgcctctagtctccagagcggcgtgcccagcagattttctggcagcggctccggcaccgacttcaccctgacaatcagctccctccagcccgaggacttcgccacctactactgccagcagtacaacagctacccccccacctttggcggaggcaccaaggtggaaatcaagctcgagatccagaaccctgatcctgccgtgtaccagctgcgggatagcaagagcagcgacaagagcgtgtgtctgttcaccgacttcgacagccagaccaacgtgtcccagagcaaggactccgacgtgtacatcaccgataagtgcgtgctggacatgcggagcatggacttcaagagcaactccgccgtggcctggtccaacaagtccgatttcgcctgcgccaacgccttcaacaacagcattatccccgaggacacattcttcccaagccccgagagcagctgcgacgtgaagctggtggaaaagagcttcgagacagacaccaacctgaacttccagaacctgagcgtgatcggcttcagaatcctgctgctgaaagtggccggctttaacctgctgatgaccctgcggctgtggtccagccgcgccaagagaagcggatctggcgtgaagcagaccctgaatttcgacctgctgaagctggctggcgacgtggaatccaacccaggccctactagtatggactggatttggcgcatccttttccttgtcggcgctgctaccggcgcgcattccttcgaagaagtgcaactggtggaatcaggcggcggactggtgcagcctggcgagtctctgagactgagctgtgtggcctccggcttcaccttcagccggtacaagatgaactgggtgcgccaggcccctggcaagggactggaatgggtgtcctacatcagccgcagcggcagagacatctactacgccgacagcgtgaagggccggttcaccatcagcagagacaacgccaagaacagcctgtacctccagatgaactccctgcgggacgaggacaccgccgtgtactactgtgccggaaccgtgaccacctattactacttcggcatggacgtgtggggccacggcaccaccgtgacagtgtcatctacgcgtgaggacctgaagaacgtgttcccacctgaggtggccgtgttcgagcctagcgaggccgagatcagccacacccagaaagccaccctcgtgtgcctggctaccggcttctaccccgaccatgtggaactgtcttggtgggtcaacggcaaagaggtgcacagcggcgtgtgtaccgacccccagccactgaaagaacagcccgccctgaacgacagccggtactgcctgagcagcagactgagagtgtccgccaccttctggcagaacccccggaaccacttcagatgccaggtgcagttctacggcctgagcgagaacgacgagtggacccaggacagagccaagcccgtgacccagatcgtgtctgccgaagcctggggcagagccgattgcggctttaccagcgagagctaccagcagggcgtgctgagcgccaccatcctgtacgagatcctgctgggcaaggccaccctgtacgccgtgctggtgtctgccctggtgctgatggctatggtcaagcggaaggacagccgggga

SEQ ID NO: 2072 - DNA, 2283 bp, Artificial Sequence
  Synthetic Polynucloetide
atggccttaccagtgaccgccttgctcctgccgctggccttgctgctccacgccgccaggccggaagtgcagctggttgaatctggcggaggactggttcagcctggcggatctctgagactgtcttgtgccgccagcggcttcagcttcagcgacttttggatgagctgggtccgacaggcccctggcaaaggacttgaatgggtcgccacaatcagccaggccggcagcgagaaggactacgtggactctgtgaagggcagattcaccatcagccgggacaacgccaagaagtccctgtacctccagatgaacagcctgagagccgaggacaccgccgtgtactattgtgcctctggcgtgtacagcttcgactacagaggccagggcaccctggtcacagtctcttctggtaccggcggaggcggatctggcggcggaggtagcggtggcggaggatctgaattcgacatccagatgacccagagccccagcagcctgtctgccagcgtgggcgacagagtgaccatcacctgtagagccagccagggcatcagctcttggctggcctggtatcagcagaagcccgagaaggcccccaagagcctgatctacgccgcctctagtctccagagcggcgtgcccagcagattttctggcagcggctccggcaccgacttcaccctgacaatcagctccctccagcccgaggacttcgccacctactactgccagcagtacaacagctaccctcccacctttggcggaggcaccaaggtggaaatcaagctcgagatccagaaccctgatcctgccgtgtaccagctgcgggatagcaagagcagcgacaagagcgtgtgtctgttcaccgacttcgacagccagaccaacgtgtcccagagcaaggactccgacgtgtacatcaccgataagtgcgtgctggacatgcggagcatggacttcaagagcaactccgccgtggcctggtccaacaagtccgatttcgcctgcgccaacgccttcaacaacagcattatccccgaggacacattcttcccaagccccgagagcagctgcgacgtgaagctggtggaaaagagcttcgagacagacaccaacctgaacttccagaacctgagcgtgatcggcttcagaatcctgctgctgaaagtggccggctttaacctgctgatgaccctgcggctgtggtccagccgcgccaagagaagcggatctggcgtgaagcagaccctgaatttcgacctgctgaagctggctggcgacgtggaatccaacccaggccctactagtatggactggatttggcgcatccttttccttgtcggcgctgctaccggcgcgcattccttcgaagaagtgcaactggtggaatccgggggaggctctgtgcagcctggcgagtctctgagactgagctgtgtggcctccggcttcaccttcagccggtacaagatgaactgggtgcgccaggcccctggcaagggactggaatgggtgtcctacatcagccgcagcggcagagacatctactacgccgacagcgtgaagggccggttcaccatcagcagagacaacgccaagaacagcctgtacctccagatgaactccctgcgggacgaggacaccgccgtgtactactgtgccggaaccgtgaccacctattactacgacttcggcatggacgtgtggggccagggcacaaccgtgacagtgtctagcacgcgtgaggacctgaagaacgtgttcccacctgaggtggccgtgttcgagcctagcgaggccgagatcagccacacccagaaagccaccctcgtgtgcctggctaccggcttctaccccgaccatgtggaactgtcttggtgggtcaacggcaaagaggtgcacagcggcgtgtgtaccgacccccagccactgaaagaacagcccgccctgaacgacagccggtactgcctgagcagcagactgagagtgtccgccaccttctggcagaacccccggaaccacttcagatgccaggtgcagttctacggcctgagcgagaacgacgagtggacccaggacagagccaagcccgtgacccagatcgtgtctgccgaagcctggggcagagccgattgcggctttaccagcgagagctaccagcagggcgtgctgagcgccaccatcctgtacgagatcctgctgggcaaggccaccctgtacgccgtgctggtgtctgccctggtgctgatggctatggtcaagcggaaggacagccgggga

SEQ ID NO: 2073 - DNA, 2277 bp, Artificial Sequence
  Synthetic Polynucloetide
atggccttaccagtgaccgccttgctcctgccgctggccttgctgctccacgccgccaggccggaagtgcagctggttgaatctggcggaggactggttcagcctggcggatctctgagactgtcttgtgccgccagcggcttcagcttcagcgacttttggatgagctgggtccgacaggcccctggcaaaggacttgaatgggtcgccacaatcagccaggccggcagcgagaaggactacgtggactctgtgaagggcagattcaccatcagccgggacaacgccaagaagtccctgtacctccagatgaacagcctgagagccgaggacaccgccgtgtactattgtgcctctggcgtgtacagcttcgactacagaggccagggcaccctggtcacagtctcttctggtaccggcggaggcggatctggcggcggaggtagcggtggcggaggatctgaattccagtctgtgctgacacagcctccatctgcctctggcacacctggacagagagtgaccatcagctgtagcggcagcagaagcaacgtcggcggcaactacgtgttctggtatcagcaggtcccaggcgctacccctaagctgctgatctacagaagcaatcagcggcctagcggcgtgcccgatagatttgccggaagcaagagcggcagctctgccagccttgccatctctggactgagaagcgaggacgaggccgactactactgtgccacctgggatgatagcctgagcggcttcgtgtttggcaccggcaccaaagtgacagtgcttggtctcgagatccagaaccctgatcctgccgtgtaccagctgcgggatagcaagagcagcgacaagagcgtgtgtctgttcaccgacttcgacagccagaccaacgtgtcccagagcaaggactccgacgtgtacatcaccgataagtgcgtgctggacatgcggagcatggacttcaagagcaactccgccgtggcctggtccaacaagtccgatttcgcctgcgccaacgccttcaacaacagcattatccccgaggacacattcttcccaagccccgagagcagctgcgacgtgaagctggtggaaaagagcttcgagacagacaccaacctgaacttccagaacctgagcgtgatcggcttcagaatcctgctgctgaaagtggccggctttaacctgctgatgaccctgcggctgtggtccagccgcgccaagagaagcggatctggcgtgaagcagaccctgaatttcgacctgctgaagctggctggcgacgtggaatccaacccaggccctactagtatggactggatttggcgcatccttttccttgtcggcgctgctaccggcgcgcattccttcgaagttcagctggttgaatctggcggcggactggttaagcctggcggatctctgagactgtcttgtgccgccagcggcttcaccttcagcgattactacatgagctggatcagacaggcccctggcaaaggactggaatgggtgtcctacatcagcagcagcggctccaccatctactacgccgatagcgtgaagggcagattcaccatcagccgggacaacgccaagaacagcctgtacctccagatgaactccctgagagccgaggacaccgccgtgtactattgcgccagaggctacggcaaagcctacgatcaatggggccagggcacactggtcaccgtttcttctacgcgtgaggacctgaagaacgtgttcccacctgaggtggccgtgttcgagcctagcgaggccgagatcagccacacccagaaagccaccctcgtgtgcctggctaccggcttctaccccgaccatgtggaactgtcttggtgggtcaacggcaaagaggtgcacagcggcgtgtgtaccgacccccagccactgaaagaacagcccgccctgaacgacagccggtactgcctgagcagcagactgagagtgtccgccaccttctggcagaacccccggaaccacttcagatgccaggtgcagttctacggcctgagcgagaacgacgagtggacccaggacagagccaagcccgtgacccagatcgtgtctgccgaagcctggggcagagccgattgcggctttaccagcgagagctaccagcagggcgtgctgagcgccaccatcctgtacgagatcctgctgggcaaggccaccctgtacgccgtgctggtgtctgccctggtgctgatggctatggtcaagcggaaggacagccgggga

SEQ ID NO: 2074 - DNA, 2274 bp, Artificial Sequence
  Synthetic Polynucloetide
atggccttaccagtgaccgccttgctcctgccgctggccttgctgctccacgccgccaggccggaagtgcagctggttgaatctggcggaggactggttcagcctggcggatctctgagactgtcttgtgccgccagcggcttcagcttcagcgacttttggatgagctgggtccgacaggcccctggcaaaggacttgaatgggtcgccacaatcagccaggccggcagcgagaaggactacgtggactctgtgaagggcagattcaccatcagccgggacaacgccaagaagtccctgtacctccagatgaacagcctgagagccgaggacaccgccgtgtactattgtgcctctggcgtgtacagcttcgactacagaggccagggcaccctggtcacagtctcttctggtaccggcggaggcggatctggcggcggaggtagcggtggcggaggatctgaattccagtctgtggtcacacagccacctagcatgtctgccgctccaggccagcaagtgaccatctcttgtagcggcggcaacagcaacatcgagcggaactacgtgtcctggtatctgcaactgcctggcacagcccctaagctggtcatcttcgacaacgacagacggcccagcggcatccccgatagattttctggcagcaagagcggcaccagcgccacactgggaattaccggacttcagacaggcgacgaggccgactactactgtggcacatgggactctagcctgagaggctgggttttcggcggaggcacaaagctgacagtgcttggtctcgagatccagaaccctgatcctgccgtgtaccagctgcgggatagcaagagcagcgacaagagcgtgtgtctgttcaccgacttcgacagccagaccaacgtgtcccagagcaaggactccgacgtgtacatcaccgataagtgcgtgctggacatgcggagcatggacttcaagagcaactccgccgtggcctggtccaacaagtccgatttcgcctgcgccaacgccttcaacaacagcattatccccgaggacacattcttcccaagccccgagagcagctgcgacgtgaagctggtggaaaagagcttcgagacagacaccaacctgaacttccagaacctgagcgtgatcggcttcagaatcctgctgctgaaagtggccggctttaacctgctgatgaccctgcggctgtggtccagccgcgccaagagaagcggatctggcgtgaagcagaccctgaatttcgacctgctgaagctggctggcgacgtggaatccaacccaggccctactagtatggactggatttggcgcatccttttccttgtcggcgctgctaccggcgcgcattccttcgaagtgcagctcgttgagtctggcggcggactgattcaacctggcggaagcctgagactgagctgtgccgcttccggcttcaccttcagcaactacgccatgaactgggttcgacaggcccctggcaaaggactggaatgggtgtccaccatcaacggcagaggcagcagcaccatctacgccgattctgtgaagggcagattcaccatcagccgggacaacagcaagaacaccctgtacctccagatgaactccctgagagccgaggacaccgccacctattactgtgcccggtacatcagcagaggactgggcgattcttggggccagggcacactggttacagtgacgcgtgaggacctgaagaacgtgttcccacctgaggtggccgtgttcgagcctagcgaggccgagatcagccacacccagaaagccaccctcgtgtgcctggctaccggcttctaccccgaccatgtggaactgtcttggtgggtcaacggcaaagaggtgcacagcggcgtgtgtaccgacccccagccactgaaagaacagcccgccctgaacgacagccggtactgcctgagcagcagactgagagtgtccgccaccttctggcagaacccccggaaccacttcagatgccaggtgcagttctacggcctgagcgagaacgacgagtggacccaggacagagccaagcccgtgacccagatcgtgtctgccgaagcctggggcagagccgattgcggctttaccagcgagagctaccagcagggcgtgctgagcgccaccatcctgtacgagatcctgctgggcaaggccaccctgtacgccgtgctggtgtctgccctggtgctgatggctatggtcaagcggaaggacagccgggga

SEQ ID NO: 2075 - DNA, 2277 bp, Artificial Sequence
  Synthetic Polynucloetide
atggccttaccagtgaccgccttgctcctgccgctggccttgctgctccacgccgccaggccggaagtgcagctggttgaatctggcggaggactggttcagcctggcggatctctgagactgtcttgtgccgccagcggcttcagcttcagcgacttttggatgagctgggtccgacaggcccctggcaaaggacttgaatgggtcgccacaatcagccaggccggcagcgagaaggactacgtggactctgtgaagggcagattcaccatcagccgggacaacgccaagaagtccctgtacctccagatgaacagcctgagagccgaggacaccgccgtgtactattgtgcctctggcgtgtacagcttcgactacagaggccagggcaccctggtcacagtctcttctggtaccggcggaggcggatctggcggcggaggtagcggtggcggaggatctgaattcgacgtcgtgatgacccagacccctctgagcctgcctgtgtccctgggcgatcaggccagcatcagctgtagaagcagccagagcctggtgcacagcaacggcaacacctacctgcactggtatctccagaagcccggccagagccccaagctgctgatctacaaggtgtccaacagattcagcggcgtgcccgacagattctccggcagcggctctggcaccgacttcaccctgaagatcagccgggtggaagccgaggacctgggcgtgtacttctgtagccagaacacccccgtgccccccaagtttggcagcggcaccaagctggaaatcaagctcgagatccagaaccctgatcctgccgtgtaccagctgcgggatagcaagagcagcgacaagagcgtgtgtctgttcaccgacttcgacagccagaccaacgtgtcccagagcaaggactccgacgtgtacatcaccgataagtgcgtgctggacatgcggagcatggacttcaagagcaactccgccgtggcctggtccaacaagtccgatttcgcctgcgccaacgccttcaacaacagcattatccccgaggacacattcttcccaagccccgagagcagctgcgacgtgaagctggtggaaaagagcttcgagacagacaccaacctgaacttccagaacctgagcgtgatcggcttcagaatcctgctgctgaaagtggccggctttaacctgctgatgaccctgcggctgtggtccagccgcgccaagagaagcggatctggcgtgaagcagaccctgaatttcgacctgctgaagctggctggcgacgtggaatccaacccaggccctactagtatggactggatttggcgcatccttttccttgtcggcgctgctaccggcgcgcattccttcgaacaggtgcagctccagcagtctggcgctgaactcgtgcggcctggcgcttctgtgaagctgtcttgcaaggccagcggctacaccttcaacgactacgagatgcactgggtcaagcagacccctgtgcacggcctgaagtggatcggagccctggaacccaagaccggcgataccgcctacagccagaagttcaagggcaaggccaccctgaccgccgacaagagcagcagcacagcctacatggaactgcggagcctgaccagcgaggacagcgccgtgtactactgcaccagctgctactactacacctacagcggccagggcaccctcgtgacagtgtctgctacgcgtgaggacctgaagaacgtgttcccacctgaggtggccgtgttcgagcctagcgaggccgagatcagccacacccagaaagccaccctcgtgtgcctggctaccggcttctaccccgaccatgtggaactgtcttggtgggtcaacggcaaagaggtgcacagcggcgtgtgtaccgacccccagccactgaaagaacagcccgccctgaacgacagccggtactgcctgagcagcagactgagagtgtccgccaccttctggcagaacccccggaaccacttcagatgccaggtgcagttctacggcctgagcgagaacgacgagtggacccaggacagagccaagcccgtgacccagatcgtgtctgccgaagcctggggcagagccgattgcggctttaccagcgagagctaccagcagggcgtgctgagcgccaccatcctgtacgagatcctgctgggcaaggccaccctgtacgccgtgctggtgtctgccctggtgctgatggctatggtcaagcggaaggacagccgggga

SEQ ID NO: 2076 - DNA, 2274 bp, Artificial Sequence
  Synthetic Polynucloetide
atggccttaccagtgaccgccttgctcctgccgctggccttgctgctccacgccgccaggccggaagtgcagctggttgaatctggcggaggactggttcagcctggcggatctctgagactgtcttgtgccgccagcggcttcagcttcagcgacttttggatgagctgggtccgacaggcccctggcaaaggacttgaatgggtcgccacaatcagccaggccggcagcgagaaggactacgtggactctgtgaagggcagattcaccatcagccgggacaacgccaagaagtccctgtacctccagatgaacagcctgagagccgaggacaccgccgtgtactattgtgcctctggcgtgtacagcttcgactacagaggccagggcaccctggtcacagtctcttctggtaccggcggaggcggatctggcggcggaggtagcggtggcggaggatctgaattcgacatccaactgacccagagccccagcagcctgtctgcctctgtgggcgacagagtgaccatcacctgtagagccagccagggcatcagaaacgacctgggctggtatcagcagaagcccggcaaggcccccaagcggctgatctatgctgccagctccctccagaatggcgtgcccagcagattttccggcagcggctctggcaccgagttcaccctgaccatcagctccctccagcccgaggacttcgccacctactactgcctccagcacaacacctaccccgccttcggccagggcaccaaggtggaaatcaagagactcgagatccagaaccctgatcctgccgtgtaccagctgcgggatagcaagagcagcgacaagagcgtgtgtctgttcaccgacttcgacagccagaccaacgtgtcccagagcaaggactccgacgtgtacatcaccgataagtgcgtgctggacatgcggagcatggacttcaagagcaactccgccgtggcctggtccaacaagtccgatttcgcctgcgccaacgccttcaacaacagcattatccccgaggacacattcttcccaagccccgagagcagctgcgacgtgaagctggtggaaaagagcttcgagacagacaccaacctgaacttccagaacctgagcgtgatcggcttcagaatcctgctgctgaaagtggccggctttaacctgctgatgaccctgcggctgtggtccagccgcgccaagagaagcggatctggcgtgaagcagaccctgaatttcgacctgctgaagctggctggcgacgtggaatccaacccaggccctactagtatggactggatttggcgcatccttttccttgtcggcgctgctaccggcgcgcattccttcgaacaggtgcaactccaggaatctggccctggcctcgtgaagcctagccagaccctgagcctgacctgtaccgtgtctggcggcagcatcagcagcttcaactactactggtcctggatcagacaccaccctggcaagggcctggaatggatcggctacatctactacagcggcagcacctacagcaaccccagcctgaagtcccgcgtgaccatctccgtggacaccagcaagaaccagtttagcctgaccctgtccagcgtgacagccgccgataccgccgtgtactactgcgccagaggctacaactggaactacttcgactactggggccagggaaccctcgtgaccgtgtctagtacgcgtgaggacctgaagaacgtgttcccacctgaggtggccgtgttcgagcctagcgaggccgagatcagccacacccagaaagccaccctcgtgtgcctggctaccggcttctaccccgaccatgtggaactgtcttggtgggtcaacggcaaagaggtgcacagcggcgtgtgtaccgacccccagccactgaaagaacagcccgccctgaacgacagccggtactgcctgagcagcagactgagagtgtccgccaccttctggcagaacccccggaaccacttcagatgccaggtgcagttctacggcctgagcgagaacgacgagtggacccaggacagagccaagcccgtgacccagatcgtgtctgccgaagcctggggcagagccgattgcggctttaccagcgagagctaccagcagggcgtgctgagcgccaccatcctgtacgagatcctgctgggcaaggccaccctgtacgccgtgctggtgtctgccctggtgctgatggctatggtcaagcggaaggacagccgggga

SEQ ID NO: 2077 - DNA, 2280 bp, Artificial Sequence
  Synthetic Polynucloetide
atggccttaccagtgaccgccttgctcctgccgctggccttgctgctccacgccgccaggccggaagtgcagctggttgaatctggcggaggactggttcagcctggcggatctctgagactgtcttgtgccgccagcggcttcagcttcagcgacttttggatgagctgggtccgacaggcccctggcaaaggacttgaatgggtcgccacaatcagccaggccggcagcgagaaggactacgtggactctgtgaagggcagattcaccatcagccgggacaacgccaagaagtccctgtacctccagatgaacagcctgagagccgaggacaccgccgtgtactattgtgcctctggcgtgtacagcttcgactacagaggccagggcaccctggtcacagtctcttctggtaccggcggaggcggatctggcggcggaggtagcggtggcggaggatctgaattcgacgacatcgtgctgacccagagccccgccagcctggccgtgagcctgggccagagcgtgaccatcagctgcagagccagcgagagcgtggagtactacggcaccagcctgatgcagtggtaccagcagaagcccggccagccccccaagctgctgatctacgccaccagcaacgtggagagcggcgtgcccgccagattcagcggcagcggcagcggcaccgacttcagcctgaacatccaccccgtggaggaggacgacatcgccatgtacttctgccagcagagcagaaagctgcccagcaccttcggcggcggcaccaagctggagatcaagctcgagatccagaaccctgatcctgccgtgtaccagctgcgggatagcaagagcagcgacaagagcgtgtgtctgttcaccgacttcgacagccagaccaacgtgtcccagagcaaggactccgacgtgtacatcaccgataagtgcgtgctggacatgcggagcatggacttcaagagcaactccgccgtggcctggtccaacaagtccgatttcgcctgcgccaacgccttcaacaacagcattatccccgaggacacattcttcccaagccccgagagcagctgcgacgtgaagctggtggaaaagagcttcgagacagacaccaacctgaacttccagaacctgagcgtgatcggcttcagaatcctgctgctgaaagtggccggctttaacctgctgatgaccctgcggctgtggtccagccgcgccaagagaagcggatctggcgtgaagcagaccctgaatttcgacctgctgaagctggctggcgacgtggaatccaacccaggccctactagtatggactggatttggcgcatccttttccttgtcggcgctgctaccggcgcgcattccttcgaagacgtgagactgcaggagagcggccccggccaggtgaagcccagccagaccgtgagcctgacctgcagcgtgaccggctacagcatcaccaacggcaaccactggtggaactggatcagacaggtgagcggcagcaagctggagtggatcggctacatcagcagcagcggcagcaccgacagcaaccccagcctgaagagcagaatcagcatcaccagagacaccagcaagaaccagctgttcctgcagctgaacagcgtgaccaccgaggacatcgccacctactactgcgccagaggctactacttcgactactggggccagggcaccaccctgaccgtgagcagcacgcgtgaggacctgaagaacgtgttcccacctgaggtggccgtgttcgagcctagcgaggccgagatcagccacacccagaaagccaccctcgtgtgcctggctaccggcttctaccccgaccatgtggaactgtcttggtgggtcaacggcaaagaggtgcacagcggcgtgtgtaccgacccccagccactgaaagaacagcccgccctgaacgacagccggtactgcctgagcagcagactgagagtgtccgccaccttctggcagaacccccggaaccacttcagatgccaggtgcagttctacggcctgagcgagaacgacgagtggacccaggacagagccaagcccgtgacccagatcgtgtctgccgaagcctggggcagagccgattgcggctttaccagcgagagctaccagcagggcgtgctgagcgccaccatcctgtacgagatcctgctgggcaaggccaccctgtacgccgtgctggtgtctgccctggtgctgatggctatggtcaagcggaaggacagccgggga

SEQ ID NO: 2078 - DNA, 2277 bp, Artificial Sequence
  Synthetic Polynucloetide
atggccttaccagtgaccgccttgctcctgccgctggccttgctgctccacgccgccaggccggaagtgcagctggttgaatctggcggaggactggttcagcctggcggatctctgagactgtcttgtgccgccagcggcttcagcttcagcgacttttggatgagctgggtccgacaggcccctggcaaaggacttgaatgggtcgccacaatcagccaggccggcagcgagaaggactacgtggactctgtgaagggcagattcaccatcagccgggacaacgccaagaagtccctgtacctccagatgaacagcctgagagccgaggacaccgccgtgtactattgtgcctctggcgtgtacagcttcgactacagaggccagggcaccctggtcacagtctcttctggtaccggcggaggcggatctggcggcggaggtagcggtggcggaggatctgaattcgacatccagatgacccagagccccagcagcctgtctgccagcgtgggcgacagagtgaccatcacctgtagagccagccaggacgtgaacaccgccgtggcctggtatcagcagaagcctggcaaggcccccaagctgctgatctacagcgccagcttcctggaaagcggcgtgcccagcagattcagcggaagcagaagcggcaccgacttcaccctgaccatcagctccctccagcccgaggacttcgccacctactactgccagcagcactacaccacccctcccaccttcggccagaccaaggtggaaatcaagagactcgagatccagaaccctgatcctgccgtgtaccagctgcgggatagcaagagcagcgacaagagcgtgtgtctgttcaccgacttcgacagccagaccaacgtgtcccagagcaaggactccgacgtgtacatcaccgataagtgcgtgctggacatgcggagcatggacttcaagagcaactccgccgtggcctggtccaacaagtccgatttcgcctgcgccaacgccttcaacaacagcattatccccgaggacacattcttcccaagccccgagagcagctgcgacgtgaagctggtggaaaagagcttcgagacagacaccaacctgaacttccagaacctgagcgtgatcggcttcagaatcctgctgctgaaagtggccggctttaacctgctgatgaccctgcggctgtggtccagccgcgccaagagaagcggatctggcgtgaagcagaccctgaatttcgacctgctgaagctggctggcgacgtggaatccaacccaggccctactagtatggactggatttggcgcatccttttccttgtcggcgctgctaccggcgcgcattccttcgaagaagtgcaactggtggaatctggcggcggactggtgcagcctggcggatctctgagactgagctgtgccgccagcggcttcaacatcaaggacacctacatccactgggtgcgccaggcccctggaaagggactggaatgggtggcccggatctaccccaccaacggctacaccagatacgccgacagcgtgaagggccggttcaccatcagcgccgacaccagcaagaataccgcctacctccagatgaacagcctgcgggccgaggataccgccgtgtactactgctcaagatggggaggcgacggcttctacgctatggacgtgtggggccagggcacccttgtgaccgtgtcatctacgcgtgaggacctgaagaacgtgttcccacctgaggtggccgtgttcgagcctagcgaggccgagatcagccacacccagaaagccaccctcgtgtgcctggctaccggcttctaccccgaccatgtggaactgtcttggtgggtcaacggcaaagaggtgcacagcggcgtgtgtaccgacccccagccactgaaagaacagcccgccctgaacgacagccggtactgcctgagcagcagactgagagtgtccgccaccttctggcagaacccccggaaccacttcagatgccaggtgcagttctacggcctgagcgagaacgacgagtggacccaggacagagccaagcccgtgacccagatcgtgtctgccgaagcctggggcagagccgattgcggctttaccagcgagagctaccagcagggcgtgctgagcgccaccatcctgtacgagatcctgctgggcaaggccaccctgtacgccgtgctggtgtctgccctggtgctgatggctatggtcaagcggaaggacagccgggga

SEQ ID NO: 2079 - DNA, 2274 bp, Artificial Sequence
  Synthetic Polynucloetide
atggccttaccagtgaccgccttgctcctgccgctggccttgctgctccacgccgccaggccggaagtgcagctggttgaatctggcggaggactggttcagcctggcggatctctgagactgtcttgtgccgccagcggcttcagcttcagcgacttttggatgagctgggtccgacaggcccctggcaaaggacttgaatgggtcgccacaatcagccaggccggcagcgagaaggactacgtggactctgtgaagggcagattcaccatcagccgggacaacgccaagaagtccctgtacctccagatgaacagcctgagagccgaggacaccgccgtgtactattgtgcctctggcgtgtacagcttcgactacagaggccagggcaccctggtcacagtctcttctggtaccggcggaggcggatctggcggcggaggtagcggtggcggaggatctgaattcgaccagagcgtgctgacacagcctcctagcgtgtcagtggcccctggcaagaccgccagaatcccctgcgagggcaactacatcggcagcagcaacgtgcactggtatcagcagaagcccggccaggctcccgtgctcgtgatccacttcgacagcgacagacccagcggcatccccgacagattcagcggcagcaacagcggcaacatggctaccctgaccatcagcagagtggaagccggggacgaggccgactactactgtcaagtgtgggagaaccacggctgggtgttcggcggaggcaccaagctgacagtgctgtctctcgagatccagaaccctgatcctgccgtgtaccagctgcgggatagcaagagcagcgacaagagcgtgtgtctgttcaccgacttcgacagccagaccaacgtgtcccagagcaaggactccgacgtgtacatcaccgataagtgcgtgctggacatgcggagcatggacttcaagagcaactccgccgtggcctggtccaacaagtccgatttcgcctgcgccaacgccttcaacaacagcattatccccgaggacacattcttcccaagccccgagagcagctgcgacgtgaagctggtggaaaagagcttcgagacagacaccaacctgaacttccagaacctgagcgtgatcggcttcagaatcctgctgctgaaagtggccggctttaacctgctgatgaccctgcggctgtggtccagccgcgccaagagaagcggatctggcgtgaagcagaccctgaatttcgacctgctgaagctggctggcgacgtggaatccaacccaggccctactagtatggactggatttggcgcatccttttccttgtcggcgctgctaccggcgcgcattccttcgaagaggtgcaactggtggaaacaggcggcggactggtgcagcctggcgagtctctgagactgagctgtgccgccagcggcttcaccttcagcgactacgagatgaactgggtgcgccaggcccctggaaagggcctggaatgggtgtcctacatcagcagctccggcagcaccatctactacgccgacagcgtgaagggccggtttaccatctaccgggacaacgccaagaacagcctgtacctccagatgaactccctgcgggccgaggacaccgccctgtactattgtgccagagcctggggcgtgggaccccctgattattggggacagggcaccctcgtgaccgtgtcctctacgcgtgaggacctgaagaacgtgttcccacctgaggtggccgtgttcgagcctagcgaggccgagatcagccacacccagaaagccaccctcgtgtgcctggctaccggcttctaccccgaccatgtggaactgtcttggtgggtcaacggcaaagaggtgcacagcggcgtgtgtaccgacccccagccactgaaagaacagcccgccctgaacgacagccggtactgcctgagcagcagactgagagtgtccgccaccttctggcagaacccccggaaccacttcagatgccaggtgcagttctacggcctgagcgagaacgacgagtggacccaggacagagccaagcccgtgacccagatcgtgtctgccgaagcctggggcagagccgattgcggctttaccagcgagagctaccagcagggcgtgctgagcgccaccatcctgtacgagatcctgctgggcaaggccaccctgtacgccgtgctggtgtctgccctggtgctgatggctatggtcaagcggaaggacagccgggga

SEQ ID NO: 2080 - DNA, 2298 bp, Artificial Sequence
  Synthetic Polynucloetide
atggccttaccagtgaccgccttgctcctgccgctggccttgctgctccacgccgccaggccggaagtgcagctggttgaatctggcggaggactggttcagcctggcggatctctgagactgtcttgtgccgccagcggcttcagcttcagcgacttttggatgagctgggtccgacaggcccctggcaaaggacttgaatgggtcgccacaatcagccaggccggcagcgagaaggactacgtggactctgtgaagggcagattcaccatcagccgggacaacgccaagaagtccctgtacctccagatgaacagcctgagagccgaggacaccgccgtgtactattgtgcctctggcgtgtacagcttcgactacagaggccagggcaccctggtcacagtctcttctggtaccggcggaggcggatctggcggcggaggtagcggtggcggaggatctgaattcgacatccagatgacccagagccccagcagcctgtctgccagcgtgggcgataccgtgaccatcacctgtcaggccaacggctacctgaactggtatcagcagcggagaggcaaggcccccaagctgctgatctacgacggcagcaagctggaaagaggcgtgcccagcagattcagcggcagaagatggggccaggagtacaacctgaccatcaacaacctccagcccgaggatattgccacatacttttgccaggtgtacgagttcgtggtgcccggcacacggctggacctgaagagaacagtggctgctcctctcgagatccagaaccctgatcctgccgtgtaccagctgcgggatagcaagagcagcgacaagagcgtgtgtctgttcaccgacttcgacagccagaccaacgtgtcccagagcaaggactccgacgtgtacatcaccgataagtgcgtgctggacatgcggagcatggacttcaagagcaactccgccgtggcctggtccaacaagtccgatttcgcctgcgccaacgccttcaacaacagcattatccccgaggacacattcttcccaagccccgagagcagctgcgacgtgaagctggtggaaaagagcttcgagacagacaccaacctgaacttccagaacctgagcgtgatcggcttcagaatcctgctgctgaaagtggccggctttaacctgctgatgaccctgcggctgtggtccagccgcgccaagagaagcggatctggcgtgaagcagaccctgaatttcgacctgctgaagctggctggcgacgtggaatccaacccaggccctactagtatggactggatttggcgcatccttttccttgtcggcgctgctaccggcgcgcattccttcgaacaggtgcagctgctccagtctggcgctgccgtgacaaagcctggcgcttctgtgcgggtgtcctgtgaagccagcggctacaacatccgggactacttcatccactggtggcggcaggctccaggccagggactccagtgggtgggatggatcaaccccaagaccggccagcccaacaaccccagacagttccagggcagagtgtccctgaccagacacgccagctgggacttcgacaccttcagcttctacatggatctgaaggccctgcggagcgacgataccgccgtgtacttctgcgccagacagagaagcgactactgggatttcgacgtgtggggcagcggcacccaagtgacagtgtctagcgccagcaccaagggacccacgcgtgaggacctgaagaacgtgttcccacctgaggtggccgtgttcgagcctagcgaggccgagatcagccacacccagaaagccaccctcgtgtgcctggctaccggcttctaccccgaccatgtggaactgtcttggtgggtcaacggcaaagaggtgcacagcggcgtgtgtaccgacccccagccactgaaagaacagcccgccctgaacgacagccggtactgcctgagcagcagactgagagtgtccgccaccttctggcagaacccccggaaccacttcagatgccaggtgcagttctacggcctgagcgagaacgacgagtggacccaggacagagccaagcccgtgacccagatcgtgtctgccgaagcctggggcagagccgattgcggctttaccagcgagagctaccagcagggcgtgctgagcgccaccatcctgtacgagatcctgctgggcaaggccaccctgtacgccgtgctggtgtctgccctggtgctgatggctatggtcaagcggaaggacagccgggga

SEQ ID NO: 2081 - DNA, 2316 bp, Artificial Sequence
  Synthetic Polynucloetide
atggccttaccagtgaccgccttgctcctgccgctggccttgctgctccacgccgccaggccggaagtgcagctggttgaatctggcggaggactggttcagcctggcggatctctgagactgtcttgtgccgccagcggcttcagcttcagcgacttttggatgagctgggtccgacaggcccctggcaaaggacttgaatgggtcgccacaatcagccaggccggcagcgagaaggactacgtggactctgtgaagggcagattcaccatcagccgggacaacgccaagaagtccctgtacctccagatgaacagcctgagagccgaggacaccgccgtgtactattgtgcctctggcgtgtacagcttcgactacagaggccagggcaccctggtcacagtctcttctggtaccggcggaggcggatctggcggcggaggtagcggtggcggaggatctgaattccagtctgccctgacacagcctcctagcgcctctggctctcccggccagagcatcaccatcagctgtaccggcaccagcaacaacttcgtgtcctggtatcagcagcacgccggcaaggcccccaagctcgtgatctacgacgtgaacaagcggcccagcggcgtgcccgatagattcagcggcagcaagagcggcaacaccgccagcctgacagtgtctggcctccagaccgatgacgaggccgtgtactactgcggcagcctcgtgggcaactgggacgtgatctttggcggaggcaccaagctgaccgtgctgctcgagatccagaaccctgatcctgccgtgtaccagctgcgggatagcaagagcagcgacaagagcgtgtgtctgttcaccgacttcgacagccagaccaacgtgtcccagagcaaggactccgacgtgtacatcaccgataagtgcgtgctggacatgcggagcatggacttcaagagcaactccgccgtggcctggtccaacaagtccgatttcgcctgcgccaacgccttcaacaacagcattatccccgaggacacattcttcccaagccccgagagcagctgcgacgtgaagctggtggaaaagagcttcgagacagacaccaacctgaacttccagaacctgagcgtgatcggcttcagaatcctgctgctgaaagtggccggctttaacctgctgatgaccctgcggctgtggtccagccgcgccaagagaagcggatctggcgtgaagcagaccctgaatttcgacctgctgaagctggctggcgacgtggaatccaacccaggccctactagtatggactggatttggcgcatccttttccttgtcggcgctgctaccggcgcgcattccttcgaacagccccagctccaggaatctggccccacactggtggaagccagcgagacactgagcctgacctgtgccgtgtccggcgattctaccgccgcctgcaatagcttctggggctgggtgcgccagcctcctggaaagggactggaatgggtgggaagcctgagccactgcgccagctattggaaccggggctggacctaccacaaccccagcctgaagtccagactgaccctggccctggacacccccaagaacctggtgttcctgaagctgaacagcgtgacagccgccgacaccgccacctactactgtgccagatttggcggcgaggtgctgcggtacaccgactggcctaaacctgcctgggtggacctgtggggcagaggaacactcgtgaccgtgtccagcacgcgtgaggacctgaagaacgtgttcccacctgaggtggccgtgttcgagcctagcgaggccgagatcagccacacccagaaagccaccctcgtgtgcctggctaccggcttctaccccgaccatgtggaactgtcttggtgggtcaacggcaaagaggtgcacagcggcgtgtgtaccgacccccagccactgaaagaacagcccgccctgaacgacagccggtactgcctgagcagcagactgagagtgtccgccaccttctggcagaacccccggaaccacttcagatgccaggtgcagttctacggcctgagcgagaacgacgagtggacccaggacagagccaagcccgtgacccagatcgtgtctgccgaagcctggggcagagccgattgcggctttaccagcgagagctaccagcagggcgtgctgagcgccaccatcctgtacgagatcctgctgggcaaggccaccctgtacgccgtgctggtgtctgccctggtgctgatggctatggtcaagcggaaggacagccgggga

SEQ ID NO: 2082 - DNA, 2271 bp, Artificial Sequence
  Synthetic Polynucloetide
atggccttaccagtgaccgccttgctcctgccgctggccttgctgctccacgccgccaggccggaagtgcagctggttgaatctggcggaggactggttcagcctggcggatctctgagactgtcttgtgccgccagcggcttcagcttcagcgacttttggatgagctgggtccgacaggcccctggcaaaggacttgaatgggtcgccacaatcagccaggccggcagcgagaaggactacgtggactctgtgaagggcagattcaccatcagccgggacaacgccaagaagtccctgtacctccagatgaacagcctgagagccgaggacaccgccgtgtactattgtgcctctggcgtgtacagcttcgactacagaggccagggcaccctggtcacagtctcttctggtaccggcggaggcggatctggcggcggaggtagcggtggcggaggatctgaattcgagatcgtgctgacacagagccctggcaccctgagcctgtctccaggcgagacagccatcatcagctgccggacaagccagtacggcagcctggcctggtatcagcagaggccaggacaggcccccagactcgtgatctacagcggcagcacaagagccgccggaatccccgatagattcagcggctccagatggggacccgactacaacctgaccatcagcaacctggaaagcggcgacttcggcgtgtactactgccagcagtacgagttcttcggccagggcaccaaggtgcaggtggacatcaaaagactcgagatccagaaccctgatcctgccgtgtaccagctgcgggatagcaagagcagcgacaagagcgtgtgtctgttcaccgacttcgacagccagaccaacgtgtcccagagcaaggactccgacgtgtacatcaccgataagtgcgtgctggacatgcggagcatggacttcaagagcaactccgccgtggcctggtccaacaagtccgatttcgcctgcgccaacgccttcaacaacagcattatccccgaggacacattcttcccaagccccgagagcagctgcgacgtgaagctggtggaaaagagcttcgagacagacaccaacctgaacttccagaacctgagcgtgatcggcttcagaatcctgctgctgaaagtggccggctttaacctgctgatgaccctgcggctgtggtccagccgcgccaagagaagcggatctggcgtgaagcagaccctgaatttcgacctgctgaagctggctggcgacgtggaatccaacccaggccctactagtatggactggatttggcgcatccttttccttgtcggcgctgctaccggcgcgcattccttcgaacaggtgcagctggtgcagtctggcggccagatgaagaaacccggcgagagcatgagaatcagctgtcgggcctccggctacgagttcatcgactgcaccctgaactggatcagactggcccctggcaagcggcctgagtggatgggatggctgaagcctagaggcggagccgtgaactacgccagacctctccagggcagagtgaccatgaccagggacgtgtacagcgataccgccttcctggaactgcggagcctgaccgtggatgataccgccgtgtacttctgcaccagaggcaagaactgcgattacaactgggacttcgagcactggggcagaggcacccctgtgatcgtgtctagcacgcgtgaggacctgaagaacgtgttcccacctgaggtggccgtgttcgagcctagcgaggccgagatcagccacacccagaaagccaccctcgtgtgcctggctaccggcttctaccccgaccatgtggaactgtcttggtgggtcaacggcaaagaggtgcacagcggcgtgtgtaccgacccccagccactgaaagaacagcccgccctgaacgacagccggtactgcctgagcagcagactgagagtgtccgccaccttctggcagaacccccggaaccacttcagatgccaggtgcagttctacggcctgagcgagaacgacgagtggacccaggacagagccaagcccgtgacccagatcgtgtctgccgaagcctggggcagagccgattgcggctttaccagcgagagctaccagcagggcgtgctgagcgccaccatcctgtacgagatcctgctgggcaaggccaccctgtacgccgtgctggtgtctgccctggtgctgatggctatggtcaagcggaaggacagccgggga

SEQ ID NO: 2083 - DNA, 2301 bp, Artificial Sequence
  Synthetic Polynucloetide
atggccttaccagtgaccgccttgctcctgccgctggccttgctgctccacgccgccaggccggaagtgcagctggttgaatctggcggaggactggttcagcctggcggatctctgagactgtcttgtgccgccagcggcttcagcttcagcgacttttggatgagctgggtccgacaggcccctggcaaaggacttgaatgggtcgccacaatcagccaggccggcagcgagaaggactacgtggactctgtgaagggcagattcaccatcagccgggacaacgccaagaagtccctgtacctccagatgaacagcctgagagccgaggacaccgccgtgtactattgtgcctctggcgtgtacagcttcgactacagaggccagggcaccctggtcacagtctcttctggtaccggcggaggcggatctggcggcggaggtagcggtggcggaggatctgaattcgagctggtgctgacacagagccctggcaccctgtctctgtctgccggcgaaagagccaccctgagctgtagagccagccagagcgtgtcctctggcagcctggcttggtatcagcagaagccaggccaggcccccagactgctgatctacggcgcttctaccagagccaccggcatccccgatagattcagcggctctggctccggcaccgacttcaccctgacaatcggcagactggaacccgaggacctggccgtgtactactgccagcagtacggcaccagcccctacacattcggccagggcaccaagctggaaatcctcgagatccagaaccctgatcctgccgtgtaccagctgcgggatagcaagagcagcgacaagagcgtgtgtctgttcaccgacttcgacagccagaccaacgtgtcccagagcaaggactccgacgtgtacatcaccgataagtgcgtgctggacatgcggagcatggacttcaagagcaactccgccgtggcctggtccaacaagtccgatttcgcctgcgccaacgccttcaacaacagcattatccccgaggacacattcttcccaagccccgagagcagctgcgacgtgaagctggtggaaaagagcttcgagacagacaccaacctgaacttccagaacctgagcgtgatcggcttcagaatcctgctgctgaaagtggccggctttaacctgctgatgaccctgcggctgtggtccagccgcgccaagagaagcggatctggcgtgaagcagaccctgaatttcgacctgctgaagctggctggcgacgtggaatccaacccaggccctactagtatggactggatttggcgcatccttttccttgtcggcgctgctaccggcgcgcattccttcgaactggaacagagcggagccgaagtgaagaaacccggcagcagcgtgcaggtgtcctgcaaagcaagcggcggcaccttctctatgtacggcttcaactgggtgcgccaggctcctggacacggcctggaatggatgggcggcatcatccccatcttcggcacctccaactacgcccagaaattccggggcagagtgaccttcaccgccgaccaggccacaagcaccgcctacatggaactgaccaacctgcggagcgacgacaccgccgtgtattattgcgccagagacttcggccccgactgggaggatggcgacagctacgatggcagcggcagaggcttcttcgacttctggggccagggaacccttgtgaccgtgtcctcaacgcgtgaggacctgaagaacgtgttcccacctgaggtggccgtgttcgagcctagcgaggccgagatcagccacacccagaaagccaccctcgtgtgcctggctaccggcttctaccccgaccatgtggaactgtcttggtgggtcaacggcaaagaggtgcacagcggcgtgtgtaccgacccccagccactgaaagaacagcccgccctgaacgacagccggtactgcctgagcagcagactgagagtgtccgccaccttctggcagaacccccggaaccacttcagatgccaggtgcagttctacggcctgagcgagaacgacgagtggacccaggacagagccaagcccgtgacccagatcgtgtctgccgaagcctggggcagagccgattgcggctttaccagcgagagctaccagcagggcgtgctgagcgccaccatcctgtacgagatcctgctgggcaaggccaccctgtacgccgtgctggtgtctgccctggtgctgatggctatggtcaagcggaaggacagccgggga

SEQ ID NO: 2084 - DNA, 2241 bp, Artificial Sequence
  Synthetic Polynucloetide
atggccttaccagtgaccgccttgctcctgccgctggccttgctgctccacgccgccaggccggaagtgcagctggttgaatctggcggaggactggttcagcctggcggatctctgagactgtcttgtgccgccagcggcttcagcttcagcgacttttggatgagctgggtccgacaggcccctggcaaaggacttgaatgggtcgccacaatcagccaggccggcagcgagaaggactacgtggactctgtgaagggcagattcaccatcagccgggacaacgccaagaagtccctgtacctccagatgaacagcctgagagccgaggacaccgccgtgtactattgtgcctctggcgtgtacagcttcgactacagaggccagggcaccctggtcacagtctcttctggtaccggcggaggcggatctggcggcggaggtagcggtggcggaggatctgaattcgacatccagatgacccagagccccagcagcctgtctgccagcgtgggcgacagagtgaccatcacctgtcaggccagccaggacatcaacaactacctgaactggtatcagcagaagcccggcaaggcccccaagctgctgatctacgacgccagcaatctgcagaccggcgtgcccagcagattttccggctctggcagcggcaccgacttcaccttcaccatcgaggacattgccacctactactgccagcagtacaccttcggccctggcaccaaggtggacatcaaactcgagatccagaaccctgatcctgccgtgtaccagctgcgggatagcaagagcagcgacaagagcgtgtgtctgttcaccgacttcgacagccagaccaacgtgtcccagagcaaggactccgacgtgtacatcaccgataagtgcgtgctggacatgcggagcatggacttcaagagcaactccgccgtggcctggtccaacaagtccgatttcgcctgcgccaacgccttcaacaacagcattatccccgaggacacattcttcccaagccccgagagcagctgcgacgtgaagctggtggaaaagagcttcgagacagacaccaacctgaacttccagaacctgagcgtgatcggcttcagaatcctgctgctgaaagtggccggctttaacctgctgatgaccctgcggctgtggtccagccgcgccaagagaagcggatctggcgtgaagcagaccctgaatttcgacctgctgaagctggctggcgacgtggaatccaacccaggccctactagtatggactggatttggcgcatccttttccttgtcggcgctgctaccggcgcgcattccttcgaagaagtgcaactgctggaatctggcggcggactggtgcagcctggcggatctctgagactgagctgtgccgccagcggcttcacctttagctggtacagcatgacctgggtgcgccaggcccctggcaaaggactggaatgggtgtccagcatcgtgccctggggcgatttcacccagtacgccgatagcgtgaagggccggttcaccatcagccgggacaacagcaagaacaccctgtacctgcagatgaacagcctgcgggccgaggacaccgccgtgtactattgtgccaagggacctggctggggcagcttcgatctgtggggcagaggaacccttgtgaccgtgtccagcacgcgtgaggacctgaagaacgtgttcccacctgaggtggccgtgttcgagcctagcgaggccgagatcagccacacccagaaagccaccctcgtgtgcctggctaccggcttctaccccgaccatgtggaactgtcttggtgggtcaacggcaaagaggtgcacagcggcgtgtgtaccgacccccagccactgaaagaacagcccgccctgaacgacagccggtactgcctgagcagcagactgagagtgtccgccaccttctggcagaacccccggaaccacttcagatgccaggtgcagttctacggcctgagcgagaacgacgagtggacccaggacagagccaagcccgtgacccagatcgtgtctgccgaagcctggggcagagccgattgcggctttaccagcgagagctaccagcagggcgtgctgagcgccaccatcctgtacgagatcctgctgggcaaggccaccctgtacgccgtgctggtgtctgccctggtgctgatggctatggtcaagcggaaggacagccgggga

SEQ ID NO: 2085 - DNA, 2271 bp, Artificial Sequence
  Synthetic Polynucloetide
atggccttaccagtgaccgccttgctcctgccgctggccttgctgctccacgccgccaggccggaagtgcagctggttgaatctggcggaggactggttcagcctggcggatctctgagactgtcttgtgccgccagcggcttcagcttcagcgacttttggatgagctgggtccgacaggcccctggcaaaggacttgaatgggtcgccacaatcagccaggccggcagcgagaaggactacgtggactctgtgaagggcagattcaccatcagccgggacaacgccaagaagtccctgtacctccagatgaacagcctgagagccgaggacaccgccgtgtactattgtgcctctggcgtgtacagcttcgactacagaggccagggcaccctggtcacagtctcttctggtaccggcggaggcggatctggcggcggaggtagcggtggcggaggatctgaattcgacatccagatgacccagagccccagcagcctgtctgccagcgtgggcgacagagtgaccatcacctgtaccgccagcctgagcgtgtccagcacctacctgcactggtatcagcagaagcccggcagcagccccaagctgtggatctacagcaccagcaacctggcctccggcgtgcccagcagattttctggcagcggctctggcaccagctacaccctgaccatcagctccctccagcccgaggacttcgccacctactactgccaccagtaccacagaagccccctgacctttggcggaggcaccaaggtggaaatcaagagactcgagatccagaaccctgatcctgccgtgtaccagctgcgggatagcaagagcagcgacaagagcgtgtgtctgttcaccgacttcgacagccagaccaacgtgtcccagagcaaggactccgacgtgtacatcaccgataagtgcgtgctggacatgcggagcatggacttcaagagcaactccgccgtggcctggtccaacaagtccgatttcgcctgcgccaacgccttcaacaacagcattatccccgaggacacattcttcccaagccccgagagcagctgcgacgtgaagctggtggaaaagagcttcgagacagacaccaacctgaacttccagaacctgagcgtgatcggcttcagaatcctgctgctgaaagtggccggctttaacctgctgatgaccctgcggctgtggtccagccgcgccaagagaagcggatctggcgtgaagcagaccctgaatttcgacctgctgaagctggctggcgacgtggaatccaacccaggccctactagtatggactggatttggcgcatccttttccttgtcggcgctgctaccggcgcgcattccttcgaagaagtgcaactggtggaatctggcggcggactggtgcagcctggcggatctctgagactgagctgtgccgccagcggcttcagcctgaccaaatacggcgtgcactgggtgcgccaggcccctggaaaaggactggaatgggtgggagtgaagtgggctggcggctccaccgactacaacagcgccctgatgagccggttcaccatcagcaaggacaacgccaagaacagcctgtacctccagatgaactccctgcgggccgaggacaccgccgtgtactactgtgccagagatcaccgggacgctatggactactggggccagggaacactcgtgaccgtgtcctctacgcgtgaggacctgaagaacgtgttcccacctgaggtggccgtgttcgagcctagcgaggccgagatcagccacacccagaaagccaccctcgtgtgcctggctaccggcttctaccccgaccatgtggaactgtcttggtgggtcaacggcaaagaggtgcacagcggcgtgtgtaccgacccccagccactgaaagaacagcccgccctgaacgacagccggtactgcctgagcagcagactgagagtgtccgccaccttctggcagaacccccggaaccacttcagatgccaggtgcagttctacggcctgagcgagaacgacgagtggacccaggacagagccaagcccgtgacccagatcgtgtctgccgaagcctggggcagagccgattgcggctttaccagcgagagctaccagcagggcgtgctgagcgccaccatcctgtacgagatcctgctgggcaaggccaccctgtacgccgtgctggtgtctgccctggtgctgatggctatggtcaagcggaaggacagccgggga

SEQ ID NO: 2086 - DNA, 2283 bp, Artificial Sequence
  Synthetic Polynucloetide
atggccttaccagtgaccgccttgctcctgccgctggccttgctgctccacgccgccaggccggaagtgcagctggttgaatctggcggaggactggttcagcctggcggatctctgagactgtcttgtgccgccagcggcttcagcttcagcgacttttggatgagctgggtccgacaggcccctggcaaaggacttgaatgggtcgccacaatcagccaggccggcagcgagaaggactacgtggactctgtgaagggcagattcaccatcagccgggacaacgccaagaagtccctgtacctccagatgaacagcctgagagccgaggacaccgccgtgtactattgtgcctctggcgtgtacagcttcgactacagaggccagggcaccctggtcacagtctcttctggtaccggcggaggcggatctggcggcggaggtagcggtggcggaggatctgaattcgacatccagatgacccagagccccagcagcctgtctgccagcgtgggcgacagagtgaccatcacatgcaaggccagccaggacgtgggaacagccgtggcctggtatcagcagaagcctggcaaggcccccaagctgctgatctacagcgccagctacagatccaccggcgtgcccagcagattttccggctctggcagcggcaccgacttcaccctgaccatctctagcctccagcccgaggacttcgccacctactactgccagcaccactactccgccccctggacatttggcggaggcaccaaggtggaaatcaagctcgagatccagaaccctgatcctgccgtgtaccagctgcgggatagcaagagcagcgacaagagcgtgtgtctgttcaccgacttcgacagccagaccaacgtgtcccagagcaaggactccgacgtgtacatcaccgataagtgcgtgctggacatgcggagcatggacttcaagagcaactccgccgtggcctggtccaacaagtccgatttcgcctgcgccaacgccttcaacaacagcattatccccgaggacacattcttcccaagccccgagagcagctgcgacgtgaagctggtggaaaagagcttcgagacagacaccaacctgaacttccagaacctgagcgtgatcggcttcagaatcctgctgctgaaagtggccggctttaacctgctgatgaccctgcggctgtggtccagccgcgccaagagaagcggatctggcgtgaagcagaccctgaatttcgacctgctgaagctggctggcgacgtggaatccaacccaggccctactagtatggactggatttggcgcatccttttccttgtcggcgctgctaccggcgcgcattccttcgaagaagtgcaactggtggaatcaggcggcggactggtgcagcctggcggatctctgagactgagctgtgccgccagcggcttcaccttcagcagaaacggcatgagctgggtgcgccaggcccctggaaaaggactggaatgggtggcaaccgtgtccagcggcggcagctacatctactacgccgacagcgtgaagggccggttcaccatctccagagacaacgccaagaacagcctgtacctccagatgaactccctgcgggccgaggacaccgccgtgtactattgtgccagacagggcaccaccgccctggctaccagattcttcgatgtgtggggccagggcaccctcgtgaccgtgtcatctacgcgtgaggacctgaagaacgtgttcccacctgaggtggccgtgttcgagcctagcgaggccgagatcagccacacccagaaagccaccctcgtgtgcctggctaccggcttctaccccgaccatgtggaactgtcttggtgggtcaacggcaaagaggtgcacagcggcgtgtgtaccgacccccagccactgaaagaacagcccgccctgaacgacagccggtactgcctgagcagcagactgagagtgtccgccaccttctggcagaacccccggaaccacttcagatgccaggtgcagttctacggcctgagcgagaacgacgagtggacccaggacagagccaagcccgtgacccagatcgtgtctgccgaagcctggggcagagccgattgcggctttaccagcgagagctaccagcagggcgtgctgagcgccaccatcctgtacgagatcctgctgggcaaggccaccctgtacgccgtgctggtgtctgccctggtgctgatggctatggtcaagcggaaggacagccgggga

SEQ ID NO: 2087 - DNA, 2271 bp, Artificial Sequence
  Synthetic Polynucloetide
atggccttaccagtgaccgccttgctcctgccgctggccttgctgctccacgccgccaggccggaagtgcagctggttgaatctggcggaggactggttcagcctggcggatctctgagactgtcttgtgccgccagcggcttcagcttcagcgacttttggatgagctgggtccgacaggcccctggcaaaggacttgaatgggtcgccacaatcagccaggccggcagcgagaaggactacgtggactctgtgaagggcagattcaccatcagccgggacaacgccaagaagtccctgtacctccagatgaacagcctgagagccgaggacaccgccgtgtactattgtgcctctggcgtgtacagcttcgactacagaggccagggcaccctggtcacagtctcttctggtaccggcggaggcggatctggcggcggaggtagcggtggcggaggatctgaattcgacatccagatgacccagagcccccctagcctgtctgcctctgtgggcggcaaagtgaccatcacatgcaaggccagccaggacatcgaccgctacatggcctggtatcaggacaagcccggcaagggacccaagctgctgatccacgataccagcaccctccagcccggcatccccagcagattttctggcagcggctccggcagagactacagcttcagcatcagcaacctggaacccgaggacattgccacctactactgcctccagtacgacaacctgtggaccttcggcggaggcaccaagctggaaatcaagagactcgagatccagaaccctgatcctgccgtgtaccagctgcgggatagcaagagcagcgacaagagcgtgtgtctgttcaccgacttcgacagccagaccaacgtgtcccagagcaaggactccgacgtgtacatcaccgataagtgcgtgctggacatgcggagcatggacttcaagagcaactccgccgtggcctggtccaacaagtccgatttcgcctgcgccaacgccttcaacaacagcattatccccgaggacacattcttcccaagccccgagagcagctgcgacgtgaagctggtggaaaagagcttcgagacagacaccaacctgaacttccagaacctgagcgtgatcggcttcagaatcctgctgctgaaagtggccggctttaacctgctgatgaccctgcggctgtggtccagccgcgccaagagaagcggatctggcgtgaagcagaccctgaatttcgacctgctgaagctggctggcgacgtggaatccaacccaggccctactagtatggactggatttggcgcatccttttccttgtcggcgctgctaccggcgcgcattccttcgaacaggtgcaactggtgcagagcggagccgagcttgtgaagcctggcgcttccgtgaagatgagctgcaaagccagcggctacatcttcaccaactacaacatccactgggtcaagaagtccccaggccagggcctggaatggatcggagccatctaccccggaaacggcgacgccccttacagccagaagttccaggacagagccaccctgaccgccgacaccagcagcagcaccacctacatggaactgagcagcctgaccagcgaggacagcgccgtgtactattgcgtgcgggccaactgggatgtggccttcgcctattggggccagggcacactggtgtccgtgtcctctacgcgtgaggacctgaagaacgtgttcccacctgaggtggccgtgttcgagcctagcgaggccgagatcagccacacccagaaagccaccctcgtgtgcctggctaccggcttctaccccgaccatgtggaactgtcttggtgggtcaacggcaaagaggtgcacagcggcgtgtgtaccgacccccagccactgaaagaacagcccgccctgaacgacagccggtactgcctgagcagcagactgagagtgtccgccaccttctggcagaacccccggaaccacttcagatgccaggtgcagttctacggcctgagcgagaacgacgagtggacccaggacagagccaagcccgtgacccagatcgtgtctgccgaagcctggggcagagccgattgcggctttaccagcgagagctaccagcagggcgtgctgagcgccaccatcctgtacgagatcctgctgggcaaggccaccctgtacgccgtgctggtgtctgccctggtgctgatggctatggtcaagcggaaggacagccgggga

SEQ ID NO: 2088 - DNA, 2274 bp, Artificial Sequence
  Synthetic Polynucloetide
atggccttaccagtgaccgccttgctcctgccgctggccttgctgctccacgccgccaggccggaagtgcagctggttgaatctggcggaggactggttcagcctggcggatctctgagactgtcttgtgccgccagcggcttcagcttcagcgacttttggatgagctgggtccgacaggcccctggcaaaggacttgaatgggtcgccacaatcagccaggccggcagcgagaaggactacgtggactctgtgaagggcagattcaccatcagccgggacaacgccaagaagtccctgtacctccagatgaacagcctgagagccgaggacaccgccgtgtactattgtgcctctggcgtgtacagcttcgactacagaggccagggcaccctggtcacagtctcttctggtaccggcggaggcggatctggcggcggaggtagcggtggcggaggatctgaattcgacatccagatgacccagagccctgccagcctgtctgcctctgtgggcgagacagtgaccatcacctgtcgggtgtccggcaacatccacaactacctggcctggtatcagcagaagcagggcaagagcccccaactgctggtgtacaacgccaagaccctggccgatggcgtgcccagcagattttctggctctggcagcggcacccagtacagcctgaagatcaacagcctccagcccgaggacttcggcagctactactgccagcacttctggtccaacccctacaccttcggcggaggcaccaagctggaaatcaagctcgagatccagaaccctgatcctgccgtgtaccagctgcgggatagcaagagcagcgacaagagcgtgtgtctgttcaccgacttcgacagccagaccaacgtgtcccagagcaaggactccgacgtgtacatcaccgataagtgcgtgctggacatgcggagcatggacttcaagagcaactccgccgtggcctggtccaacaagtccgatttcgcctgcgccaacgccttcaacaacagcattatccccgaggacacattcttcccaagccccgagagcagctgcgacgtgaagctggtggaaaagagcttcgagacagacaccaacctgaacttccagaacctgagcgtgatcggcttcagaatcctgctgctgaaagtggccggctttaacctgctgatgaccctgcggctgtggtccagccgcgccaagagaagcggatctggcgtgaagcagaccctgaatttcgacctgctgaagctggctggcgacgtggaatccaacccaggccctactagtatggactggatttggcgcatccttttccttgtcggcgctgctaccggcgcgcattccttcgaacaggtgcaactccagcagtctggcgcttccgtgaaggtgtcctgcaaggccagcgaactcgtgcggcctggcacaggctacgccttcaccaattacctgatcgagtgggtcaagcagaggcccggacagggcctggaatggatcggagtgattaacccaggcagcggcggcaccaactacaacgagaagttcaagggcaaggccaccctgaccgccgacaagagcagcagcacagcctacatgcaactgagcagcctgaccagcgacgacagcgccgtgtacttctgcgcccggtacagaagctacgactggtacttcgacgtgtggggagccggcaccaccgtgacagtgtcatctacgcgtgaggacctgaagaacgtgttcccacctgaggtggccgtgttcgagcctagcgaggccgagatcagccacacccagaaagccaccctcgtgtgcctggctaccggcttctaccccgaccatgtggaactgtcttggtgggtcaacggcaaagaggtgcacagcggcgtgtgtaccgacccccagccactgaaagaacagcccgccctgaacgacagccggtactgcctgagcagcagactgagagtgtccgccaccttctggcagaacccccggaaccacttcagatgccaggtgcagttctacggcctgagcgagaacgacgagtggacccaggacagagccaagcccgtgacccagatcgtgtctgccgaagcctggggcagagccgattgcggctttaccagcgagagctaccagcagggcgtgctgagcgccaccatcctgtacgagatcctgctgggcaaggccaccctgtacgccgtgctggtgtctgccctggtgctgatggctatggtcaagcggaaggacagccgggga

SEQ ID NO: 2089 - DNA, 2271 bp, Artificial Sequence
  Synthetic Polynucloetide
atggccttaccagtgaccgccttgctcctgccgctggccttgctgctccacgccgccaggccggaagtgcagctggttgaatctggcggaggactggttcagcctggcggatctctgagactgtcttgtgccgccagcggcttcagcttcagcgacttttggatgagctgggtccgacaggcccctggcaaaggacttgaatgggtcgccacaatcagccaggccggcagcgagaaggactacgtggactctgtgaagggcagattcaccatcagccgggacaacgccaagaagtccctgtacctccagatgaacagcctgagagccgaggacaccgccgtgtactattgtgcctctggcgtgtacagcttcgactacagaggccagggcaccctggtcacagtctcttctggtaccggcggaggcggatctggcggcggaggtagcggtggcggaggatctgaattcgacatccagatgacccagagcttcagcagcctgagcgccagcgtgggcgacagagtgaccatcacctgtagagccagccaggacatcagcaactacctgaactggtatcagcagaagcccggcaaggcccccaagctgctgatctactacaccagcagactgcacagcggcgtgcccagcagattttctggcagcggctccggcaccgactacaccctgacaatcagctccctgcagcccgaggacttcgctacctacttctgtcagcaaggcaacaccctgccctggacctttggcggaggcaccaagctggaaatcaagagactcgagatccagaaccctgatcctgccgtgtaccagctgcgggatagcaagagcagcgacaagagcgtgtgtctgttcaccgacttcgacagccagaccaacgtgtcccagagcaaggactccgacgtgtacatcaccgataagtgcgtgctggacatgcggagcatggacttcaagagcaactccgccgtggcctggtccaacaagtccgatttcgcctgcgccaacgccttcaacaacagcattatccccgaggacacattcttcccaagccccgagagcagctgcgacgtgaagctggtggaaaagagcttcgagacagacaccaacctgaacttccagaacctgagcgtgatcggcttcagaatcctgctgctgaaagtggccggctttaacctgctgatgaccctgcggctgtggtccagccgcgccaagagaagcggatctggcgtgaagcagaccctgaatttcgacctgctgaagctggctggcgacgtggaatccaacccaggccctactagtatggactggatttggcgcatccttttccttgtcggcgctgctaccggcgcgcattccttcgaagaagtgcaactggtgcagtccggcggagggctggtgcagagcggaggatctctgagactgagctgcagagccagcggctacaccttcacccggtactggatgctgtgggtgcgccagaggccaggcaagggactggaatgggtggccgagatcaacccccggaacgaccggaccaactacaacgagaagttcaagacccggttcaccatcagcgtggacagaagcaagaacaccctgtacctgcagatggacagcctgcgggccgaggataccgccgtgtacttttgtgctctgggaggcggctacgctatggactactggggccagggaacccttgtgaccgtgtcctctacgcgtgaggacctgaagaacgtgttcccacctgaggtggccgtgttcgagcctagcgaggccgagatcagccacacccagaaagccaccctcgtgtgcctggctaccggcttctaccccgaccatgtggaactgtcttggtgggtcaacggcaaagaggtgcacagcggcgtgtgtaccgacccccagccactgaaagaacagcccgccctgaacgacagccggtactgcctgagcagcagactgagagtgtccgccaccttctggcagaacccccggaaccacttcagatgccaggtgcagttctacggcctgagcgagaacgacgagtggacccaggacagagccaagcccgtgacccagatcgtgtctgccgaagcctggggcagagccgattgcggctttaccagcgagagctaccagcagggcgtgctgagcgccaccatcctgtacgagatcctgctgggcaaggccaccctgtacgccgtgctggtgtctgccctggtgctgatggctatggtcaagcggaaggacagccgggga

SEQ ID NO: 2090 - DNA, 2274 bp, Artificial Sequence
  Synthetic Polynucloetide
atggccttaccagtgaccgccttgctcctgccgctggccttgctgctccacgccgccaggccggaagtgcagctggttgaatctggcggaggactggttcagcctggcggatctctgagactgtcttgtgccgccagcggcttcagcttcagcgacttttggatgagctgggtccgacaggcccctggcaaaggacttgaatgggtcgccacaatcagccaggccggcagcgagaaggactacgtggactctgtgaagggcagattcaccatcagccgggacaacgccaagaagtccctgtacctccagatgaacagcctgagagccgaggacaccgccgtgtactattgtgcctctggcgtgtacagcttcgactacagaggccagggcaccctggtcacagtctcttctggtaccggcggaggcggatctggcggcggaggtagcggtggcggaggatctgaattcgacatccagatgacacagtctccggcgtcactgtccgcctccgtgggggagactgtgactattatttgtagggcatcagttaacatctactcttatttggcctggtaccagcagaagcaaggcaagagtcctcagctgctggtgtataatgcgaagatcctggcagagggcgtgccgagccggttctccggcagcggctcaggtacccaattttccctcaagatcaattcactgcagccagaggactttggcagttactattgtcaacaccactacggcacattcactttcgggtccggtacaaaattggagattaagcgactcgagatccagaaccctgatcctgccgtgtaccagctgcgggatagcaagagcagcgacaagagcgtgtgtctgttcaccgacttcgacagccagaccaacgtgtcccagagcaaggactccgacgtgtacatcaccgataagtgcgtgctggacatgcggagcatggacttcaagagcaactccgccgtggcctggtccaacaagtccgatttcgcctgcgccaacgccttcaacaacagcattatccccgaggacacattcttcccaagccccgagagcagctgcgacgtgaagctggtggaaaagagcttcgagacagacaccaacctgaacttccagaacctgagcgtgatcggcttcagaatcctgctgctgaaagtggccggctttaacctgctgatgaccctgcggctgtggtccagccgcgccaagagaagcggatctggcgtgaagcagaccctgaatttcgacctgctgaagctggctggcgacgtggaatccaacccaggccctactagtatggactggatttggcgcatccttttccttgtcggcgctgctaccggcgcgcattccttcgaacaggtacagttgaaagaaagcgggcctggactggtagcgccttcccaatctctctccatcacgtgcaccatctctggcttctccctgacttcctatggagttcactgggtgaggcagccccccggcaagggactggaatggctggtcgtcatctggtccgacgggtccacaacctacaactccgctctgaaaagtcggctctctatttctaaagataatagcaagagccaggtgtttctgaaaatgaactctctgcagaccgatgatacggccatttactactgcgcttcacactatggctcaaccttggcattcgcttcctggggccacggaacactggtgaccgtttccgcagccacgcgtgaggacctgaagaacgtgttcccacctgaggtggccgtgttcgagcctagcgaggccgagatcagccacacccagaaagccaccctcgtgtgcctggctaccggcttctaccccgaccatgtggaactgtcttggtgggtcaacggcaaagaggtgcacagcggcgtgtgtaccgacccccagccactgaaagaacagcccgccctgaacgacagccggtactgcctgagcagcagactgagagtgtccgccaccttctggcagaacccccggaaccacttcagatgccaggtgcagttctacggcctgagcgagaacgacgagtggacccaggacagagccaagcccgtgacccagatcgtgtctgccgaagcctggggcagagccgattgcggctttaccagcgagagctaccagcagggcgtgctgagcgccaccatcctgtacgagatcctgctgggcaaggccaccctgtacgccgtgctggtgtctgccctggtgctgatggctatggtcaagcggaaggacagccgggga

SEQ ID NO: 2091 - DNA, 2298 bp, Artificial Sequence
  Synthetic Polynucloetide
atggccttaccagtgaccgccttgctcctgccgctggccttgctgctccacgccgccaggccggaagtgcagctggttgaatctggcggaggactggttcagcctggcggatctctgagactgtcttgtgccgccagcggcttcagcttcagcgacttttggatgagctgggtccgacaggcccctggcaaaggacttgaatgggtcgccacaatcagccaggccggcagcgagaaggactacgtggactctgtgaagggcagattcaccatcagccgggacaacgccaagaagtccctgtacctccagatgaacagcctgagagccgaggacaccgccgtgtactattgtgcctctggcgtgtacagcttcgactacagaggccagggcaccctggtcacagtctcttctggtaccggcggaggcggatctggcggcggaggtagcggtggcggaggatctgaattcgacattgtgatgacccagtctcacaaattcatgtccacatcagtaggagacagggtcagcgtcacctgcaaggccagtcagaatgtgggtaataatgtagcctggtatcaacagaaaccagggcaatctcctaaagtactgatttactcggcatcctaccggtacagtggagtccctgatcgcttcacaggcagtggatctgggacagatttcactctcaccatcagtaatgtgcagtctgaagacttggcagagtatttctgtcagcaatataacacctatccattcacgttcggctcggggacaaagttggaaataaaactcgagatccagaaccctgatcctgccgtgtaccagctgcgggatagcaagagcagcgacaagagcgtgtgtctgttcaccgacttcgacagccagaccaacgtgtcccagagcaaggactccgacgtgtacatcaccgataagtgcgtgctggacatgcggagcatggacttcaagagcaactccgccgtggcctggtccaacaagtccgatttcgcctgcgccaacgccttcaacaacagcattatccccgaggacacattcttcccaagccccgagagcagctgcgacgtgaagctggtggaaaagagcttcgagacagacaccaacctgaacttccagaacctgagcgtgatcggcttcagaatcctgctgctgaaagtggccggctttaacctgctgatgaccctgcggctgtggtccagccgcgccaagagaagcggatctggcgtgaagcagaccctgaatttcgacctgctgaagctggctggcgacgtggaatccaacccaggccctactagtatggactggatttggcgcatccttttccttgtcggcgctgctaccggcgcgcattccttcgaagaggtacagctggaggaaagcggtggaggactggtgcaacctggagggtctatgaagctctcttgcgtagcttctgggttcacgttctccaattactggatgaactgggtgcggcagtcccccgagaaaggcctggaatgggtagcagaaattcggttcaagtcccataactatgctacacactttgccgagtctgtcaaaggccggttcactattagtcgagacgacagcaagtcttcagtctacctgcagatgaataacttgcgggcagaggacacaggtatctactactgcaccaggagaatcggcaactccgactatgactggtggtactttgacgtctggggagcaggcaccagcgtgacggtgagttcagcctcaacgcgtgaggacctgaagaacgtgttcccacctgaggtggccgtgttcgagcctagcgaggccgagatcagccacacccagaaagccaccctcgtgtgcctggctaccggcttctaccccgaccatgtggaactgtcttggtgggtcaacggcaaagaggtgcacagcggcgtgtgtaccgacccccagccactgaaagaacagcccgccctgaacgacagccggtactgcctgagcagcagactgagagtgtccgccaccttctggcagaacccccggaaccacttcagatgccaggtgcagttctacggcctgagcgagaacgacgagtggacccaggacagagccaagcccgtgacccagatcgtgtctgccgaagcctggggcagagccgattgcggctttaccagcgagagctaccagcagggcgtgctgagcgccaccatcctgtacgagatcctgctgggcaaggccaccctgtacgccgtgctggtgtctgccctggtgctgatggctatggtcaagcggaaggacagccgggga

SEQ ID NO: 2092 - DNA, 2277 bp, Artificial Sequence
  Synthetic Polynucloetide
atggccttaccagtgaccgccttgctcctgccgctggccttgctgctccacgccgccaggccggaagtgcagctggttgaatctggcggaggactggttcagcctggcggatctctgagactgtcttgtgccgccagcggcttcagcttcagcgacttttggatgagctgggtccgacaggcccctggcaaaggacttgaatgggtcgccacaatcagccaggccggcagcgagaaggactacgtggactctgtgaagggcagattcaccatcagccgggacaacgccaagaagtccctgtacctccagatgaacagcctgagagccgaggacaccgccgtgtactattgtgcctctggcgtgtacagcttcgactacagaggccagggcaccctggtcacagtctcttctggtaccggcggaggcggatctggcggcggaggtagcggtggcggaggatctgaattcgaccagatcgtgctgacccagtcccccgctattatgtccgcatcaccgggcgaaaaagtgacgatctcctgtagcgcttcatctagcgtctcctacatgtattggtatcaacagaaacctgggtctagcccaaagccgtggatctacagaaccagtaaccttgccagtggggtgccagcccgcttcagcggtagtggcagtggaacttcctatagcctcacaataagcaacatggaggctgaagatgccgctgcctattactgccagcagtaccacagttacccaaccacgttcggcgggggaactaagctcgaagtaaaactcgagatccagaaccctgatcctgccgtgtaccagctgcgggatagcaagagcagcgacaagagcgtgtgtctgttcaccgacttcgacagccagaccaacgtgtcccagagcaaggactccgacgtgtacatcaccgataagtgcgtgctggacatgcggagcatggacttcaagagcaactccgccgtggcctggtccaacaagtccgatttcgcctgcgccaacgccttcaacaacagcattatccccgaggacacattcttcccaagccccgagagcagctgcgacgtgaagctggtggaaaagagcttcgagacagacaccaacctgaacttccagaacctgagcgtgatcggcttcagaatcctgctgctgaaagtggccggctttaacctgctgatgaccctgcggctgtggtccagccgcgccaagagaagcggatctggcgtgaagcagaccctgaatttcgacctgctgaagctggctggcgacgtggaatccaacccaggccctactagtatggactggatttggcgcatccttttccttgtcggcgctgctaccggcgcgcattccttcgaagaggtgcagctggtggaatctgggggcggcctggtccaacctaagggatcactcaagctctcttgtgcggccagcggattctctttcaatacctatgctatgaattgggtgagacaggcgcccggaaagggcctcgaatggatagcccatatccggtcaaaatcaaacaatttcgcaacctactatgcggactccgtgaaggaccgattttccatctcccgagatgcctccgagaatattctgttcctgcagatgaataacctcaagacagaggacaccgccatgtactactgtgtgcgccagggcggtgactttcccatggattactgggggcaggggaccagcgtgaccgtgagctctacgcgtgaggacctgaagaacgtgttcccacctgaggtggccgtgttcgagcctagcgaggccgagatcagccacacccagaaagccaccctcgtgtgcctggctaccggcttctaccccgaccatgtggaactgtcttggtgggtcaacggcaaagaggtgcacagcggcgtgtgtaccgacccccagccactgaaagaacagcccgccctgaacgacagccggtactgcctgagcagcagactgagagtgtccgccaccttctggcagaacccccggaaccacttcagatgccaggtgcagttctacggcctgagcgagaacgacgagtggacccaggacagagccaagcccgtgacccagatcgtgtctgccgaagcctggggcagagccgattgcggctttaccagcgagagctaccagcagggcgtgctgagcgccaccatcctgtacgagatcctgctgggcaaggccaccctgtacgccgtgctggtgtctgccctggtgctgatggctatggtcaagcggaaggacagccgggga

SEQ ID NO: 2093 - DNA, 2274 bp, Artificial Sequence
  Synthetic Polynucloetide
atggccttaccagtgaccgccttgctcctgccgctggccttgctgctccacgccgccaggccggaagtgcagctggttgaatctggcggaggactggttcagcctggcggatctctgagactgtcttgtgccgccagcggcttcagcttcagcgacttttggatgagctgggtccgacaggcccctggcaaaggacttgaatgggtcgccacaatcagccaggccggcagcgagaaggactacgtggactctgtgaagggcagattcaccatcagccgggacaacgccaagaagtccctgtacctccagatgaacagcctgagagccgaggacaccgccgtgtactattgtgcctctggcgtgtacagcttcgactacagaggccagggcaccctggtcacagtctcttctggtaccggcggaggcggatctggcggcggaggtagcggtggcggaggatctgaattcgacgacatccagatgacccagagcagcagcagcttcagcgtgagcctgggcgacagagtgaccatcacctgcatggccagcgaggacatctacatcagactggcctggtaccagcagaagcccggcaacgcccccagactgctgatcagcgccgccaccagcctggagaccggcgtgcccagcagattcagcggcagcggcagcggcaaggactacaccctgagcatcaccagcctgcagaccgaggacgtgggcacctactactgccagcagtactggagcagcccctggaccttcggcggcggcaccaagctggagatcaacctcgagatccagaaccctgatcctgccgtgtaccagctgcgggatagcaagagcagcgacaagagcgtgtgtctgttcaccgacttcgacagccagaccaacgtgtcccagagcaaggactccgacgtgtacatcaccgataagtgcgtgctggacatgcggagcatggacttcaagagcaactccgccgtggcctggtccaacaagtccgatttcgcctgcgccaacgccttcaacaacagcattatccccgaggacacattcttcccaagccccgagagcagctgcgacgtgaagctggtggaaaagagcttcgagacagacaccaacctgaacttccagaacctgagcgtgatcggcttcagaatcctgctgctgaaagtggccggctttaacctgctgatgaccctgcggctgtggtccagccgcgccaagagaagcggatctggcgtgaagcagaccctgaatttcgacctgctgaagctggctggcgacgtggaatccaacccaggccctactagtatggactggatttggcgcatccttttccttgtcggcgctgctaccggcgcgcattccttcgaagacgtgcagctgcaggagagcggccccggcctggtgaagcccagccagagcctgagcctgacctgcaccgtgaccggctacagcatcaccagcgactacacctggaactggatcagacagttccccggcaacaagctggagtggatgggctacatcacctacagcggcagcaccagctacaaccccagcctgaagagcagaaacagcatcaccagagacaccagcaagaaccagttcttcctgcagctgaacagcgtgaccaccgaggacaccgccacctactactgcgccagactgggcagaagatacacaatggactactggggccagggcaccagcgtgaccgtgagcagcacgcgtgaggacctgaagaacgtgttcccacctgaggtggccgtgttcgagcctagcgaggccgagatcagccacacccagaaagccaccctcgtgtgcctggctaccggcttctaccccgaccatgtggaactgtcttggtgggtcaacggcaaagaggtgcacagcggcgtgtgtaccgacccccagccactgaaagaacagcccgccctgaacgacagccggtactgcctgagcagcagactgagagtgtccgccaccttctggcagaacccccggaaccacttcagatgccaggtgcagttctacggcctgagcgagaacgacgagtggacccaggacagagccaagcccgtgacccagatcgtgtctgccgaagcctggggcagagccgattgcggctttaccagcgagagctaccagcagggcgtgctgagcgccaccatcctgtacgagatcctgctgggcaaggccaccctgtacgccgtgctggtgtctgccctggtgctgatggctatggtcaagcggaaggacagccgggga

SEQ ID NO: 2094 - DNA, 2283 bp, Artificial Sequence
  Synthetic Polynucloetide
atggccttaccagtgaccgccttgctcctgccgctggccttgctgctccacgccgccaggccggaagtgcagctggttgaatctggcggaggactggttcagcctggcggatctctgagactgtcttgtgccgccagcggcttcagcttcagcgacttttggatgagctgggtccgacaggcccctggcaaaggacttgaatgggtcgccacaatcagccaggccggcagcgagaaggactacgtggactctgtgaagggcagattcaccatcagccgggacaacgccaagaagtccctgtacctccagatgaacagcctgagagccgaggacaccgccgtgtactattgtgcctctggcgtgtacagcttcgactacagaggccagggcaccctggtcacagtctcttctggtaccggcggaggcggatctggcggcggaggtagcggtggcggaggatctgaattcgacgacatccagatgacccagagccccagcagcctgtctgccagcgtgggcgacagagtgaccatcacctgtagagccagccagagcatcagcagctacctgaactggtatcagcagaagcccggcaaggcccccaaactgctgatctacgacgccagcaacctggaaaccggcgtgcccagcagattttccggcagcggctctggcaccgacttcaccttcaccatcagctccctccagcccgaggacattgccacctactactgccagcagtacgacaacctgcccctgacctttggcggaggcaccaaggtggacatcaagagactcgagatccagaaccctgatcctgccgtgtaccagctgcgggatagcaagagcagcgacaagagcgtgtgtctgttcaccgacttcgacagccagaccaacgtgtcccagagcaaggactccgacgtgtacatcaccgataagtgcgtgctggacatgcggagcatggacttcaagagcaactccgccgtggcctggtccaacaagtccgatttcgcctgcgccaacgccttcaacaacagcattatccccgaggacacattcttcccaagccccgagagcagctgcgacgtgaagctggtggaaaagagcttcgagacagacaccaacctgaacttccagaacctgagcgtgatcggcttcagaatcctgctgctgaaagtggccggctttaacctgctgatgaccctgcggctgtggtccagccgcgccaagagaagcggatctggcgtgaagcagaccctgaatttcgacctgctgaagctggctggcgacgtggaatccaacccaggccctactagtatggactggatttggcgcatccttttccttgtcggcgctgctaccggcgcgcattccttcgaacaggtgcaactggtggaatctggcggcggagtggtgcagcctggcagaagcctgagactgagctgtgccgccagcggcttcacctttagcagctacgccatgcactgggtgcgccaggcccctggaaaaggcctggaatgggtggccgtgatctcctacgacggctccaacaagtattacgccgacagcgtgaagggccggttcaccatctccagagacaacagcaagaacaccctgtacctccagatgaacagcctgcgggccgaggacaccgccgtgtactattgtgccagggctcacaacagcagctcttggagcttcgactactggggccagggcaccctcgtgaccgtgtcatctacgcgtgaggacctgaagaacgtgttcccacctgaggtggccgtgttcgagcctagcgaggccgagatcagccacacccagaaagccaccctcgtgtgcctggctaccggcttctaccccgaccatgtggaactgtcttggtgggtcaacggcaaagaggtgcacagcggcgtgtgtaccgacccccagccactgaaagaacagcccgccctgaacgacagccggtactgcctgagcagcagactgagagtgtccgccaccttctggcagaacccccggaaccacttcagatgccaggtgcagttctacggcctgagcgagaacgacgagtggacccaggacagagccaagcccgtgacccagatcgtgtctgccgaagcctggggcagagccgattgcggctttaccagcgagagctaccagcagggcgtgctgagcgccaccatcctgtacgagatcctgctgggcaaggccaccctgtacgccgtgctggtgtctgccctggtgctgatggctatggtcaagcggaaggacagccgggga

SEQ ID NO: 2095 - DNA, 2310 bp, Artificial Sequence
  Synthetic Polynucloetide
atggccttaccagtgaccgccttgctcctgccgctggccttgctgctccacgccgccaggccggaagtgcagctggttgaatctggcggaggactggttcagcctggcggatctctgagactgtcttgtgccgccagcggcttcagcttcagcgacttttggatgagctgggtccgacaggcccctggcaaaggacttgaatgggtcgccacaatcagccaggccggcagcgagaaggactacgtggactctgtgaagggcagattcaccatcagccgggacaacgccaagaagtccctgtacctccagatgaacagcctgagagccgaggacaccgccgtgtactattgtgcctctggcgtgtacagcttcgactacagaggccagggcaccctggtcacagtctcttctggtaccggcggaggcggatctggcggcggaggtagcggtggcggaggatctgaattcgacgacgtcgtgatgacccagagccctctgagcctgcctgtgtccctgggcgatcaggccagcatctcctgcagatccagccagagactggtgcacagcaacggcaacacctacctgcactggtatctgcagaagcccggccagagccccaagctgctgatctaccgggtgtccaacagattccccggcgtgcccgatagattcagcggctctggcagcggcaccgacttcaccctgaagatcagccgggtggaagccgaggacctgggcatctatttctgcagccagagcacccacgtgccctacacctttggcggaggcaccaagctggaaatcaagcggctcgagatccagaaccctgatcctgccgtgtaccagctgcgggatagcaagagcagcgacaagagcgtgtgtctgttcaccgacttcgacagccagaccaacgtgtcccagagcaaggactccgacgtgtacatcaccgataagtgcgtgctggacatgcggagcatggacttcaagagcaactccgccgtggcctggtccaacaagtccgatttcgcctgcgccaacgccttcaacaacagcattatccccgaggacacattcttcccaagccccgagagcagctgcgacgtgaagctggtggaaaagagcttcgagacagacaccaacctgaacttccagaacctgagcgtgatcggcttcagaatcctgctgctgaaagtggccggctttaacctgctgatgaccctgcggctgtggtccagccgcgccaagagaagcggatctggcgtgaagcagaccctgaatttcgacctgctgaagctggctggcgacgtggaatccaacccaggccctactagtatggactggatttggcgcatccttttccttgtcggcgctgctaccggcgcgcattccttcgaagaagtgcggctgcagcagtctggccccgacctgattaagcctggggccagcgtgaagatgagctgcaaggccagcggctacaccttcaccggctacgtgatgcactgggtcaagcagaggccaggccagggcctggaatggatcggcttcatcaacccctacaacgacgacatccagagcaacgagcggttccggggcaaggccaccctgaccagcgataagagcagcaccaccgcctacatggaactgagcagcctgacctccgaggacagcgccgtgtactactgtgctaggggagccggctacaacttcgacggggcctacagattcttcgacttttggggccagggcaccacactgaccgtgtcctctacgcgtgaggacctgaagaacgtgttcccacctgaggtggccgtgttcgagcctagcgaggccgagatcagccacacccagaaagccaccctcgtgtgcctggctaccggcttctaccccgaccatgtggaactgtcttggtgggtcaacggcaaagaggtgcacagcggcgtgtgtaccgacccccagccactgaaagaacagcccgccctgaacgacagccggtactgcctgagcagcagactgagagtgtccgccaccttctggcagaacccccggaaccacttcagatgccaggtgcagttctacggcctgagcgagaacgacgagtggacccaggacagagccaagcccgtgacccagatcgtgtctgccgaagcctggggcagagccgattgcggctttaccagcgagagctaccagcagggcgtgctgagcgccaccatcctgtacgagatcctgctgggcaaggccaccctgtacgccgtgctggtgtctgccctggtgctgatggctatggtcaagcggaaggacagccgggga

SEQ ID NO: 2096 - DNA, 2283 bp, Artificial Sequence
  Synthetic Polynucloetide
atggccttaccagtgaccgccttgctcctgccgctggccttgctgctccacgccgccaggccggaagtgcagctggttgaatctggcggaggactggttcagcctggcggatctctgagactgtcttgtgccgccagcggcttcagcttcagcgacttttggatgagctgggtccgacaggcccctggcaaaggacttgaatgggtcgccacaatcagccaggccggcagcgagaaggactacgtggactctgtgaagggcagattcaccatcagccgggacaacgccaagaagtccctgtacctccagatgaacagcctgagagccgaggacaccgccgtgtactattgtgcctctggcgtgtacagcttcgactacagaggccagggcaccctggtcacagtctcttctggtaccggcggaggcggatctggcggcggaggtagcggtggcggaggatctgaattcgacagctacgagctgacccagcctcctagcgtgtccgtgtctcctggacagaccgccaccatctcttgcagcggcgatcaactgggcgggaagtacggccactggtatcagaagaagcccggccagagccccgtgctggtgctgtaccaggacagaaaacggcctgccggcatccccgagagattcagcggaagcagcagcggcaacaccatcaccctgaccatcagcggcacccaggccgtggatgaggccgactactactgccaggcttgggacaccaatctgggcggcgtgttcggcggaggcaccaaagtgacagtgctgggacagctcgagatccagaaccctgatcctgccgtgtaccagctgcgggatagcaagagcagcgacaagagcgtgtgtctgttcaccgacttcgacagccagaccaacgtgtcccagagcaaggactccgacgtgtacatcaccgataagtgcgtgctggacatgcggagcatggacttcaagagcaactccgccgtggcctggtccaacaagtccgatttcgcctgcgccaacgccttcaacaacagcattatccccgaggacacattcttcccaagccccgagagcagctgcgacgtgaagctggtggaaaagagcttcgagacagacaccaacctgaacttccagaacctgagcgtgatcggcttcagaatcctgctgctgaaagtggccggctttaacctgctgatgaccctgcggctgtggtccagccgcgccaagagaagcggatctggcgtgaagcagaccctgaatttcgacctgctgaagctggctggcgacgtggaatccaacccaggccctactagtatggactggatttggcgcatccttttccttgtcggcgctgctaccggcgcgcattccttcgaacaggtgcaactggtggaaagcggagccgaagtgaagaaacctggggccagcgtgaaggtgtcctgcaaggccagcggctacacctttaccggctactacatgcactgggtgcgccaggctccaggccagggactggaatggatgggccggatcaaccccaatagcggcggcaccaactacgcccagaaattccagggcagagtgaccatgaccagagacaccagcatcagcaccgcctacatggaactgagccggctgagaagcgacgacaccgccgtgtactactgcgccagccctagaggcagaggcagcgccttcgatatttggggccagggcacactcgtgaccgtgtcctctacgcgtgaggacctgaagaacgtgttcccacctgaggtggccgtgttcgagcctagcgaggccgagatcagccacacccagaaagccaccctcgtgtgcctggctaccggcttctaccccgaccatgtggaactgtcttggtgggtcaacggcaaagaggtgcacagcggcgtgtgtaccgacccccagccactgaaagaacagcccgccctgaacgacagccggtactgcctgagcagcagactgagagtgtccgccaccttctggcagaacccccggaaccacttcagatgccaggtgcagttctacggcctgagcgagaacgacgagtggacccaggacagagccaagcccgtgacccagatcgtgtctgccgaagcctggggcagagccgattgcggctttaccagcgagagctaccagcagggcgtgctgagcgccaccatcctgtacgagatcctgctgggcaaggccaccctgtacgccgtgctggtgtctgccctggtgctgatggctatggtcaagcggaaggacagccgggga

SEQ ID NO: 2097 - DNA, 2292 bp, Artificial Sequence
  Synthetic Polynucloetide
atggccttaccagtgaccgccttgctcctgccgctggccttgctgctccacgccgccaggccggaagtgcagctggttgaatctggcggaggactggttcagcctggcggatctctgagactgtcttgtgccgccagcggcttcagcttcagcgacttttggatgagctgggtccgacaggcccctggcaaaggacttgaatgggtcgccacaatcagccaggccggcagcgagaaggactacgtggactctgtgaagggcagattcaccatcagccgggacaacgccaagaagtccctgtacctccagatgaacagcctgagagccgaggacaccgccgtgtactattgtgcctctggcgtgtacagcttcgactacagaggccagggcaccctggtcacagtctcttctggtaccggcggaggcggatctggcggcggaggtagcggtggcggaggatctgaattcgacaacttcatgctgacccagccccacagcgtgtccgagagccctggcaagaccgtgaccatctcctgcaccagaagcagcggctctatcgccagcaaatacgtgcagtggtatcagcagaggcccggcagcagccctaccaccgtgatctacgaggacaaccagaggcctagcggcgtgcccgatagattcagcggcagcatcgacaccagcagcaacagcgccagcctgaccatcagcggcctgagaacagaggacgaggccgactactactgccacagctacgacagcaacaaccactccgtgttcggcggaggcaccaaagtgacagtgctgggacagctcgagatccagaaccctgatcctgccgtgtaccagctgcgggatagcaagagcagcgacaagagcgtgtgtctgttcaccgacttcgacagccagaccaacgtgtcccagagcaaggactccgacgtgtacatcaccgataagtgcgtgctggacatgcggagcatggacttcaagagcaactccgccgtggcctggtccaacaagtccgatttcgcctgcgccaacgccttcaacaacagcattatccccgaggacacattcttcccaagccccgagagcagctgcgacgtgaagctggtggaaaagagcttcgagacagacaccaacctgaacttccagaacctgagcgtgatcggcttcagaatcctgctgctgaaagtggccggctttaacctgctgatgaccctgcggctgtggtccagccgcgccaagagaagcggatctggcgtgaagcagaccctgaatttcgacctgctgaagctggctggcgacgtggaatccaacccaggccctactagtatggactggatttggcgcatccttttccttgtcggcgctgctaccggcgcgcattccttcgaagaagtgcaactggtggaaagcgggggaggcgtggtgcagccaggcggatctctgagactgagctgtgccgccagcggcttcaccttcagcagctacgccatgagctgggtgcgccaggcccctggaaaaggcctggaatgggtgtccgccatctctggctctggcggcagcacctactacgccgatagcgtgaagggccggttcagcatcagccgggacaacagcaagaacaccctgtacctccagatgaacagcctgcgggccgaggacaccgccgtgtactactgtgccagaaccagaagctccggggccttcgacatctggggccagggaacactcgtgaccgtgtcctctacgcgtgaggacctgaagaacgtgttcccacctgaggtggccgtgttcgagcctagcgaggccgagatcagccacacccagaaagccaccctcgtgtgcctggctaccggcttctaccccgaccatgtggaactgtcttggtgggtcaacggcaaagaggtgcacagcggcgtgtgtaccgacccccagccactgaaagaacagcccgccctgaacgacagccggtactgcctgagcagcagactgagagtgtccgccaccttctggcagaacccccggaaccacttcagatgccaggtgcagttctacggcctgagcgagaacgacgagtggacccaggacagagccaagcccgtgacccagatcgtgtctgccgaagcctggggcagagccgattgcggctttaccagcgagagctaccagcagggcgtgctgagcgccaccatcctgtacgagatcctgctgggcaaggccaccctgtacgccgtgctggtgtctgccctggtgctgatggctatggtcaagcggaaggacagccgggga

SEQ ID NO: 2098 - DNA, 2277 bp, Artificial Sequence
  Synthetic Polynucloetide
atggccttaccagtgaccgccttgctcctgccgctggccttgctgctccacgccgccaggccggaagtgcagctggttgaatctggcggaggactggttcagcctggcggatctctgagactgtcttgtgccgccagcggcttcagcttcagcgacttttggatgagctgggtccgacaggcccctggcaaaggacttgaatgggtcgccacaatcagccaggccggcagcgagaaggactacgtggactctgtgaagggcagattcaccatcagccgggacaacgccaagaagtccctgtacctccagatgaacagcctgagagccgaggacaccgccgtgtactattgtgcctctggcgtgtacagcttcgactacagaggccagggcaccctggtcacagtctcttctggtaccggcggaggcggatctggcggcggaggtagcggtggcggaggatctgaattcgacatccagatgaaccagagccccagcagcctgagcgccagcctgggcgataccatcaccatcacctgtcacgccagccagaacatcaacgtgtggctgagctggtatcagcagaagcccggcaacatccccaagctgctgatctacaaggccagcaacctgcacaccggcgtgcccagcagattttctggcagcggctctggcaccggcttcaccattaccatcagctccctccagcccgaggacattgccacctactactgccagcagggccagagctacccctggacatttggcggaggcaccaagctggaaatcaagagactcgagatccagaaccctgatcctgccgtgtaccagctgcgggatagcaagagcagcgacaagagcgtgtgtctgttcaccgacttcgacagccagaccaacgtgtcccagagcaaggactccgacgtgtacatcaccgataagtgcgtgctggacatgcggagcatggacttcaagagcaactccgccgtggcctggtccaacaagtccgatttcgcctgcgccaacgccttcaacaacagcattatccccgaggacacattcttcccaagccccgagagcagctgcgacgtgaagctggtggaaaagagcttcgagacagacaccaacctgaacttccagaacctgagcgtgatcggcttcagaatcctgctgctgaaagtggccggctttaacctgctgatgaccctgcggctgtggtccagccgcgccaagagaagcggatctggcgtgaagcagaccctgaatttcgacctgctgaagctggctggcgacgtggaatccaacccaggccctactagtatggactggatttggcgcatccttttccttgtcggcgctgctaccggcgcgcattccttcgaagaagtgcaactccagcagagcggcccagagcttgtgaagcctggcgcttccgtgaagattagctgcaaagccagcggctacagcttcaccggctacttcatgaactgggtcaagcagagccacggcaagagcctggagtacatcggcagattcaacccctacaacggcgagacactgtacaaccagaagttcaagggcaaggccaccctgaccgtggacaagagcagcagcaccgtgcacatggaactgctgagcgtgaccagcgaggacagcgccgtgtactactgtggcagaagcggcaacgacgacgctatggactattggggccagggcaccagcgtgaccgtgtctagtgctacgcgtgaggacctgaagaacgtgttcccacctgaggtggccgtgttcgagcctagcgaggccgagatcagccacacccagaaagccaccctcgtgtgcctggctaccggcttctaccccgaccatgtggaactgtcttggtgggtcaacggcaaagaggtgcacagcggcgtgtgtaccgacccccagccactgaaagaacagcccgccctgaacgacagccggtactgcctgagcagcagactgagagtgtccgccaccttctggcagaacccccggaaccacttcagatgccaggtgcagttctacggcctgagcgagaacgacgagtggacccaggacagagccaagcccgtgacccagatcgtgtctgccgaagcctggggcagagccgattgcggctttaccagcgagagctaccagcagggcgtgctgagcgccaccatcctgtacgagatcctgctgggcaaggccaccctgtacgccgtgctggtgtctgccctggtgctgatggctatggtcaagcggaaggacagccgggga

SEQ ID NO: 2099 - DNA, 2280 bp, Artificial Sequence
  Synthetic Polynucloetide
atggccttaccagtgaccgccttgctcctgccgctggccttgctgctccacgccgccaggccggaagtgcagctggttgaatctggcggaggactggttcagcctggcggatctctgagactgtcttgtgccgccagcggcttcagcttcagcgacttttggatgagctgggtccgacaggcccctggcaaaggacttgaatgggtcgccacaatcagccaggccggcagcgagaaggactacgtggactctgtgaagggcagattcaccatcagccgggacaacgccaagaagtccctgtacctccagatgaacagcctgagagccgaggacaccgccgtgtactattgtgcctctggcgtgtacagcttcgactacagaggccagggcaccctggtcacagtctcttctggtaccggcggaggcggatctggcggcggaggtagcggtggcggaggatctgaattcgagatcgtgctgacacagagccctgccaccctgtctctgagccctggcgaaagagccaccctgagctgtagagccagccagagcgtgcggagctacctggcctggtatcagcagaagcctggacaggcccccagactgctgatctacgacgccagcaatcgggccacaggcatccccgccagattttctggctctggcagcggcaccgacttcaccctgacaatcagcagcctggaacccgaggacttcgccgtgtactactgccagcagcggagcaactggccccctacctttggacagggcaccaaggtggaaatcaagctcgagatccagaaccctgatcctgccgtgtaccagctgcgggatagcaagagcagcgacaagagcgtgtgtctgttcaccgacttcgacagccagaccaacgtgtcccagagcaaggactccgacgtgtacatcaccgataagtgcgtgctggacatgcggagcatggacttcaagagcaactccgccgtggcctggtccaacaagtccgatttcgcctgcgccaacgccttcaacaacagcattatccccgaggacacattcttcccaagccccgagagcagctgcgacgtgaagctggtggaaaagagcttcgagacagacaccaacctgaacttccagaacctgagcgtgatcggcttcagaatcctgctgctgaaagtggccggctttaacctgctgatgaccctgcggctgtggtccagccgcgccaagagaagcggatctggcgtgaagcagaccctgaatttcgacctgctgaagctggctggcgacgtggaatccaacccaggccctactagtatggactggatttggcgcatccttttccttgtcggcgctgctaccggcgcgcattccttcgaacaactccaggtgcaggaatctggccccggactcgtgaagcccagcgagacactgagcctgacctgtaccgtgtccggcggcagcatcagcaacagctacttctcctggggctggatcagacagccccctggcaagggcctggaatggatcggcagcttctactacggcgagaaaacctactacaaccccagcctgaagtccagagccaccatcagcatcgacaccagcaagagccagttctccctgaagctgagcagcgtgacagccgccgacaccgccgtgtattattgccccagaggccccaccatgatccggggcgtgatcgactcttggggccagggaacactcgtgaccgtgtcctctacgcgtgaggacctgaagaacgtgttcccacctgaggtggccgtgttcgagcctagcgaggccgagatcagccacacccagaaagccaccctcgtgtgcctggctaccggcttctaccccgaccatgtggaactgtcttggtgggtcaacggcaaagaggtgcacagcggcgtgtgtaccgacccccagccactgaaagaacagcccgccctgaacgacagccggtactgcctgagcagcagactgagagtgtccgccaccttctggcagaacccccggaaccacttcagatgccaggtgcagttctacggcctgagcgagaacgacgagtggacccaggacagagccaagcccgtgacccagatcgtgtctgccgaagcctggggcagagccgattgcggctttaccagcgagagctaccagcagggcgtgctgagcgccaccatcctgtacgagatcctgctgggcaaggccaccctgtacgccgtgctggtgtctgccctggtgctgatggctatggtcaagcggaaggacagccgggga

SEQ ID NO: 2100 - DNA, 2307 bp, Artificial Sequence
  Synthetic Polynucloetide
atggccttaccagtgaccgccttgctcctgccgctggccttgctgctccacgccgccaggccggaagtgcagctggttgaatctggcggaggactggttcagcctggcggatctctgagactgtcttgtgccgccagcggcttcagcttcagcgacttttggatgagctgggtccgacaggcccctggcaaaggacttgaatgggtcgccacaatcagccaggccggcagcgagaaggactacgtggactctgtgaagggcagattcaccatcagccgggacaacgccaagaagtccctgtacctccagatgaacagcctgagagccgaggacaccgccgtgtactattgtgcctctggcgtgtacagcttcgactacagaggccagggcaccctggtcacagtctcttctggtaccggcggaggcggatctggcggcggaggtagcggtggcggaggatctgaattcgacatcgtgatgacccagacccccctgagcctgcctgtgacacctggcgagcctgccagcatctcctgcagaagcagcagaagcctgctggacagcgacgacggcaacacctacctggactggtatctgcagaaacccggccagagcccccaactgctgatctacaccctgagctacagagccagcggcgtgcccgatagattttccggctctggcagcggcaccgacttcaccctgaagatcagccgggtggaagccgaggacgtgggcgtgtactactgtatgcagcgggtggaatttcccatcaccttcggccagggcaccagactggaaatcaagagactcgagatccagaaccctgatcctgccgtgtaccagctgcgggatagcaagagcagcgacaagagcgtgtgtctgttcaccgacttcgacagccagaccaacgtgtcccagagcaaggactccgacgtgtacatcaccgataagtgcgtgctggacatgcggagcatggacttcaagagcaactccgccgtggcctggtccaacaagtccgatttcgcctgcgccaacgccttcaacaacagcattatccccgaggacacattcttcccaagccccgagagcagctgcgacgtgaagctggtggaaaagagcttcgagacagacaccaacctgaacttccagaacctgagcgtgatcggcttcagaatcctgctgctgaaagtggccggctttaacctgctgatgaccctgcggctgtggtccagccgcgccaagagaagcggatctggcgtgaagcagaccctgaatttcgacctgctgaagctggctggcgacgtggaatccaacccaggccctactagtatggactggatttggcgcatccttttccttgtcggcgctgctaccggcgcgcattccttcgaacaggtgcaactggtggaatctggcgggggagtggtgcagcctggcagatccctgagactgagctgtgccgccagcggcttcatcttcagcagatacggaatgcactgggtgcgccaggcccctggcaagggactgaaatgggtggccgtgatttggtacgacggcagcaacaagctgtacgccgacagcgtgaagggccggttcaccatcagcagagacaacagcaagaacaccctgtacctgcagatgaacagcctgcgggccgaggacaccgccgtgtactattgcgccagagactactacgacaacagccggcaccactggggcttcgactattggggccagggaacccttgtgaccgtgtcctctacgcgtgaggacctgaagaacgtgttcccacctgaggtggccgtgttcgagcctagcgaggccgagatcagccacacccagaaagccaccctcgtgtgcctggctaccggcttctaccccgaccatgtggaactgtcttggtgggtcaacggcaaagaggtgcacagcggcgtgtgtaccgacccccagccactgaaagaacagcccgccctgaacgacagccggtactgcctgagcagcagactgagagtgtccgccaccttctggcagaacccccggaaccacttcagatgccaggtgcagttctacggcctgagcgagaacgacgagtggacccaggacagagccaagcccgtgacccagatcgtgtctgccgaagcctggggcagagccgattgcggctttaccagcgagagctaccagcagggcgtgctgagcgccaccatcctgtacgagatcctgctgggcaaggccaccctgtacgccgtgctggtgtctgccctggtgctgatggctatggtcaagcggaaggacagccgggga

SEQ ID NO: 2101 - DNA, 2277 bp, Artificial Sequence
  Synthetic Polynucloetide
atggccttaccagtgaccgccttgctcctgccgctggccttgctgctccacgccgccaggccggaagtgcagctggttgaatctggcggaggactggttcagcctggcggatctctgagactgtcttgtgccgccagcggcttcagcttcagcgacttttggatgagctgggtccgacaggcccctggcaaaggacttgaatgggtcgccacaatcagccaggccggcagcgagaaggactacgtggactctgtgaagggcagattcaccatcagccgggacaacgccaagaagtccctgtacctccagatgaacagcctgagagccgaggacaccgccgtgtactattgtgcctctggcgtgtacagcttcgactacagaggccagggcaccctggtcacagtctcttctggtaccggcggaggcggatctggcggcggaggtagcggtggcggaggatctgaattcgagatccagatgacccagagccccagcagcatgtctgccagcctgggcgacaccatcaccatcacatgccaggccacccaggacatcttcaagaacctgaactggtatcagcagaagcccggcaagccccccagcctgctgatctactatgccaccgaactggccgagggcgtgcccagcagattttctggcagcggcagcggctccgactacagcctgaccatcagcaacctggaaagcgaggacttcgccgcctactactgcctccagttcttcgagttcccattcaccttcggctccggcaccaagctggaaatgaagctcgagatccagaaccctgatcctgccgtgtaccagctgcgggatagcaagagcagcgacaagagcgtgtgtctgttcaccgacttcgacagccagaccaacgtgtcccagagcaaggactccgacgtgtacatcaccgataagtgcgtgctggacatgcggagcatggacttcaagagcaactccgccgtggcctggtccaacaagtccgatttcgcctgcgccaacgccttcaacaacagcattatccccgaggacacattcttcccaagccccgagagcagctgcgacgtgaagctggtggaaaagagcttcgagacagacaccaacctgaacttccagaacctgagcgtgatcggcttcagaatcctgctgctgaaagtggccggctttaacctgctgatgaccctgcggctgtggtccagccgcgccaagagaagcggatctggcgtgaagcagaccctgaatttcgacctgctgaagctggctggcgacgtggaatccaacccaggccctactagtatggactggatttggcgcatccttttccttgtcggcgctgctaccggcgcgcattccttcgaacaggtgcaactccagcagtctggcgctgagcttgtgcggcctggcacctctgtgaaggtgtcctgtaaagccagcggctacgtgttcaccaactactggatcgagtggatcaagcagcggccaggccagggcctggaatggatcggcgtgatgaatccaggcagcggcgagacaacctacaacgagaagttcaagggcaaggccaccctgaccgccgacaagagcagcagcacagcctacatgcaactgtcctccctgaccagcgtggacagcgccgtgtacttctgcgccagggaccacgaccgggactactacgctatggactactggggccagggcaccagcgtgaccgtgtcatctacgcgtgaggacctgaagaacgtgttcccacctgaggtggccgtgttcgagcctagcgaggccgagatcagccacacccagaaagccaccctcgtgtgcctggctaccggcttctaccccgaccatgtggaactgtcttggtgggtcaacggcaaagaggtgcacagcggcgtgtgtaccgacccccagccactgaaagaacagcccgccctgaacgacagccggtactgcctgagcagcagactgagagtgtccgccaccttctggcagaacccccggaaccacttcagatgccaggtgcagttctacggcctgagcgagaacgacgagtggacccaggacagagccaagcccgtgacccagatcgtgtctgccgaagcctggggcagagccgattgcggctttaccagcgagagctaccagcagggcgtgctgagcgccaccatcctgtacgagatcctgctgggcaaggccaccctgtacgccgtgctggtgtctgccctggtgctgatggctatggtcaagcggaaggacagccgggga

SEQ ID NO: 2102 - DNA, 2268 bp, Artificial Sequence
  Synthetic Polynucloetide
atggccttaccagtgaccgccttgctcctgccgctggccttgctgctccacgccgccaggccggaagtgcagctggttgaatctggcggaggactggttcagcctggcggatctctgagactgtcttgtgccgccagcggcttcagcttcagcgacttttggatgagctgggtccgacaggcccctggcaaaggacttgaatgggtcgccacaatcagccaggccggcagcgagaaggactacgtggactctgtgaagggcagattcaccatcagccgggacaacgccaagaagtccctgtacctccagatgaacagcctgagagccgaggacaccgccgtgtactattgtgcctctggcgtgtacagcttcgactacagaggccagggcaccctggtcacagtctcttctggtaccggcggaggcggatctggcggcggaggtagcggtggcggaggatctgaattcgacatcctgctgacacagagccccgccatcctgtccgtgtctccaggcgagagagtgtcctttagctgccgggccagccagaacatcggcaccagcatccactggtatcagcagcggaccaacggcagccccagactgctgattaagtacgccagcgagtccgtgtccggcatccccagcagattttctggcagcggctccggcaccgacttcaccctgagcatcaacagcgtggaaagcgaggacattgccgactactactgccagcacaccaatagctggcccaccacctttggcggaggcaccaagctggaaatcaagagactcgagatccagaaccctgatcctgccgtgtaccagctgcgggatagcaagagcagcgacaagagcgtgtgtctgttcaccgacttcgacagccagaccaacgtgtcccagagcaaggactccgacgtgtacatcaccgataagtgcgtgctggacatgcggagcatggacttcaagagcaactccgccgtggcctggtccaacaagtccgatttcgcctgcgccaacgccttcaacaacagcattatccccgaggacacattcttcccaagccccgagagcagctgcgacgtgaagctggtggaaaagagcttcgagacagacaccaacctgaacttccagaacctgagcgtgatcggcttcagaatcctgctgctgaaagtggccggctttaacctgctgatgaccctgcggctgtggtccagccgcgccaagagaagcggatctggcgtgaagcagaccctgaatttcgacctgctgaagctggctggcgacgtggaatccaacccaggccctactagtatggactggatttggcgcatccttttccttgtcggcgctgctaccggcgcgcattccttcgaacaggtgcaactccagcagtccgacgccgagcttgtgaagcctggcgcttccgtgaagattagctgcaaggccagcggctacaccttcaccgaccacgccattcactgggtcaagcagaagcccgagcagggcctggaatggatcggctacttcagccccggcaacggcgacatcaagtacaacgagaagttcaagggcaaggccaccctgaccgccgacaagagcagcagcacagcctacatgcaactgaacagcctgaccagcgaggactccgccgtgtacttctgcaagcggagctacggcaactacgactactggggccagggcaccacactgaccgtgtctagtacgcgtgaggacctgaagaacgtgttcccacctgaggtggccgtgttcgagcctagcgaggccgagatcagccacacccagaaagccaccctcgtgtgcctggctaccggcttctaccccgaccatgtggaactgtcttggtgggtcaacggcaaagaggtgcacagcggcgtgtgtaccgacccccagccactgaaagaacagcccgccctgaacgacagccggtactgcctgagcagcagactgagagtgtccgccaccttctggcagaacccccggaaccacttcagatgccaggtgcagttctacggcctgagcgagaacgacgagtggacccaggacagagccaagcccgtgacccagatcgtgtctgccgaagcctggggcagagccgattgcggctttaccagcgagagctaccagcagggcgtgctgagcgccaccatcctgtacgagatcctgctgggcaaggccaccctgtacgccgtgctggtgtctgccctggtgctgatggctatggtcaagcggaaggacagccgggga

SEQ ID NO: 2103 - DNA, 2283 bp, Artificial Sequence
  Synthetic Polynucloetide
atggccttaccagtgaccgccttgctcctgccgctggccttgctgctccacgccgccaggccggaagtgcagctggttgaatctggcggaggactggttcagcctggcggatctctgagactgtcttgtgccgccagcggcttcagcttcagcgacttttggatgagctgggtccgacaggcccctggcaaaggacttgaatgggtcgccacaatcagccaggccggcagcgagaaggactacgtggactctgtgaagggcagattcaccatcagccgggacaacgccaagaagtccctgtacctccagatgaacagcctgagagccgaggacaccgccgtgtactattgtgcctctggcgtgtacagcttcgactacagaggccagggcaccctggtcacagtctcttctggtaccggcggaggcggatctggcggcggaggtagcggtggcggaggatctgaattcgacatcgtgatgacccagagccccgatagcctggccgtgtctctgggagagagagccaccatcaactgcaagagcagccagagcctgctgaacagcggcgaccagaagaactacctgacctggtatcagcagaagcccggccagccccccaagctgctgatctactgggccagcaccagagaaagcggcgtgcccgatagattcagcggcagcggaagtggcaccgacttcaccctgaccatcagttctcttcaggccgaggacgtggccgtgtactactgccagaacgactacagctaccccctgaccttcggccagggcaccaaggtggaaatcaagctcgagatccagaaccctgatcctgccgtgtaccagctgcgggatagcaagagcagcgacaagagcgtgtgtctgttcaccgacttcgacagccagaccaacgtgtcccagagcaaggactccgacgtgtacatcaccgataagtgcgtgctggacatgcggagcatggacttcaagagcaactccgccgtggcctggtccaacaagtccgatttcgcctgcgccaacgccttcaacaacagcattatccccgaggacacattcttcccaagccccgagagcagctgcgacgtgaagctggtggaaaagagcttcgagacagacaccaacctgaacttccagaacctgagcgtgatcggcttcagaatcctgctgctgaaagtggccggctttaacctgctgatgaccctgcggctgtggtccagccgcgccaagagaagcggatctggcgtgaagcagaccctgaatttcgacctgctgaagctggctggcgacgtggaatccaacccaggccctactagtatggactggatttggcgcatccttttccttgtcggcgctgctaccggcgcgcattccttcgaacaggtgcagctggtgcagtctggggccgaagtgaagaaaaccggcagcagcgtgaaggtgtcctgcaaggccagcggctacacctttaccgaccacgccattcacgtgtggcggcaggctccaggacaggccctggaatggatgggccacttcagccccggcaacaccgacatcaagtacaacgacaagttcaagggcagagtgaccctgaccgtggaccgcagcatgagcaccgcctacatggaactgagcagcctgcggagcgaggacaccgccatgtactattgcaagaccagcaccttctttttcgactactggggccagggaacaatggtcaccgtgtccagcacgcgtgaggacctgaagaacgtgttcccacctgaggtggccgtgttcgagcctagcgaggccgagatcagccacacccagaaagccaccctcgtgtgcctggctaccggcttctaccccgaccatgtggaactgtcttggtgggtcaacggcaaagaggtgcacagcggcgtgtgtaccgacccccagccactgaaagaacagcccgccctgaacgacagccggtactgcctgagcagcagactgagagtgtccgccaccttctggcagaacccccggaaccacttcagatgccaggtgcagttctacggcctgagcgagaacgacgagtggacccaggacagagccaagcccgtgacccagatcgtgtctgccgaagcctggggcagagccgattgcggctttaccagcgagagctaccagcagggcgtgctgagcgccaccatcctgtacgagatcctgctgggcaaggccaccctgtacgccgtgctggtgtctgccctggtgctgatggctatggtcaagcggaaggacagccgggga

SEQ ID NO: 2104 - DNA, 2280 bp, Artificial Sequence
  Synthetic Polynucloetide
atggccttaccagtgaccgccttgctcctgccgctggccttgctgctccacgccgccaggccggaagtgcagctggttgaatctggcggaggactggttcagcctggcggatctctgagactgtcttgtgccgccagcggcttcagcttcagcgacttttggatgagctgggtccgacaggcccctggcaaaggacttgaatgggtcgccacaatcagccaggccggcagcgagaaggactacgtggactctgtgaagggcagattcaccatcagccgggacaacgccaagaagtccctgtacctccagatgaacagcctgagagccgaggacaccgccgtgtactattgtgcctctggcgtgtacagcttcgactacagaggccagggcaccctggtcacagtctcttctggtaccggcggaggcggatctggcggcggaggtagcggtggcggaggatctgaattcgacatccagatgacccagagccccagcagcctgtctgccagcgtgggcgacagagtgaccatcacatgcaaggccagccaggacgtgtccattgccgtggcctggtatcagcagaagcccggcaaggcccccaaggtgctgatctacagcgccagctacagatacaccggcgtgcccgacagattcagcggctctggcagcggcaccgacttcaccttcaccatcagctccctccagcccgaggatattgccgtgtactactgccagcagcactacatcacccccctgacctttggcggaggcaccaaggtggaaatcaagctcgagatccagaaccctgatcctgccgtgtaccagctgcgggatagcaagagcagcgacaagagcgtgtgtctgttcaccgacttcgacagccagaccaacgtgtcccagagcaaggactccgacgtgtacatcaccgataagtgcgtgctggacatgcggagcatggacttcaagagcaactccgccgtggcctggtccaacaagtccgatttcgcctgcgccaacgccttcaacaacagcattatccccgaggacacattcttcccaagccccgagagcagctgcgacgtgaagctggtggaaaagagcttcgagacagacaccaacctgaacttccagaacctgagcgtgatcggcttcagaatcctgctgctgaaagtggccggctttaacctgctgatgaccctgcggctgtggtccagccgcgccaagagaagcggatctggcgtgaagcagaccctgaatttcgacctgctgaagctggctggcgacgtggaatccaacccaggccctactagtatggactggatttggcgcatccttttccttgtcggcgctgctaccggcgcgcattccttcgaacagatccaactggtgcagagcggccacgaagtgaagaaacctggggccagcgtgaaggtgtcctgcaaagccagcggctacacctttaccaactacggcatgaactgggtgcgccaggcccctggacagggcctggaatggatgggctggatcaacaccaagaccggcgagcccacctacgccgaagagttcaagggcagattcgtgttcagcctggaaaccagcgcctccaccgcctacctccagatcagctctctgaaggccgaggacaccgccatgtacttttgcggcagaggcggctacggcagcagctactggtacttcgatgtgtggggccagggcaccaccgtgaccgtgtcatctacgcgtgaggacctgaagaacgtgttcccacctgaggtggccgtgttcgagcctagcgaggccgagatcagccacacccagaaagccaccctcgtgtgcctggctaccggcttctaccccgaccatgtggaactgtcttggtgggtcaacggcaaagaggtgcacagcggcgtgtgtaccgacccccagccactgaaagaacagcccgccctgaacgacagccggtactgcctgagcagcagactgagagtgtccgccaccttctggcagaacccccggaaccacttcagatgccaggtgcagttctacggcctgagcgagaacgacgagtggacccaggacagagccaagcccgtgacccagatcgtgtctgccgaagcctggggcagagccgattgcggctttaccagcgagagctaccagcagggcgtgctgagcgccaccatcctgtacgagatcctgctgggcaaggccaccctgtacgccgtgctggtgtctgccctggtgctgatggctatggtcaagcggaaggacagccgggga

SEQ ID NO: 2105 - DNA, 2286 bp, Artificial Sequence
  Synthetic Polynucloetide
atggccttaccagtgaccgccttgctcctgccgctggccttgctgctccacgccgccaggccggaagtgcagctggttgaatctggcggaggactggttcagcctggcggatctctgagactgtcttgtgccgccagcggcttcagcttcagcgacttttggatgagctgggtccgacaggcccctggcaaaggacttgaatgggtcgccacaatcagccaggccggcagcgagaaggactacgtggactctgtgaagggcagattcaccatcagccgggacaacgccaagaagtccctgtacctccagatgaacagcctgagagccgaggacaccgccgtgtactattgtgcctctggcgtgtacagcttcgactacagaggccagggcaccctggtcacagtctcttctggtaccggcggaggcggatctggcggcggaggtagcggtggcggaggatctgaattcgacatcgtgatgacccagagccccgatagcctggccgtgtctctgggagagagagccaccatcaactgccgggccagcaagagcgtgtccaccagcggctacagctacatgcactggtatcagcagaagcccggccagccccccaagctgctgatctacctggcctccaacctggaaagcggcgtgcccgatagattcagcggcagcggctctggcaccgacttcaccctgaccatcagttctcttcaggccgaggacgtggccgtgtactactgccagcacagcagagagctgccctacaccttcggccagggcaccaagctggaaatcaagctcgagatccagaaccctgatcctgccgtgtaccagctgcgggatagcaagagcagcgacaagagcgtgtgtctgttcaccgacttcgacagccagaccaacgtgtcccagagcaaggactccgacgtgtacatcaccgataagtgcgtgctggacatgcggagcatggacttcaagagcaactccgccgtggcctggtccaacaagtccgatttcgcctgcgccaacgccttcaacaacagcattatccccgaggacacattcttcccaagccccgagagcagctgcgacgtgaagctggtggaaaagagcttcgagacagacaccaacctgaacttccagaacctgagcgtgatcggcttcagaatcctgctgctgaaagtggccggctttaacctgctgatgaccctgcggctgtggtccagccgcgccaagagaagcggatctggcgtgaagcagaccctgaatttcgacctgctgaagctggctggcgacgtggaatccaacccaggccctactagtatggactggatttggcgcatccttttccttgtcggcgctgctaccggcgcgcattccttcgaacaggtgcaactccaggaatctggccctggccttgtgaagcccagcgagacactgagcctgacctgtaccgtgtccggcggcagcatcagctcttacggcgtgcactggattcggcagcctccaggcaagggcctggaatggatcggcgtgatctggacctccggcgtgaccgactacaacagcgccctgatgggcagagtgaccatctccgtggacaccagcaagaaccagttcagcctgaagctgagcagcgtgacagccgccgataccgccgtgtattattgcgccagagatggcgactacgaccgctacacaatggactactggggccagggaacccttgtgaccgtgtcctctacgcgtgaggacctgaagaacgtgttcccacctgaggtggccgtgttcgagcctagcgaggccgagatcagccacacccagaaagccaccctcgtgtgcctggctaccggcttctaccccgaccatgtggaactgtcttggtgggtcaacggcaaagaggtgcacagcggcgtgtgtaccgacccccagccactgaaagaacagcccgccctgaacgacagccggtactgcctgagcagcagactgagagtgtccgccaccttctggcagaacccccggaaccacttcagatgccaggtgcagttctacggcctgagcgagaacgacgagtggacccaggacagagccaagcccgtgacccagatcgtgtctgccgaagcctggggcagagccgattgcggctttaccagcgagagctaccagcagggcgtgctgagcgccaccatcctgtacgagatcctgctgggcaaggccaccctgtacgccgtgctggtgtctgccctggtgctgatggctatggtcaagcggaaggacagccgggga

SEQ ID NO: 2106 - DNA, 2286 bp, Artificial Sequence
  Synthetic Polynucloetide
atggccttaccagtgaccgccttgctcctgccgctggccttgctgctccacgccgccaggccggaagtgcagctggttgaatctggcggaggactggttcagcctggcggatctctgagactgtcttgtgccgccagcggcttcagcttcagcgacttttggatgagctgggtccgacaggcccctggcaaaggacttgaatgggtcgccacaatcagccaggccggcagcgagaaggactacgtggactctgtgaagggcagattcaccatcagccgggacaacgccaagaagtccctgtacctccagatgaacagcctgagagccgaggacaccgccgtgtactattgtgcctctggcgtgtacagcttcgactacagaggccagggcaccctggtcacagtctcttctggtaccggcggaggcggatctggcggcggaggtagcggtggcggaggatctgaattcgacatccagatgacccagagccccagcagcctgtctgccagcgtgggcgacagagtgaccatcacctgtagagccagccagagcatcggcaccagcctgcactggtatcagcagaagcctggcaaggcccccaagctgctgattaagttcgccagcagactgcagagcggcgtgcccagcagattttctggcagcggctccggcaccgacttcaccctgacaatcagctccctgcagcccgaggacttcgccacctactactgccagcagagccccggcttccctccaacctttggacagggcaccaagctggaaatcaagcggctcgagatccagaaccctgatcctgccgtgtaccagctgcgggatagcaagagcagcgacaagagcgtgtgtctgttcaccgacttcgacagccagaccaacgtgtcccagagcaaggactccgacgtgtacatcaccgataagtgcgtgctggacatgcggagcatggacttcaagagcaactccgccgtggcctggtccaacaagtccgatttcgcctgcgccaacgccttcaacaacagcattatccccgaggacacattcttcccaagccccgagagcagctgcgacgtgaagctggtggaaaagagcttcgagacagacaccaacctgaacttccagaacctgagcgtgatcggcttcagaatcctgctgctgaaagtggccggctttaacctgctgatgaccctgcggctgtggtccagccgcgccaagagaagcggatctggcgtgaagcagaccctgaatttcgacctgctgaagctggctggcgacgtggaatccaacccaggccctactagtatggactggatttggcgcatccttttccttgtcggcgctgctaccggcgcgcattccttcgaacaggtgcaactggtggaatctggcggcggacttgtgaagccaggcggcagcctgagactgagctgtgccgccagcggcttcagcatcaccaccagcggctactactggacctggatcagacagttccccggcaagggcctggaatggatgggctacatcggctacaacagcaagacctactacaaccccgccctgaagtcccggatcaccatcagcagagacaacgccaagaacagcctgtacctgcagatgaactccctgagagccgaggataccgccgtgtactactgcgccagatccctgtacggcggctacaaggacgccttcgatagctggggccagggaacccttgtgaccgtgtctagcacgcgtgaggacctgaagaacgtgttcccacctgaggtggccgtgttcgagcctagcgaggccgagatcagccacacccagaaagccaccctcgtgtgcctggctaccggcttctaccccgaccatgtggaactgtcttggtgggtcaacggcaaagaggtgcacagcggcgtgtgtaccgacccccagccactgaaagaacagcccgccctgaacgacagccggtactgcctgagcagcagactgagagtgtccgccaccttctggcagaacccccggaaccacttcagatgccaggtgcagttctacggcctgagcgagaacgacgagtggacccaggacagagccaagcccgtgacccagatcgtgtctgccgaagcctggggcagagccgattgcggctttaccagcgagagctaccagcagggcgtgctgagcgccaccatcctgtacgagatcctgctgggcaaggccaccctgtacgccgtgctggtgtctgccctggtgctgatggctatggtcaagcggaaggacagccgggga

SEQ ID NO: 2107 - DNA, 2301 bp, Artificial Sequence
  Synthetic Polynucloetide
atggccttaccagtgaccgccttgctcctgccgctggccttgctgctccacgccgccaggccggaagtgcagctggttgaatctggcggaggactggttcagcctggcggatctctgagactgtcttgtgccgccagcggcttcagcttcagcgacttttggatgagctgggtccgacaggcccctggcaaaggacttgaatgggtcgccacaatcagccaggccggcagcgagaaggactacgtggactctgtgaagggcagattcaccatcagccgggacaacgccaagaagtccctgtacctccagatgaacagcctgagagccgaggacaccgccgtgtactattgtgcctctggcgtgtacagcttcgactacagaggccagggcaccctggtcacagtctcttctggtaccggcggaggcggatctggcggcggaggtagcggtggcggaggatctgaattcgacgagatcgtgctgacccagagccctctgagcctgcctgtgacacctggcgagcctgccagcatctcctgtagaagcagccagagcctgctgcacagcatcggctacaactacctggactggtatctccagaagcccggccagagcccccaactgctgatctacctgggcagcaacagagccagcggcgtgcccgatagattttccggcagcggctccggcaccgacttcaccctgaagatcagccgggtggaagccgaggacgtgggcgtgtactactgtatgcaggccctccagacccccctgacctttggcggaggcaccaaggtggaaatcaagcggctcgagatccagaaccctgatcctgccgtgtaccagctgcgggatagcaagagcagcgacaagagcgtgtgtctgttcaccgacttcgacagccagaccaacgtgtcccagagcaaggactccgacgtgtacatcaccgataagtgcgtgctggacatgcggagcatggacttcaagagcaactccgccgtggcctggtccaacaagtccgatttcgcctgcgccaacgccttcaacaacagcattatccccgaggacacattcttcccaagccccgagagcagctgcgacgtgaagctggtggaaaagagcttcgagacagacaccaacctgaacttccagaacctgagcgtgatcggcttcagaatcctgctgctgaaagtggccggctttaacctgctgatgaccctgcggctgtggtccagccgcgccaagagaagcggatctggcgtgaagcagaccctgaatttcgacctgctgaagctggctggcgacgtggaatccaacccaggccctactagtatggactggatttggcgcatccttttccttgtcggcgctgctaccggcgcgcattccttcgaagaagtgcaactggtggaaagcggaggcggcgtggtgcagcctggaagaagcctgagactgagctgtgccgccagcggcttcaccttccggtcctacggaatgcactgggtgcgccaggcccctggcaaaggactggaatgggtggccgtgatctcctacgacggctccaacaagtactacaccgacagcgtgaacggcagattcaccatcagcagagacaacagcaagaacaccctgtacctccagatgaacagcctgcgggccgaggacaccgccgtgtactattgtgctagaggcggaggctactacgagacaagcggccctgattactggggccagggcacactcgtgaccgtgtctagtacgcgtgaggacctgaagaacgtgttcccacctgaggtggccgtgttcgagcctagcgaggccgagatcagccacacccagaaagccaccctcgtgtgcctggctaccggcttctaccccgaccatgtggaactgtcttggtgggtcaacggcaaagaggtgcacagcggcgtgtgtaccgacccccagccactgaaagaacagcccgccctgaacgacagccggtactgcctgagcagcagactgagagtgtccgccaccttctggcagaacccccggaaccacttcagatgccaggtgcagttctacggcctgagcgagaacgacgagtggacccaggacagagccaagcccgtgacccagatcgtgtctgccgaagcctggggcagagccgattgcggctttaccagcgagagctaccagcagggcgtgctgagcgccaccatcctgtacgagatcctgctgggcaaggccaccctgtacgccgtgctggtgtctgccctggtgctgatggctatggtcaagcggaaggacagccgggga

SEQ ID NO: 2108 - DNA, 2295 bp, Artificial Sequence
  Synthetic Polynucloetide
atggccttaccagtgaccgccttgctcctgccgctggccttgctgctccacgccgccaggccggaagtgcagctggttgaatctggcggaggactggttcagcctggcggatctctgagactgtcttgtgccgccagcggcttcagcttcagcgacttttggatgagctgggtccgacaggcccctggcaaaggacttgaatgggtcgccacaatcagccaggccggcagcgagaaggactacgtggactctgtgaagggcagattcaccatcagccgggacaacgccaagaagtccctgtacctccagatgaacagcctgagagccgaggacaccgccgtgtactattgtgcctctggcgtgtacagcttcgactacagaggccagggcaccctggtcacagtctcttctggtaccggcggaggcggatctggcggcggaggtagcggtggcggaggatctgaattcgacgacgtcgtgatgacccagagccctctgagcctgcctgtgacacctggcgagcctgccagcatctcctgtagaagcagccagagcctgctgcacagcatcggctacaactacctgcactggtttctccagaagcccggccagagcccccaactgctgatctacctgggcagcaacagagccagcggcgtgcccgatagattttccggcagcggctccggcaccgacttcaccctgaagatcagccgggtggaagccgaggacgtgggcgtgtactactgtatgcaggccctccagacccctcccacctttggacagggcaccagactggaaatcaagcggctcgagatccagaaccctgatcctgccgtgtaccagctgcgggatagcaagagcagcgacaagagcgtgtgtctgttcaccgacttcgacagccagaccaacgtgtcccagagcaaggactccgacgtgtacatcaccgataagtgcgtgctggacatgcggagcatggacttcaagagcaactccgccgtggcctggtccaacaagtccgatttcgcctgcgccaacgccttcaacaacagcattatccccgaggacacattcttcccaagccccgagagcagctgcgacgtgaagctggtggaaaagagcttcgagacagacaccaacctgaacttccagaacctgagcgtgatcggcttcagaatcctgctgctgaaagtggccggctttaacctgctgatgaccctgcggctgtggtccagccgcgccaagagaagcggatctggcgtgaagcagaccctgaatttcgacctgctgaagctggctggcgacgtggaatccaacccaggccctactagtatggactggatttggcgcatccttttccttgtcggcgctgctaccggcgcgcattccttcgaacaactccaactccaggaaagcggccctggcctcgtgaagcctagcggcacactgagcctgacatgtgccgtgtctggcggcagcatcagcagcagcaactggtggtcttgggtgcgccagcctcctggcaagggcctggaatggatcggcgaaatctaccacagcggcagcaccaactacaaccccagcctgaagtccagagtgaccatcagcgtggacaagagcaagaaccagttctccctgaagctgagcagcgtgacagccgccgataccgccgtgtactattgcgtgggcagcccctacggcgactacgtgctggattattggggccagggcaccctcgtgaccgtgtctagtacgcgtgaggacctgaagaacgtgttcccacctgaggtggccgtgttcgagcctagcgaggccgagatcagccacacccagaaagccaccctcgtgtgcctggctaccggcttctaccccgaccatgtggaactgtcttggtgggtcaacggcaaagaggtgcacagcggcgtgtgtaccgacccccagccactgaaagaacagcccgccctgaacgacagccggtactgcctgagcagcagactgagagtgtccgccaccttctggcagaacccccggaaccacttcagatgccaggtgcagttctacggcctgagcgagaacgacgagtggacccaggacagagccaagcccgtgacccagatcgtgtctgccgaagcctggggcagagccgattgcggctttaccagcgagagctaccagcagggcgtgctgagcgccaccatcctgtacgagatcctgctgggcaaggccaccctgtacgccgtgctggtgtctgccctggtgctgatggctatggtcaagcggaaggacagccgggga

SEQ ID NO: 2109 - DNA, 2289 bp, Artificial Sequence
  Synthetic Polynucloetide
atggccttaccagtgaccgccttgctcctgccgctggccttgctgctccacgccgccaggccggaagtgcagctggttgaatctggcggaggactggttcagcctggcggatctctgagactgtcttgtgccgccagcggcttcagcttcagcgacttttggatgagctgggtccgacaggcccctggcaaaggacttgaatgggtcgccacaatcagccaggccggcagcgagaaggactacgtggactctgtgaagggcagattcaccatcagccgggacaacgccaagaagtccctgtacctccagatgaacagcctgagagccgaggacaccgccgtgtactattgtgcctctggcgtgtacagcttcgactacagaggccagggcaccctggtcacagtctcttctggtaccggcggaggcggatctggcggcggaggtagcggtggcggaggatctgaattcgacgagatcgtgctgacacagagccctggcaccctgagcctgtctctgggagagagagccacactgagctgtcgggccagccagtctatcagcagcagcttcctggcctggtatcagcagaagcccggccaggcccctaagctgctgatctacgccgccagcacaagagccaccggcatccccgatagattcagcggctctggcagcggcaccgacttcaccctgaccatcagcagactggaacccgaggacttcgccgtgtactactgccagcagtacggcagaagcctgagcttcggcggaggcaccaaggtggaagtgaagctcgagatccagaaccctgatcctgccgtgtaccagctgcgggatagcaagagcagcgacaagagcgtgtgtctgttcaccgacttcgacagccagaccaacgtgtcccagagcaaggactccgacgtgtacatcaccgataagtgcgtgctggacatgcggagcatggacttcaagagcaactccgccgtggcctggtccaacaagtccgatttcgcctgcgccaacgccttcaacaacagcattatccccgaggacacattcttcccaagccccgagagcagctgcgacgtgaagctggtggaaaagagcttcgagacagacaccaacctgaacttccagaacctgagcgtgatcggcttcagaatcctgctgctgaaagtggccggctttaacctgctgatgaccctgcggctgtggtccagccgcgccaagagaagcggatctggcgtgaagcagaccctgaatttcgacctgctgaagctggctggcgacgtggaatccaacccaggccctactagtatggactggatttggcgcatccttttccttgtcggcgctgctaccggcgcgcattccttcgaacaggtgcaactccagcagtctggccccggactcgtgaagcctagccagacactgagcctgacctgcgccatcagcggcgatagcgtgtccggcaatagcgccacctggaactggatcagacagagcccatctcggggcctggaatggctgggccggacctactaccgcagcaagtggaaccacgactacgccgagagcgtgaagtcccggatcaccatcaaccccgacaccagcaagaaccagttctccttgcaactgaacagcgtgacccccgaggacacagccgtgtattattgcgccagaggcgacagcagctcttggtacgccttcgactattggggccagggcaccctcgtgaccgtgtctagtacgcgtgaggacctgaagaacgtgttcccacctgaggtggccgtgttcgagcctagcgaggccgagatcagccacacccagaaagccaccctcgtgtgcctggctaccggcttctaccccgaccatgtggaactgtcttggtgggtcaacggcaaagaggtgcacagcggcgtgtgtaccgacccccagccactgaaagaacagcccgccctgaacgacagccggtactgcctgagcagcagactgagagtgtccgccaccttctggcagaacccccggaaccacttcagatgccaggtgcagttctacggcctgagcgagaacgacgagtggacccaggacagagccaagcccgtgacccagatcgtgtctgccgaagcctggggcagagccgattgcggctttaccagcgagagctaccagcagggcgtgctgagcgccaccatcctgtacgagatcctgctgggcaaggccaccctgtacgccgtgctggtgtctgccctggtgctgatggctatggtcaagcggaaggacagccgggga

SEQ ID NO: 2110 - DNA, 2286 bp, Artificial Sequence
  Synthetic Polynucloetide
atggccttaccagtgaccgccttgctcctgccgctggccttgctgctccacgccgccaggccggaagtgcagctggttgaatctggcggaggactggttcagcctggcggatctctgagactgtcttgtgccgccagcggcttcagcttcagcgacttttggatgagctgggtccgacaggcccctggcaaaggacttgaatgggtcgccacaatcagccaggccggcagcgagaaggactacgtggactctgtgaagggcagattcaccatcagccgggacaacgccaagaagtccctgtacctccagatgaacagcctgagagccgaggacaccgccgtgtactattgtgcctctggcgtgtacagcttcgactacagaggccagggcaccctggtcacagtctcttctggtaccggcggaggcggatctggcggcggaggtagcggtggcggaggatctgaattcgaccagagcgtcgtgacacagcctcctagcgtgtcagtggcccctggcaagaccgccagaatcacctgtggccggaacaacatcggcagcaagagcgtgcactggtatcagcagaagcccggccaggctcctgtgctggtggtgtacgacgacagcgacagacccagcggcatccccgagagattcagcggcagcaactccggcaataccgccaccctgaccatcagcagagtggaagccggcgacgaggccgactactactgccaagtgtgggacagcagcagcgatcacgtggtgtttggcggaggcaccaagctgacagtgctgggtctcgagatccagaaccctgatcctgccgtgtaccagctgcgggatagcaagagcagcgacaagagcgtgtgtctgttcaccgacttcgacagccagaccaacgtgtcccagagcaaggactccgacgtgtacatcaccgataagtgcgtgctggacatgcggagcatggacttcaagagcaactccgccgtggcctggtccaacaagtccgatttcgcctgcgccaacgccttcaacaacagcattatccccgaggacacattcttcccaagccccgagagcagctgcgacgtgaagctggtggaaaagagcttcgagacagacaccaacctgaacttccagaacctgagcgtgatcggcttcagaatcctgctgctgaaagtggccggctttaacctgctgatgaccctgcggctgtggtccagccgcgccaagagaagcggatctggcgtgaagcagaccctgaatttcgacctgctgaagctggctggcgacgtggaatccaacccaggccctactagtatggactggatttggcgcatccttttccttgtcggcgctgctaccggcgcgcattccttcgaagtgcaactggtgcagtctggcggaggggtcatgcggcctggcggatctctgagactgtcttgtgccgccagcggcttcaccttcgacgactacggcatgagctgggtgcgccaggcccctggaaaaggcctggaatgggtgtccggcatcaactggaatggcggcagcaccggctacgccgattctgtgcggggcagattcaccatcagccgggacaacgccaagaacagcctgtacctgcagatgaactccctgcgggccgaggacaccgccctgtactattgcgccagagagcggggctacggctaccacgaccctcacgattattggggccagggcacccttgttaccgtgtcctctacgcgtgaggacctgaagaacgtgttcccacctgaggtggccgtgttcgagcctagcgaggccgagatcagccacacccagaaagccaccctcgtgtgcctggctaccggcttctaccccgaccatgtggaactgtcttggtgggtcaacggcaaagaggtgcacagcggcgtgtgtaccgacccccagccactgaaagaacagcccgccctgaacgacagccggtactgcctgagcagcagactgagagtgtccgccaccttctggcagaacccccggaaccacttcagatgccaggtgcagttctacggcctgagcgagaacgacgagtggacccaggacagagccaagcccgtgacccagatcgtgtctgccgaagcctggggcagagccgattgcggctttaccagcgagagctaccagcagggcgtgctgagcgccaccatcctgtacgagatcctgctgggcaaggccaccctgtacgccgtgctggtgtctgccctggtgctgatggctatggtcaagcggaaggacagccgggga

SEQ ID NO: 2111 - DNA, 2325 bp, Artificial Sequence
  Synthetic Polynucloetide
atggccttaccagtgaccgccttgctcctgccgctggccttgctgctccacgccgccaggccggaagtgcagctggttgaatctggcggaggactggttcagcctggcggatctctgagactgtcttgtgccgccagcggcttcagcttcagcgacttttggatgagctgggtccgacaggcccctggcaaaggacttgaatgggtcgccacaatcagccaggccggcagcgagaaggactacgtggactctgtgaagggcagattcaccatcagccgggacaacgccaagaagtccctgtacctccagatgaacagcctgagagccgaggacaccgccgtgtactattgtgcctctggcgtgtacagcttcgactacagaggccagggcaccctggtcacagtctcttctggtaccggcggaggcggatctggcggcggaggtagcggtggcggaggatctgaattcgaacagaaactcatcagtgaagaagacctggaattccaggctgtcgtgacacagcctcctagcgcctctggcacaccaggccagagagtgaccatctcctgtagcggcagcagcagcaacatcggcagcaacaccgtgaactggtatcagcaggtgcccggcaccgctcccaagctgctgatctacagcaacaaccagcggcccagcggcgtgcccgatagattttctggcagcaagagcggcaccagcgccagcctggctatctctggactccagtccgaggacgaggccgactactattgcgccgcctgggacgatagcctgaacggctgggtgttcggcggaggcaccaagctgacagtgctgctcgagatccagaaccctgatcctgccgtgtaccagctgcgggatagcaagagcagcgacaagagcgtgtgtctgttcaccgacttcgacagccagaccaacgtgtcccagagcaaggactccgacgtgtacatcaccgataagtgcgtgctggacatgcggagcatggacttcaagagcaactccgccgtggcctggtccaacaagtccgatttcgcctgcgccaacgccttcaacaacagcattatccccgaggacacattcttcccaagccccgagagcagctgcgacgtgaagctggtggaaaagagcttcgagacagacaccaacctgaacttccagaacctgagcgtgatcggcttcagaatcctgctgctgaaagtggccggctttaacctgctgatgaccctgcggctgtggtccagccgcgccaagagaagcggatctggcgtgaagcagaccctgaatttcgacctgctgaagctggctggcgacgtggaatccaacccaggccctactagtatggactggatttggcgcatccttttccttgtcggcgctgctaccggcgcgcattccttcgaacagatgcaactggtgcagagcggagccgaagtgaaagagcctggcgagagcctgcggatctcctgcaagggcagcggctacagcttcaccaatttctggatctcttgggtgcgccagatgcccggcaagggcctggaatggatgggcagagtggaccccggctactcctacagcacctacagccctagcttccagggccacgtgaccatcagcgccgacaagagcaccagcaccgcctacctccagtggaacagcctgaaggccagcgacaccgccatgtactactgcgccagagtgcagtacagcggctattacgattggttcgacccctggggccagggcacactcgtgacagtgtcaagcacgcgtgaggacctgaagaacgtgttcccacctgaggtggccgtgttcgagcctagcgaggccgagatcagccacacccagaaagccaccctcgtgtgcctggctaccggcttctaccccgaccatgtggaactgtcttggtgggtcaacggcaaagaggtgcacagcggcgtgtgtaccgacccccagccactgaaagaacagcccgccctgaacgacagccggtactgcctgagcagcagactgagagtgtccgccaccttctggcagaacccccggaaccacttcagatgccaggtgcagttctacggcctgagcgagaacgacgagtggacccaggacagagccaagcccgtgacccagatcgtgtctgccgaagcctggggcagagccgattgcggctttaccagcgagagctaccagcagggcgtgctgagcgccaccatcctgtacgagatcctgctgggcaaggccaccctgtacgccgtgctggtgtctgccctggtgctgatggctatggtcaagcggaaggacagccgggga

SEQ ID NO: 2112 - DNA, 2307 bp, Artificial Sequence
  Synthetic Polynucloetide
atggccttaccagtgaccgccttgctcctgccgctggccttgctgctccacgccgccaggccggaagtgcagctggttgaatctggcggaggactggttcagcctggcggatctctgagactgtcttgtgccgccagcggcttcagcttcagcgacttttggatgagctgggtccgacaggcccctggcaaaggacttgaatgggtcgccacaatcagccaggccggcagcgagaaggactacgtggactctgtgaagggcagattcaccatcagccgggacaacgccaagaagtccctgtacctccagatgaacagcctgagagccgaggacaccgccgtgtactattgtgcctctggcgtgtacagcttcgactacagaggccagggcaccctggtcacagtctcttctggtaccggcggaggcggatctggcggcggaggtagcggtggcggaggatctgaattcgaacagaaactcatcagtgaagaagacctggaattcgacatccagatgacccagagccccagcacactgagcgccagcgtgggcgacagagtgaccatcacctgtcgggccagccagaacatcaacaagtggctggcctggtatcagcagaggcccggaaaagccccccagctgctgatctacaaggccagcagcctggaaagcggcgtgcccagcagattttctggcagcggctctggcaccgagtacaccctgaccatcagctccctccagcccgacgacttcgccacctactactgccagcagtacaacagctacgccaccttcggccagggcaccaaggtggaaatcaagagactcgagatccagaaccctgatcctgccgtgtaccagctgcgggatagcaagagcagcgacaagagcgtgtgtctgttcaccgacttcgacagccagaccaacgtgtcccagagcaaggactccgacgtgtacatcaccgataagtgcgtgctggacatgcggagcatggacttcaagagcaactccgccgtggcctggtccaacaagtccgatttcgcctgcgccaacgccttcaacaacagcattatccccgaggacacattcttcccaagccccgagagcagctgcgacgtgaagctggtggaaaagagcttcgagacagacaccaacctgaacttccagaacctgagcgtgatcggcttcagaatcctgctgctgaaagtggccggctttaacctgctgatgaccctgcggctgtggtccagccgcgccaagagaagcggatctggcgtgaagcagaccctgaatttcgacctgctgaagctggctggcgacgtggaatccaacccaggccctactagtatggactggatttggcgcatccttttccttgtcggcgctgctaccggcgcgcattccttcgaacaggtgcagctggtgcagtctggggccgaagtgaagaagcctggcgagagcctgaagatcagctgcaagggctccggctacaacttctctaacaagtggatcggctgggtgcgccagctgcctggcagaggactggaatggatcgccatcatctaccccggctacagcgacatcacctacagccccagcttccagggccgcgtgacaatcagcgccgacaccagcatcaacaccgcctacctgcactggcacagcctgaaggccagcgacaccgccatgtactactgcgtgcggcatacagccctggctggcttcgattattggggcctgggcaccctcgtgaccgtgtctagtacgcgtgaggacctgaagaacgtgttcccacctgaggtggccgtgttcgagcctagcgaggccgagatcagccacacccagaaagccaccctcgtgtgcctggctaccggcttctaccccgaccatgtggaactgtcttggtgggtcaacggcaaagaggtgcacagcggcgtgtgtaccgacccccagccactgaaagaacagcccgccctgaacgacagccggtactgcctgagcagcagactgagagtgtccgccaccttctggcagaacccccggaaccacttcagatgccaggtgcagttctacggcctgagcgagaacgacgagtggacccaggacagagccaagcccgtgacccagatcgtgtctgccgaagcctggggcagagccgattgcggctttaccagcgagagctaccagcagggcgtgctgagcgccaccatcctgtacgagatcctgctgggcaaggccaccctgtacgccgtgctggtgtctgccctggtgctgatggctatggtcaagcggaaggacagccgggga

SEQ ID NO: 2113 - DNA, 2283 bp, Artificial Sequence
  Synthetic Polynucloetide
atggccttaccagtgaccgccttgctcctgccgctggccttgctgctccacgccgccaggccggaagtgcagctggttgaatctggcggaggactggttcagcctggcggatctctgagactgtcttgtgccgccagcggcttcagcttcagcgacttttggatgagctgggtccgacaggcccctggcaaaggacttgaatgggtcgccacaatcagccaggccggcagcgagaaggactacgtggactctgtgaagggcagattcaccatcagccgggacaacgccaagaagtccctgtacctccagatgaacagcctgagagccgaggacaccgccgtgtactattgtgcctctggcgtgtacagcttcgactacagaggccagggcaccctggtcacagtctcttctggtaccggcggaggcggatctggcggcggaggtagcggtggcggaggatctgaattcgacatcgtgctgacacagagccctgcttctctggccgtgtctctgggacagagagccaccatcagctgtagagccagcgagagcgtggacaactacggcaacaccttcatgcactggtatcagcagaagcccggccagcctcctaagctgctgatctacagagccagcaacctggaaagcggcatccccgccagattttctggcagcggcagcagaaccgacttcaccctgaccatcaatcccgtggaagccgacgacgtggcaacctactactgccagcagagcaacgaggaccctcctacatttggagccggcaccaagctggaactgaaactcgagatccagaaccctgatcctgccgtgtaccagctgcgggatagcaagagcagcgacaagagcgtgtgtctgttcaccgacttcgacagccagaccaacgtgtcccagagcaaggactccgacgtgtacatcaccgataagtgcgtgctggacatgcggagcatggacttcaagagcaactccgccgtggcctggtccaacaagtccgatttcgcctgcgccaacgccttcaacaacagcattatccccgaggacacattcttcccaagccccgagagcagctgcgacgtgaagctggtggaaaagagcttcgagacagacaccaacctgaacttccagaacctgagcgtgatcggcttcagaatcctgctgctgaaagtggccggctttaacctgctgatgaccctgcggctgtggtccagccgcgccaagagaagcggatctggcgtgaagcagaccctgaatttcgacctgctgaagctggctggcgacgtggaatccaacccaggccctactagtatggactggatttggcgcatccttttccttgtcggcgctgctaccggcgcgcattccttcgaacagattcagctggtgcagtctggccccgagctgaagaaacctggcgagacagtgaagatcagctgcaaggccagcggctacatcttcaccaattacggcatgaactgggtcaagcaggcccctggcaagagcttcaagtggatgggctggatcaacacctacaccggcgagagcacatacagcgccgacttcaagggcagattcgccttcagcctggaaaccagcgccagcacagcctacctgcacatcaacgacctgaagaacgaggacaccgccacctacttttgcgccagaagcggcggctacgaccctatggattattggggccagggcaccagcgtgaccgtttcttctacgcgtgaggacctgaagaacgtgttcccacctgaggtggccgtgttcgagcctagcgaggccgagatcagccacacccagaaagccaccctcgtgtgcctggctaccggcttctaccccgaccatgtggaactgtcttggtgggtcaacggcaaagaggtgcacagcggcgtgtgtaccgacccccagccactgaaagaacagcccgccctgaacgacagccggtactgcctgagcagcagactgagagtgtccgccaccttctggcagaacccccggaaccacttcagatgccaggtgcagttctacggcctgagcgagaacgacgagtggacccaggacagagccaagcccgtgacccagatcgtgtctgccgaagcctggggcagagccgattgcggctttaccagcgagagctaccagcagggcgtgctgagcgccaccatcctgtacgagatcctgctgggcaaggccaccctgtacgccgtgctggtgtctgccctggtgctgatggctatggtcaagcggaaggacagccgggga

SEQ ID NO: 2114 - DNA, 2280 bp, Artificial Sequence
  Synthetic Polynucloetide
atggccttaccagtgaccgccttgctcctgccgctggccttgctgctccacgccgccaggccggaagtgcagctggttgaatctggcggaggactggttcagcctggcggatctctgagactgtcttgtgccgccagcggcttcagcttcagcgacttttggatgagctgggtccgacaggcccctggcaaaggacttgaatgggtcgccacaatcagccaggccggcagcgagaaggactacgtggactctgtgaagggcagattcaccatcagccgggacaacgccaagaagtccctgtacctccagatgaacagcctgagagccgaggacaccgccgtgtactattgtgcctctggcgtgtacagcttcgactacagaggccagggcaccctggtcacagtctcttctggtaccggcggaggcggatctggcggcggaggtagcggtggcggaggatctgaattcgacgagatcgtgctgacacagagccctggcaccctgagcctgtctccaggcgaaagagccacactgagctgtcgggccagccagagcgtgtccaatacctacctggcctggtatcaccagaggcccggacaggctccccggctgctgatctatggcgcttctagcagagccaccggcatccccgatagattcagcggctctggcagcggcaccgacttcgccctgacaatcagctccctggaacccgaggacttcgccgtgtactactgccagcagtacagcaactcctggaccttcggccagggcaccaaggtggaaatcaagagactcgagatccagaaccctgatcctgccgtgtaccagctgcgggatagcaagagcagcgacaagagcgtgtgtctgttcaccgacttcgacagccagaccaacgtgtcccagagcaaggactccgacgtgtacatcaccgataagtgcgtgctggacatgcggagcatggacttcaagagcaactccgccgtggcctggtccaacaagtccgatttcgcctgcgccaacgccttcaacaacagcattatccccgaggacacattcttcccaagccccgagagcagctgcgacgtgaagctggtggaaaagagcttcgagacagacaccaacctgaacttccagaacctgagcgtgatcggcttcagaatcctgctgctgaaagtggccggctttaacctgctgatgaccctgcggctgtggtccagccgcgccaagagaagcggatctggcgtgaagcagaccctgaatttcgacctgctgaagctggctggcgacgtggaatccaacccaggccctactagtatggactggatttggcgcatccttttccttgtcggcgctgctaccggcgcgcattccttcgaacaggtgcaactggtggaatctggcgggggagtggtgcagcctggcagaagcctgagactgtcttgtgccgccagcggcttcaccttcagcagctacgacatgcactgggtgcgccaggcccctggcaaaggactggaatgggtggccgtgatctcctacgacggcaccaacgagtattacgccgacagcgtgaagggccggttcaccatctccagagacaccagcaagaacaccctgtacctccagatgaacagcctgcgggccgaggacacagccgtgtattattgcgccagagagcggtacttcgactggtccttcgactactggggccagggaaccctggtgtccgtgtctagtacgcgtgaggacctgaagaacgtgttcccacctgaggtggccgtgttcgagcctagcgaggccgagatcagccacacccagaaagccaccctcgtgtgcctggctaccggcttctaccccgaccatgtggaactgtcttggtgggtcaacggcaaagaggtgcacagcggcgtgtgtaccgacccccagccactgaaagaacagcccgccctgaacgacagccggtactgcctgagcagcagactgagagtgtccgccaccttctggcagaacccccggaaccacttcagatgccaggtgcagttctacggcctgagcgagaacgacgagtggacccaggacagagccaagcccgtgacccagatcgtgtctgccgaagcctggggcagagccgattgcggctttaccagcgagagctaccagcagggcgtgctgagcgccaccatcctgtacgagatcctgctgggcaaggccaccctgtacgccgtgctggtgtctgccctggtgctgatggctatggtcaagcggaaggacagccgggga

SEQ ID NO: 2115 - DNA, 2277 bp, Artificial Sequence
  Synthetic Polynucloetide
atggccttaccagtgaccgccttgctcctgccgctggccttgctgctccacgccgccaggccggaagtgcagctggttgaatctggcggaggactggttcagcctggcggatctctgagactgtcttgtgccgccagcggcttcagcttcagcgacttttggatgagctgggtccgacaggcccctggcaaaggacttgaatgggtcgccacaatcagccaggccggcagcgagaaggactacgtggactctgtgaagggcagattcaccatcagccgggacaacgccaagaagtccctgtacctccagatgaacagcctgagagccgaggacaccgccgtgtactattgtgcctctggcgtgtacagcttcgactacagaggccagggcaccctggtcacagtctcttctggtaccggcggaggcggatctggcggcggaggtagcggtggcggaggatctgaattcgacgagctgacacaggaccctgctgtgtctgttgccctgggccagacagtgcggattacctgtcaaggcgacagcctgagaagcaactacgccaactggtatcagcagaagcccggacaggctcccgtgctggttatctacggccagaacaacagacccagcggcatccccgatagattcagcggctctagctctggcaataccgccagcctgacaatcactggcgctcaggctgccgatgaggccgactactactgcgatagcagagtgtccaccggcaatcacgtggtgtttggcggcggaacaaagctgacagtgctcggacaactcgagatccagaaccctgatcctgccgtgtaccagctgcgggatagcaagagcagcgacaagagcgtgtgtctgttcaccgacttcgacagccagaccaacgtgtcccagagcaaggactccgacgtgtacatcaccgataagtgcgtgctggacatgcggagcatggacttcaagagcaactccgccgtggcctggtccaacaagtccgatttcgcctgcgccaacgccttcaacaacagcattatccccgaggacacattcttcccaagccccgagagcagctgcgacgtgaagctggtggaaaagagcttcgagacagacaccaacctgaacttccagaacctgagcgtgatcggcttcagaatcctgctgctgaaagtggccggctttaacctgctgatgaccctgcggctgtggtccagccgcgccaagagaagcggatctggcgtgaagcagaccctgaatttcgacctgctgaagctggctggcgacgtggaatccaacccaggccctactagtatggactggatttggcgcatccttttccttgtcggcgctgctaccggcgcgcattccttcgaagaagttcagctggtgcagagcggagccgaagtgaagaaacctggggcctctgtgaaggtgtcctgcaaggcttccggctacacctttaccagctacgccatgcactgggtccgacaggcacctggacaacggcttgaatggatgggctggatcaacgccggcaacggcaacaccaagtacagccagaaattccagggccgcgtgaccatcaccagagatacaagcgccagcaccgcctacatggaactgtctagcctgagatccgaggacaccgccgtgtactactgtgccagagacatcagctacggcagcttcgactattggggccagggcacactggtcaccgttagctctacgcgtgaggacctgaagaacgtgttcccacctgaggtggccgtgttcgagcctagcgaggccgagatcagccacacccagaaagccaccctcgtgtgcctggctaccggcttctaccccgaccatgtggaactgtcttggtgggtcaacggcaaagaggtgcacagcggcgtgtgtaccgacccccagccactgaaagaacagcccgccctgaacgacagccggtactgcctgagcagcagactgagagtgtccgccaccttctggcagaacccccggaaccacttcagatgccaggtgcagttctacggcctgagcgagaacgacgagtggacccaggacagagccaagcccgtgacccagatcgtgtctgccgaagcctggggcagagccgattgcggctttaccagcgagagctaccagcagggcgtgctgagcgccaccatcctgtacgagatcctgctgggcaaggccaccctgtacgccgtgctggtgtctgccctggtgctgatggctatggtcaagcggaaggacagccgggga

SEQ ID NO: 2116 - DNA, 2283 bp, Artificial Sequence
  Synthetic Polynucloetide
atggccttaccagtgaccgccttgctcctgccgctggccttgctgctccacgccgccaggccggaagtgcagctggttgaatctggcggaggactggttcagcctggcggatctctgagactgtcttgtgccgccagcggcttcagcttcagcgacttttggatgagctgggtccgacaggcccctggcaaaggacttgaatgggtcgccacaatcagccaggccggcagcgagaaggactacgtggactctgtgaagggcagattcaccatcagccgggacaacgccaagaagtccctgtacctccagatgaacagcctgagagccgaggacaccgccgtgtactattgtgcctctggcgtgtacagcttcgactacagaggccagggcaccctggtcacagtctcttctggtaccggcggaggcggatctggcggcggaggtagcggtggcggaggatctgaattcgacgacatcgtgctgacacagacaccagccacactgagcgtgacacctggcgattctgtgtccctgagctgtagagccagccagagcatcagcaacaacctgcactggtatcagcagaagtcccacgagagccccagactgctgattaagaacgccagccagtctatcagcggcatccccagcaagtttagcggctctggcagcggcaccgacttcaccctgagaatcaacagcgtggaaaccgaggacttcgggatgtacttctgccagcagagcaatagctggccctacacatttggctccggcaccaagctggaaatcaaactcgagatccagaaccctgatcctgccgtgtaccagctgcgggatagcaagagcagcgacaagagcgtgtgtctgttcaccgacttcgacagccagaccaacgtgtcccagagcaaggactccgacgtgtacatcaccgataagtgcgtgctggacatgcggagcatggacttcaagagcaactccgccgtggcctggtccaacaagtccgatttcgcctgcgccaacgccttcaacaacagcattatccccgaggacacattcttcccaagccccgagagcagctgcgacgtgaagctggtggaaaagagcttcgagacagacaccaacctgaacttccagaacctgagcgtgatcggcttcagaatcctgctgctgaaagtggccggctttaacctgctgatgaccctgcggctgtggtccagccgcgccaagagaagcggatctggcgtgaagcagaccctgaatttcgacctgctgaagctggctggcgacgtggaatccaacccaggccctactagtatggactggatttggcgcatccttttccttgtcggcgctgctaccggcgcgcattccttcgaacaagtgaagctgcaacagagcggacccgagctggttaagccaggcgcttccgtgaagattagctgcaaggccagcggctacagcttcaccggctactacatgcactgggtcaagcagagccacggcaacatcctggactggatcggctacatctacccctacaacggcgtgtccagctacaaccagaagttcaagggcaaagccactctgaccgtggacaagagcagcagcaccgcctacatggaactgagaagcctgaccagcgaggacagcgccgtgtactattgtgccagagagcggggcctgtaccagctcagagcaatggattattggggccagggcaccagcgtgaccgtttcttctacgcgtgaggacctgaagaacgtgttcccacctgaggtggccgtgttcgagcctagcgaggccgagatcagccacacccagaaagccaccctcgtgtgcctggctaccggcttctaccccgaccatgtggaactgtcttggtgggtcaacggcaaagaggtgcacagcggcgtgtgtaccgacccccagccactgaaagaacagcccgccctgaacgacagccggtactgcctgagcagcagactgagagtgtccgccaccttctggcagaacccccggaaccacttcagatgccaggtgcagttctacggcctgagcgagaacgacgagtggacccaggacagagccaagcccgtgacccagatcgtgtctgccgaagcctggggcagagccgattgcggctttaccagcgagagctaccagcagggcgtgctgagcgccaccatcctgtacgagatcctgctgggcaaggccaccctgtacgccgtgctggtgtctgccctggtgctgatggctatggtcaagcggaaggacagccgggga

SEQ ID NO: 2117 - DNA, 2256 bp, Artificial Sequence
  Synthetic Polynucloetide
atggccttaccagtgaccgccttgctcctgccgctggccttgctgctccacgccgccaggccggaagtgcagctggttgaatctggcggaggactggttcagcctggcggatctctgagactgtcttgtgccgccagcggcttcagcttcagcgacttttggatgagctgggtccgacaggcccctggcaaaggacttgaatgggtcgccacaatcagccaggccggcagcgagaaggactacgtggactctgtgaagggcagattcaccatcagccgggacaacgccaagaagtccctgtacctccagatgaacagcctgagagccgaggacaccgccgtgtactattgtgcctctggcgtgtacagcttcgactacagaggccagggcaccctggtcacagtctcttctggtaccggcggaggcggatctggcggcggaggtagcggtggcggaggatctgaattcgacgacatcgtgatgacacagacccctgccatcatgagcgcctctccaggccagaaagtgaccatcacatgtagcgccagcagcagcgtgaactacatgcactggtatcagcagaagctgggcagcagccccaagctgtggatctacgataccagcaaactggcccctggcgtgccagccagattttctggttctggcagcggcaccagctacagcctgacaatcagcagcatggaagccgaggatgccgccagctacttctgccatcagtggtctagctacccctacacctttggctccggcaccaagctggaaatcaaactcgagatccagaaccctgatcctgccgtgtaccagctgcgggatagcaagagcagcgacaagagcgtgtgtctgttcaccgacttcgacagccagaccaacgtgtcccagagcaaggactccgacgtgtacatcaccgataagtgcgtgctggacatgcggagcatggacttcaagagcaactccgccgtggcctggtccaacaagtccgatttcgcctgcgccaacgccttcaacaacagcattatccccgaggacacattcttcccaagccccgagagcagctgcgacgtgaagctggtggaaaagagcttcgagacagacaccaacctgaacttccagaacctgagcgtgatcggcttcagaatcctgctgctgaaagtggccggctttaacctgctgatgaccctgcggctgtggtccagccgcgccaagagaagcggatctggcgtgaagcagaccctgaatttcgacctgctgaagctggctggcgacgtggaatccaacccaggccctactagtatggactggatttggcgcatccttttccttgtcggcgctgctaccggcgcgcattccttcgaagaagttcagctccaagagtctggccccgacctggtcaagcctagccaaagcctgagcctgacctgtaccgtgaccggctacagcatcacaagcggctatggatggcactggatcagacagttccccggcaacaaactggaatggatgggctacatccactacagcggcagcaccacctacaatcccagcctgaagtcccggatcagcatcagcagagacaccagcaagaaccagttcttcctgcaactgaacagcgtgaccaccgaggacaccgccacctactattgtgctcggagcctgagatattggggccagggcacaaccctgaccgtgtcatctacgcgtgaggacctgaagaacgtgttcccacctgaggtggccgtgttcgagcctagcgaggccgagatcagccacacccagaaagccaccctcgtgtgcctggctaccggcttctaccccgaccatgtggaactgtcttggtgggtcaacggcaaagaggtgcacagcggcgtgtgtaccgacccccagccactgaaagaacagcccgccctgaacgacagccggtactgcctgagcagcagactgagagtgtccgccaccttctggcagaacccccggaaccacttcagatgccaggtgcagttctacggcctgagcgagaacgacgagtggacccaggacagagccaagcccgtgacccagatcgtgtctgccgaagcctggggcagagccgattgcggctttaccagcgagagctaccagcagggcgtgctgagcgccaccatcctgtacgagatcctgctgggcaaggccaccctgtacgccgtgctggtgtctgccctggtgctgatggctatggtcaagcggaaggacagccgggga

SEQ ID NO: 2118 - DNA, 2265 bp, Artificial Sequence
  Synthetic Polynucloetide
atggccttaccagtgaccgccttgctcctgccgctggccttgctgctccacgccgccaggccggaagtgcagctggttgaatctggcggaggactggttcagcctggcggatctctgagactgtcttgtgccgccagcggcttcagcttcagcgacttttggatgagctgggtccgacaggcccctggcaaaggacttgaatgggtcgccacaatcagccaggccggcagcgagaaggactacgtggactctgtgaagggcagattcaccatcagccgggacaacgccaagaagtccctgtacctccagatgaacagcctgagagccgaggacaccgccgtgtactattgtgcctctggcgtgtacagcttcgactacagaggccagggcaccctggtcacagtctcttctggtaccggcggaggcggatctggcggcggaggtagcggtggcggaggatctgaattcgacgacatccagatgacacagagccctagcagcctgtctgccagcgtgggagacagagtgaccatcacctgtagcgccaccagcagcatcagctacatgcactggtatcagcagaagcccggcaaggcccctaaaggctggatctacgataccagcaaactggcccacggcgtgcccagcagattttctggttctggcagcggcaccgacttcaccctgacaatatctagcctccagcctgaggacttcgccacctactactgccaccagagaagaagctaccccttcaccttcggccagggcaccaaggtggaaatcaaactcgagatccagaaccctgatcctgccgtgtaccagctgcgggatagcaagagcagcgacaagagcgtgtgtctgttcaccgacttcgacagccagaccaacgtgtcccagagcaaggactccgacgtgtacatcaccgataagtgcgtgctggacatgcggagcatggacttcaagagcaactccgccgtggcctggtccaacaagtccgatttcgcctgcgccaacgccttcaacaacagcattatccccgaggacacattcttcccaagccccgagagcagctgcgacgtgaagctggtggaaaagagcttcgagacagacaccaacctgaacttccagaacctgagcgtgatcggcttcagaatcctgctgctgaaagtggccggctttaacctgctgatgaccctgcggctgtggtccagccgcgccaagagaagcggatctggcgtgaagcagaccctgaatttcgacctgctgaagctggctggcgacgtggaatccaacccaggccctactagtatggactggatttggcgcatccttttccttgtcggcgctgctaccggcgcgcattccttcgaagaagtgcaactggttcagagcggagccgaagtgaagaaacctggggcctctgtgaaggtgtcctgcaaggcttccggctacacctttaccaatttctggattcactgggtccgacaggctccaggccaaggactggaatggatcggagagatcgaccccagcgacagctacaccaactacaaccagaaattcaaaggccgggtcaccatcaccagagacaccagcacaagcaccgcctacctggaactgagcagcctgagaagcgaggacaccgccgtgtactactgcgccagggaaatcaccaccgtggattattggggccagggaaccctggtcaccgtgtcatctacgcgtgaggacctgaagaacgtgttcccacctgaggtggccgtgttcgagcctagcgaggccgagatcagccacacccagaaagccaccctcgtgtgcctggctaccggcttctaccccgaccatgtggaactgtcttggtgggtcaacggcaaagaggtgcacagcggcgtgtgtaccgacccccagccactgaaagaacagcccgccctgaacgacagccggtactgcctgagcagcagactgagagtgtccgccaccttctggcagaacccccggaaccacttcagatgccaggtgcagttctacggcctgagcgagaacgacgagtggacccaggacagagccaagcccgtgacccagatcgtgtctgccgaagcctggggcagagccgattgcggctttaccagcgagagctaccagcagggcgtgctgagcgccaccatcctgtacgagatcctgctgggcaaggccaccctgtacgccgtgctggtgtctgccctggtgctgatggctatggtcaagcggaaggacagccgggga

SEQ ID NO: 2119 - DNA, 2286 bp, Artificial Sequence
  Synthetic Polynucloetide
atggccttaccagtgaccgccttgctcctgccgctggccttgctgctccacgccgccaggccggaagtgcagctggttgaatctggcggaggactggttcagcctggcggatctctgagactgtcttgtgccgccagcggcttcagcttcagcgacttttggatgagctgggtccgacaggcccctggcaaaggacttgaatgggtcgccacaatcagccaggccggcagcgagaaggactacgtggactctgtgaagggcagattcaccatcagccgggacaacgccaagaagtccctgtacctccagatgaacagcctgagagccgaggacaccgccgtgtactattgtgcctctggcgtgtacagcttcgactacagaggccagggcaccctggtcacagtctcttctggtaccggcggaggcggatctggcggcggaggtagcggtggcggaggatctgaattcgacgacatccagatgacacagagccctagcagcctgtctgccagcgtgggagacagagtgaccatcacatgcaaggccagccagggcttcaacaaatacgtggcctggtatcagcagaagcccggcaaggctcctaagctgctgatctactacaccagcacactccagcctggcgtgcccagcagattttctggctctggcagcggcagagactacaccctgacaatatccagcctccagccagaggacttcgccacctactactgtctccagtacggcaacctgctgtacgcctttggacagggcaccaaggtggaaatcaagagactcgagatccagaaccctgatcctgccgtgtaccagctgcgggatagcaagagcagcgacaagagcgtgtgtctgttcaccgacttcgacagccagaccaacgtgtcccagagcaaggactccgacgtgtacatcaccgataagtgcgtgctggacatgcggagcatggacttcaagagcaactccgccgtggcctggtccaacaagtccgatttcgcctgcgccaacgccttcaacaacagcattatccccgaggacacattcttcccaagccccgagagcagctgcgacgtgaagctggtggaaaagagcttcgagacagacaccaacctgaacttccagaacctgagcgtgatcggcttcagaatcctgctgctgaaagtggccggctttaacctgctgatgaccctgcggctgtggtccagccgcgccaagagaagcggatctggcgtgaagcagaccctgaatttcgacctgctgaagctggctggcgacgtggaatccaacccaggccctactagtatggactggatttggcgcatccttttccttgtcggcgctgctaccggcgcgcattccttcgaagaagttcagcttgtgcagagcggagccgaagtgaagaaacctggggcctctgtgaaggtgtcctgcaaagccagcggctacacctttaccagctactggatcggctgggtccgacaggctcctggacaaggactggaatggatcggcgacatctatcccggcggaggctacaccaactacaacgagaagttcaagggccgcgtgacaatcaccagagacacctctacaagcaccgcctacctggaactgagcagcctgagaagcgaggacaccgccgtgtactactgcgccagactggatggcagcagctacagaggcgctatggattcttggggccagggcacactggtcaccgtttcttctacgcgtgaggacctgaagaacgtgttcccacctgaggtggccgtgttcgagcctagcgaggccgagatcagccacacccagaaagccaccctcgtgtgcctggctaccggcttctaccccgaccatgtggaactgtcttggtgggtcaacggcaaagaggtgcacagcggcgtgtgtaccgacccccagccactgaaagaacagcccgccctgaacgacagccggtactgcctgagcagcagactgagagtgtccgccaccttctggcagaacccccggaaccacttcagatgccaggtgcagttctacggcctgagcgagaacgacgagtggacccaggacagagccaagcccgtgacccagatcgtgtctgccgaagcctggggcagagccgattgcggctttaccagcgagagctaccagcagggcgtgctgagcgccaccatcctgtacgagatcctgctgggcaaggccaccctgtacgccgtgctggtgtctgccctggtgctgatggctatggtcaagcggaaggacagccgggga

SEQ ID NO: 2120 - DNA, 2274 bp, Artificial Sequence
  Synthetic Polynucloetide
atggccttaccagtgaccgccttgctcctgccgctggccttgctgctccacgccgccaggccggaagtgcagctggttgaatctggcggaggactggttcagcctggcggatctctgagactgtcttgtgccgccagcggcttcagcttcagcgacttttggatgagctgggtccgacaggcccctggcaaaggacttgaatgggtcgccacaatcagccaggccggcagcgagaaggactacgtggactctgtgaagggcagattcaccatcagccgggacaacgccaagaagtccctgtacctccagatgaacagcctgagagccgaggacaccgccgtgtactattgtgcctctggcgtgtacagcttcgactacagaggccagggcaccctggtcacagtctcttctggtaccggcggaggcggatctggcggcggaggtagcggtggcggaggatctgaattcgacgacatccagatgacacagagccctagcagcctgtctgccagcgtgggagacagagtgaccatcacctgtagagccagccaggacatccggtactacctgaactggtatcagcagaagcccggcaaggcccctaagctgctgatctatgtggcctccagcctccagagcggagtgccttctagattttctggcagcggctccggcaccgagtttaccctgacagtgtctagcttgcagcccgaggacttcgccacctactactgcctgcaagtgtacagcacccctcggacctttggacagggcaccaaggtggaaatcaaactcgagatccagaaccctgatcctgccgtgtaccagctgcgggatagcaagagcagcgacaagagcgtgtgtctgttcaccgacttcgacagccagaccaacgtgtcccagagcaaggactccgacgtgtacatcaccgataagtgcgtgctggacatgcggagcatggacttcaagagcaactccgccgtggcctggtccaacaagtccgatttcgcctgcgccaacgccttcaacaacagcattatccccgaggacacattcttcccaagccccgagagcagctgcgacgtgaagctggtggaaaagagcttcgagacagacaccaacctgaacttccagaacctgagcgtgatcggcttcagaatcctgctgctgaaagtggccggctttaacctgctgatgaccctgcggctgtggtccagccgcgccaagagaagcggatctggcgtgaagcagaccctgaatttcgacctgctgaagctggctggcgacgtggaatccaacccaggccctactagtatggactggatttggcgcatccttttccttgtcggcgctgctaccggcgcgcattccttcgaagaagtgcagcttgttgaatctggcggcggactggctaagcctggcggatctctgagactgtcttgtgccgccagcggcttccggttcaccttcaacaactactacatggactgggtccgacaggcccctggacaaggacttgaatgggtgtccagaatcagcagcagcggcgaccctacttggtacgccgattctgtgaagggcagattcaccatcagcagagagaacgccaagaacaccctgttcctccagatgaactccctgagagccgaggacaccgccgtgtactattgtgcctctctgaccaccggcagcgattcttggggacagggcgtgctggttaccgtgtcatctacgcgtgaggacctgaagaacgtgttcccacctgaggtggccgtgttcgagcctagcgaggccgagatcagccacacccagaaagccaccctcgtgtgcctggctaccggcttctaccccgaccatgtggaactgtcttggtgggtcaacggcaaagaggtgcacagcggcgtgtgtaccgacccccagccactgaaagaacagcccgccctgaacgacagccggtactgcctgagcagcagactgagagtgtccgccaccttctggcagaacccccggaaccacttcagatgccaggtgcagttctacggcctgagcgagaacgacgagtggacccaggacagagccaagcccgtgacccagatcgtgtctgccgaagcctggggcagagccgattgcggctttaccagcgagagctaccagcagggcgtgctgagcgccaccatcctgtacgagatcctgctgggcaaggccaccctgtacgccgtgctggtgtctgccctggtgctgatggctatggtcaagcggaaggacagccgggga

SEQ ID NO: 2121 - DNA, 2274 bp, Artificial Sequence
  Synthetic Polynucloetide
atggccttaccagtgaccgccttgctcctgccgctggccttgctgctccacgccgccaggccggaagtgcagctggttgaatctggcggaggactggttcagcctggcggatctctgagactgtcttgtgccgccagcggcttcagcttcagcgacttttggatgagctgggtccgacaggcccctggcaaaggacttgaatgggtcgccacaatcagccaggccggcagcgagaaggactacgtggactctgtgaagggcagattcaccatcagccgggacaacgccaagaagtccctgtacctccagatgaacagcctgagagccgaggacaccgccgtgtactattgtgcctctggcgtgtacagcttcgactacagaggccagggcaccctggtcacagtctcttctggtaccggcggaggcggatctggcggcggaggtagcggtggcggaggatctgaattcgagatcgtgatgacacagagccccgccacactgagtgtgtctccaggcgaaagagccacactgtcctgtagagccagccagagcgtgtccagaaacctggcctggtatcagcagaagcctggacaggctccccggctgttgatctacggcgcttctacaagagccaccggcattcccgccagattttctggctctggcagcggcaccgagttcaccctgacaatcggaagcctccagagcgaggacttcgccgtgtactactgccagcagtacaagacctggcctcggacctttggacagggcaccaacgtggaaatcaaactcgagatccagaaccctgatcctgccgtgtaccagctgcgggatagcaagagcagcgacaagagcgtgtgtctgttcaccgacttcgacagccagaccaacgtgtcccagagcaaggactccgacgtgtacatcaccgataagtgcgtgctggacatgcggagcatggacttcaagagcaactccgccgtggcctggtccaacaagtccgatttcgcctgcgccaacgccttcaacaacagcattatccccgaggacacattcttcccaagccccgagagcagctgcgacgtgaagctggtggaaaagagcttcgagacagacaccaacctgaacttccagaacctgagcgtgatcggcttcagaatcctgctgctgaaagtggccggctttaacctgctgatgaccctgcggctgtggtccagccgcgccaagagaagcggatctggcgtgaagcagaccctgaatttcgacctgctgaagctggctggcgacgtggaatccaacccaggccctactagtatggactggatttggcgcatccttttccttgtcggcgctgctaccggcgcgcattccttcgaacaagttcagctgcaacaatggggagccggcctgctgaagcctagcgaaacactgtctctgacctgcgccgtgttcggcggctctttcagcggctactactggtcctggatcagacagcctcctggcaaaggactggaatggatcggcgagatcaaccaccggggcaacaccaacgacaaccccagcctgaaaagcagagtgaccatcagcgtggacaccagcaagaaccagttcgccctgaagctgagcagcgtgacagccgctgataccgccgtgtattattgcgccagagagcggggctacacctacggcaatttcgatcactggggccagggcaccctggtcacagtttcttctacgcgtgaggacctgaagaacgtgttcccacctgaggtggccgtgttcgagcctagcgaggccgagatcagccacacccagaaagccaccctcgtgtgcctggctaccggcttctaccccgaccatgtggaactgtcttggtgggtcaacggcaaagaggtgcacagcggcgtgtgtaccgacccccagccactgaaagaacagcccgccctgaacgacagccggtactgcctgagcagcagactgagagtgtccgccaccttctggcagaacccccggaaccacttcagatgccaggtgcagttctacggcctgagcgagaacgacgagtggacccaggacagagccaagcccgtgacccagatcgtgtctgccgaagcctggggcagagccgattgcggctttaccagcgagagctaccagcagggcgtgctgagcgccaccatcctgtacgagatcctgctgggcaaggccaccctgtacgccgtgctggtgtctgccctggtgctgatggctatggtcaagcggaaggacagccgggga

SEQ ID NO: 2122 - DNA, 2277 bp, Artificial Sequence
  Synthetic Polynucloetide
atggccttaccagtgaccgccttgctcctgccgctggccttgctgctccacgccgccaggccggaagtgcagctggttgaatctggcggaggactggttcagcctggcggatctctgagactgtcttgtgccgccagcggcttcagcttcagcgacttttggatgagctgggtccgacaggcccctggcaaaggacttgaatgggtcgccacaatcagccaggccggcagcgagaaggactacgtggactctgtgaagggcagattcaccatcagccgggacaacgccaagaagtccctgtacctccagatgaacagcctgagagccgaggacaccgccgtgtactattgtgcctctggcgtgtacagcttcgactacagaggccagggcaccctggtcacagtctcttctggtaccggcggaggcggatctggcggcggaggtagcggtggcggaggatctgaattcgagatcgtgatgacccctagcagcgccacactgagtgtgtctccaggcgaaagagccacactgtcctgtagagccagccagagcgtgtccagaaacctggcctggtatcagcagaagcctggacaggctccccggctgttgatctacggcgcttctacaagagccaccggcattcccgccagattttctggctctggcagcggcaccgagttcaccctgacaatctctagcctccagagcgaggacttcgccgtgtactactgccaccagtacagcaactggatgtgcagcttcggccagggcaccaagctggaaatcaaactcgagatccagaaccctgatcctgccgtgtaccagctgcgggatagcaagagcagcgacaagagcgtgtgtctgttcaccgacttcgacagccagaccaacgtgtcccagagcaaggactccgacgtgtacatcaccgataagtgcgtgctggacatgcggagcatggacttcaagagcaactccgccgtggcctggtccaacaagtccgatttcgcctgcgccaacgccttcaacaacagcattatccccgaggacacattcttcccaagccccgagagcagctgcgacgtgaagctggtggaaaagagcttcgagacagacaccaacctgaacttccagaacctgagcgtgatcggcttcagaatcctgctgctgaaagtggccggctttaacctgctgatgaccctgcggctgtggtccagccgcgccaagagaagcggatctggcgtgaagcagaccctgaatttcgacctgctgaagctggctggcgacgtggaatccaacccaggccctactagtatggactggatttggcgcatccttttccttgtcggcgctgctaccggcgcgcattccttcgaagaagttcagctccttgagtcaggtggcggcctggttcaacctggcggatctctgagactgagctgtgccgccagcggcttcacctttagcagatacgccatgaactgggtccgacaggcccctggcaaaggactggaatgggtgtccggcatctctggaagcggcggcagaacctactacgccgattctgtgaagggcagattcaccatcagccgggacaacagcaagaacaccctgtacctccagatgaacagcctgagagccgaggacacagccgtgtattattgcgccaaggaccgggacttttggagcggcccttttgactattggggccagggaaccctggtcaccgttagctctacgcgtgaggacctgaagaacgtgttcccacctgaggtggccgtgttcgagcctagcgaggccgagatcagccacacccagaaagccaccctcgtgtgcctggctaccggcttctaccccgaccatgtggaactgtcttggtgggtcaacggcaaagaggtgcacagcggcgtgtgtaccgacccccagccactgaaagaacagcccgccctgaacgacagccggtactgcctgagcagcagactgagagtgtccgccaccttctggcagaacccccggaaccacttcagatgccaggtgcagttctacggcctgagcgagaacgacgagtggacccaggacagagccaagcccgtgacccagatcgtgtctgccgaagcctggggcagagccgattgcggctttaccagcgagagctaccagcagggcgtgctgagcgccaccatcctgtacgagatcctgctgggcaaggccaccctgtacgccgtgctggtgtctgccctggtgctgatggctatggtcaagcggaaggacagccgggga

SEQ ID NO: 2123 - DNA, 2292 bp, Artificial Sequence
  Synthetic Polynucloetide
atggccttaccagtgaccgccttgctcctgccgctggccttgctgctccacgccgccaggccggaagtgcagctggttgaatctggcggaggactggttcagcctggcggatctctgagactgtcttgtgccgccagcggcttcagcttcagcgacttttggatgagctgggtccgacaggcccctggcaaaggacttgaatgggtcgccacaatcagccaggccggcagcgagaaggactacgtggactctgtgaagggcagattcaccatcagccgggacaacgccaagaagtccctgtacctccagatgaacagcctgagagccgaggacaccgccgtgtactattgtgcctctggcgtgtacagcttcgactacagaggccagggcaccctggtcacagtctcttctggtaccggcggaggcggatctggcggcggaggtagcggtggcggaggatctgaattcgacatccagatgacccagagccccagcagcctgtctgccagcgtgggcgacagagtgaccatcacatgcaaggccagcaagaacatcagaagctacctggcctggtatcagcagaagcccggcaaggcccccaagctgctgatctacagcggcagcacactgcacagcggcgtgcccagcagattttccggctctggcagcggcaccgacttcaccctgaccatctctagcctccagcccgaggacttcgccacctactactgccagcagcaccacgagtaccccctgacattcggccagggcaccaaggtggaaatcaagagactcgagatccagaaccctgatcctgccgtgtaccagctgcgggatagcaagagcagcgacaagagcgtgtgtctgttcaccgacttcgacagccagaccaacgtgtcccagagcaaggactccgacgtgtacatcaccgataagtgcgtgctggacatgcggagcatggacttcaagagcaactccgccgtggcctggtccaacaagtccgatttcgcctgcgccaacgccttcaacaacagcattatccccgaggacacattcttcccaagccccgagagcagctgcgacgtgaagctggtggaaaagagcttcgagacagacaccaacctgaacttccagaacctgagcgtgatcggcttcagaatcctgctgctgaaagtggccggctttaacctgctgatgaccctgcggctgtggtccagccgcgccaagagaagcggatctggcgtgaagcagaccctgaatttcgacctgctgaagctggctggcgacgtggaatccaacccaggccctactagtatggactggatttggcgcatccttttccttgtcggcgctgctaccggcgcgcattccttcgaacaggtgcaactccaggaatctggccccggactcgtgaagcccagcgagacactgagcctgacctgtaccgtgtccggctacaccatcaccagcggctacgactggtcctggatcagacagcctcctggcaagggcctggaatggatcggctacatcaactacggcggctccaccaactacaagcccagcctgggaagccgcgtgacaatcagcgtggacacctccaagaaccagttcagcctgaagctgagcagcgtgacagccgccgataccgccgtgtactactgcgcccggtacaacgagtacaagagctacatctacgattggtacttcgacttctggggccagggaaccctcgtgaccgtgtctagtacgcgtgaggacctgaagaacgtgttcccacctgaggtggccgtgttcgagcctagcgaggccgagatcagccacacccagaaagccaccctcgtgtgcctggctaccggcttctaccccgaccatgtggaactgtcttggtgggtcaacggcaaagaggtgcacagcggcgtgtgtaccgacccccagccactgaaagaacagcccgccctgaacgacagccggtactgcctgagcagcagactgagagtgtccgccaccttctggcagaacccccggaaccacttcagatgccaggtgcagttctacggcctgagcgagaacgacgagtggacccaggacagagccaagcccgtgacccagatcgtgtctgccgaagcctggggcagagccgattgcggctttaccagcgagagctaccagcagggcgtgctgagcgccaccatcctgtacgagatcctgctgggcaaggccaccctgtacgccgtgctggtgtctgccctggtgctgatggctatggtcaagcggaaggacagccgggga

SEQ ID NO: 2124 - DNA, 2298 bp, Artificial Sequence
  Synthetic Polynucloetide
atggccttaccagtgaccgccttgctcctgccgctggccttgctgctccacgccgccaggccggaagtgcagctggttgaatctggcggaggactggttcagcctggcggatctctgagactgtcttgtgccgccagcggcttcagcttcagcgacttttggatgagctgggtccgacaggcccctggcaaaggacttgaatgggtcgccacaatcagccaggccggcagcgagaaggactacgtggactctgtgaagggcagattcaccatcagccgggacaacgccaagaagtccctgtacctccagatgaacagcctgagagccgaggacaccgccgtgtactattgtgcctctggcgtgtacagcttcgactacagaggccagggcaccctggtcacagtctcttctggtaccggcggaggcggatctggcggcggaggtagcggtggcggaggatctgaattccagtctgtggtcacacagcctccatccgtgtctgctgcccctggacagaaagtgaccatctcctgtagcggcagcagcagcaacatcggcaacaactacgtgtcctggtatcagcagctccccggcacagctcccaaactgctgatctacgacaacaacaagcggcccagcggcatccccgatagattttctggcagcaagagcggcaccagcgccacactgggaattaccggacttcagacaggcgacgaggccgactactactgtggcacatgggatggcagcctgtacaccatgcttttcggcggaggcaccaagctgacagtgcttctcgagatccagaaccctgatcctgccgtgtaccagctgcgggatagcaagagcagcgacaagagcgtgtgtctgttcaccgacttcgacagccagaccaacgtgtcccagagcaaggactccgacgtgtacatcaccgataagtgcgtgctggacatgcggagcatggacttcaagagcaactccgccgtggcctggtccaacaagtccgatttcgcctgcgccaacgccttcaacaacagcattatccccgaggacacattcttcccaagccccgagagcagctgcgacgtgaagctggtggaaaagagcttcgagacagacaccaacctgaacttccagaacctgagcgtgatcggcttcagaatcctgctgctgaaagtggccggctttaacctgctgatgaccctgcggctgtggtccagccgcgccaagagaagcggatctggcgtgaagcagaccctgaatttcgacctgctgaagctggctggcgacgtggaatccaacccaggccctactagtatggactggatttggcgcatccttttccttgtcggcgctgctaccggcgcgcattccttcgaagaagtgcaactggtggaatctggcggcggactggttaagcctggcggatctctgagactgtcttgtgccgccagcggcttcaccttcagcaatgcctggatgagctgggttcgacaggcccctggaaaaggactggaatgggtcggattcatccggtccaaagcctacggcggcaccacagaatatgccgcctctgtgaagggcagattcaccatcagccgggacgacagcaagtctatcgcctacctccagatgaacaacctgaaaaccgaggacaccgccgtgtactactgcgccagagatggcctgtacagcagctcttggtacgacagcgattactggggccagggcacactggtcacagtgtcatctacgcgtgaggacctgaagaacgtgttcccacctgaggtggccgtgttcgagcctagcgaggccgagatcagccacacccagaaagccaccctcgtgtgcctggctaccggcttctaccccgaccatgtggaactgtcttggtgggtcaacggcaaagaggtgcacagcggcgtgtgtaccgacccccagccactgaaagaacagcccgccctgaacgacagccggtactgcctgagcagcagactgagagtgtccgccaccttctggcagaacccccggaaccacttcagatgccaggtgcagttctacggcctgagcgagaacgacgagtggacccaggacagagccaagcccgtgacccagatcgtgtctgccgaagcctggggcagagccgattgcggctttaccagcgagagctaccagcagggcgtgctgagcgccaccatcctgtacgagatcctgctgggcaaggccaccctgtacgccgtgctggtgtctgccctggtgctgatggctatggtcaagcggaaggacagccgggga

SEQ ID NO: 2125 - DNA, 2313 bp, Artificial Sequence
  Synthetic Polynucloetide
atggccttaccagtgaccgccttgctcctgccgctggccttgctgctccacgccgccaggccggaagtgcagctggttgaatctggcggaggactggttcagcctggcggatctctgagactgtcttgtgccgccagcggcttcagcttcagcgacttttggatgagctgggtccgacaggcccctggcaaaggacttgaatgggtcgccacaatcagccaggccggcagcgagaaggactacgtggactctgtgaagggcagattcaccatcagccgggacaacgccaagaagtccctgtacctccagatgaacagcctgagagccgaggacaccgccgtgtactattgtgcctctggcgtgtacagcttcgactacagaggccagggcaccctggtcacagtctcttctggtaccggcggaggcggatctggcggcggaggtagcggtggcggaggatctgaattccagtctgtgctgacacagcctcctagtgtgtctggcgctcctggacagagagtgaccatctcttgtaccggcagcagcagcaatatcggagccggctatgacgtgcactggtatcagcagctccctggcacagcccctaaactgctgatcttcggcaacagcaacagacccagcggcgtgcccgatagattcagcggctttaagagcggcacaagcgccagcctggctatcactggactgcaagccgaggacgaggccgactacttctgccagagctacgatagcagcctgagcggcagcggagtgtttggcacaggcaccaaagtgacagtgcttggcctcgagatccagaaccctgatcctgccgtgtaccagctgcgggatagcaagagcagcgacaagagcgtgtgtctgttcaccgacttcgacagccagaccaacgtgtcccagagcaaggactccgacgtgtacatcaccgataagtgcgtgctggacatgcggagcatggacttcaagagcaactccgccgtggcctggtccaacaagtccgatttcgcctgcgccaacgccttcaacaacagcattatccccgaggacacattcttcccaagccccgagagcagctgcgacgtgaagctggtggaaaagagcttcgagacagacaccaacctgaacttccagaacctgagcgtgatcggcttcagaatcctgctgctgaaagtggccggctttaacctgctgatgaccctgcggctgtggtccagccgcgccaagagaagcggatctggcgtgaagcagaccctgaatttcgacctgctgaagctggctggcgacgtggaatccaacccaggccctactagtatggactggatttggcgcatccttttccttgtcggcgctgctaccggcgcgcattccttcgaacaaatgcaactggttcaaagcggcggtggcctggtgcaacctggaagaagtctgagactgagctgtgccgccagcggcttcaccttcgatgattacgccatgcactgggtccgacaggcccctggaaaaggactggaatgggtgtccggcatctcctggaatagcggctctatcggctacgccgacagcgtgaagggcagattcaccatcagccgggacaacgccaagaacagcctgtacctccagatgaactccctgagagccgaggatacagccctgtactactgcgccaaggacatccacagcggcagctactacggcctgctgtactacgctatggacgtgtggggccagggcacaaccgtgacagtttcttctacgcgtgaggacctgaagaacgtgttcccacctgaggtggccgtgttcgagcctagcgaggccgagatcagccacacccagaaagccaccctcgtgtgcctggctaccggcttctaccccgaccatgtggaactgtcttggtgggtcaacggcaaagaggtgcacagcggcgtgtgtaccgacccccagccactgaaagaacagcccgccctgaacgacagccggtactgcctgagcagcagactgagagtgtccgccaccttctggcagaacccccggaaccacttcagatgccaggtgcagttctacggcctgagcgagaacgacgagtggacccaggacagagccaagcccgtgacccagatcgtgtctgccgaagcctggggcagagccgattgcggctttaccagcgagagctaccagcagggcgtgctgagcgccaccatcctgtacgagatcctgctgggcaaggccaccctgtacgccgtgctggtgtctgccctggtgctgatggctatggtcaagcggaaggacagccgggga

SEQ ID NO: 2126 - DNA, 2313 bp, Artificial Sequence
  Synthetic Polynucloetide
atggccttaccagtgaccgccttgctcctgccgctggccttgctgctccacgccgccaggccggaagtgcagctggttgaatctggcggaggactggttcagcctggcggatctctgagactgtcttgtgccgccagcggcttcagcttcagcgacttttggatgagctgggtccgacaggcccctggcaaaggacttgaatgggtcgccacaatcagccaggccggcagcgagaaggactacgtggactctgtgaagggcagattcaccatcagccgggacaacgccaagaagtccctgtacctccagatgaacagcctgagagccgaggacaccgccgtgtactattgtgcctctggcgtgtacagcttcgactacagaggccagggcaccctggtcacagtctcttctggtaccggcggaggcggatctggcggcggaggtagcggtggcggaggatctgaattcctgcctgttctgacacagcctccatctgcctctggcacacctggacagagagtgaccatcagctgtagcggcagaagcagcaacatcggcagcaacagcgtgaactggtacagacagcttcctggcgctgcccctaagctgctgatctacagcaacaaccagcggcctcctggcgtgccagtcagattttctggcagcaagagcggcacaagcgccagcctggctatttctggactccagtctgaggacgaggccacctactactgtgccacctgggacgacaacctgaacgtgcactacgtgttcggcaccggcaccaaagtgacagtgcttggaagtagactcgagatccagaaccctgatcctgccgtgtaccagctgcgggatagcaagagcagcgacaagagcgtgtgtctgttcaccgacttcgacagccagaccaacgtgtcccagagcaaggactccgacgtgtacatcaccgataagtgcgtgctggacatgcggagcatggacttcaagagcaactccgccgtggcctggtccaacaagtccgatttcgcctgcgccaacgccttcaacaacagcattatccccgaggacacattcttcccaagccccgagagcagctgcgacgtgaagctggtggaaaagagcttcgagacagacaccaacctgaacttccagaacctgagcgtgatcggcttcagaatcctgctgctgaaagtggccggctttaacctgctgatgaccctgcggctgtggtccagccgcgccaagagaagcggatctggcgtgaagcagaccctgaatttcgacctgctgaagctggctggcgacgtggaatccaacccaggccctactagtatggactggatttggcgcatccttttccttgtcggcgctgctaccggcgcgcattccttcgaacttgaaatggctcaggtgcagctggtgcagagcggagccgaagtgaagaaacctggcagcagcgtgaaggtgtcctgcaaagcttctggcggcaccttcagcagctacgccatctcttgggttcgacaggcccctggacaaggactggaatggatgggcagaatcatccccatcctgggaatcgccaactacgcccagaaattccagggcagagtgacaatcaccgccgacaagagcaccagcaccgcctacatggaactgagcagcctgagaagcgaggacaccgccgtgtactattgtgcaagaggcggctactacagccacgacatgtggagcgaagattggggccagggcacactggtcacagtgtcatctacgcgtgaggacctgaagaacgtgttcccacctgaggtggccgtgttcgagcctagcgaggccgagatcagccacacccagaaagccaccctcgtgtgcctggctaccggcttctaccccgaccatgtggaactgtcttggtgggtcaacggcaaagaggtgcacagcggcgtgtgtaccgacccccagccactgaaagaacagcccgccctgaacgacagccggtactgcctgagcagcagactgagagtgtccgccaccttctggcagaacccccggaaccacttcagatgccaggtgcagttctacggcctgagcgagaacgacgagtggacccaggacagagccaagcccgtgacccagatcgtgtctgccgaagcctggggcagagccgattgcggctttaccagcgagagctaccagcagggcgtgctgagcgccaccatcctgtacgagatcctgctgggcaaggccaccctgtacgccgtgctggtgtctgccctggtgctgatggctatggtcaagcggaaggacagccgggga

SEQ ID NO: 2127 - DNA, 2295 bp, Artificial Sequence
  Synthetic Polynucloetide
atggccttaccagtgaccgccttgctcctgccgctggccttgctgctccacgccgccaggccggaagtgcagctggttgaatctggcggaggactggttcagcctggcggatctctgagactgtcttgtgccgccagcggcttcagcttcagcgacttttggatgagctgggtccgacaggcccctggcaaaggacttgaatgggtcgccacaatcagccaggccggcagcgagaaggactacgtggactctgtgaagggcagattcaccatcagccgggacaacgccaagaagtccctgtacctccagatgaacagcctgagagccgaggacaccgccgtgtactattgtgcctctggcgtgtacagcttcgactacagaggccagggcaccctggtcacagtctcttctggtaccggcggaggcggatctggcggcggaggtagcggtggcggaggatctgaattcgacttcgtgatgacacagagccctgatagcctggccgtgtctctcggcgagcgagtgaccatgagctgcaagtctagccagagcctgctgaacagcggcaaccagaagaactacctgacctggtatcagcagaagcccggccagcctcctaagctgctgatctactgggccagcaccagagaaagcggcgtgcccgatagattttctggctctggcagcggcaccgacttcaccctgacaatttctagcctgcaagccgaggacgtggccgtgtactactgccagaacgactacagctacccctacaccttcggccagggcaccaagctggaaatcaaactcgagatccagaaccctgatcctgccgtgtaccagctgcgggatagcaagagcagcgacaagagcgtgtgtctgttcaccgacttcgacagccagaccaacgtgtcccagagcaaggactccgacgtgtacatcaccgataagtgcgtgctggacatgcggagcatggacttcaagagcaactccgccgtggcctggtccaacaagtccgatttcgcctgcgccaacgccttcaacaacagcattatccccgaggacacattcttcccaagccccgagagcagctgcgacgtgaagctggtggaaaagagcttcgagacagacaccaacctgaacttccagaacctgagcgtgatcggcttcagaatcctgctgctgaaagtggccggctttaacctgctgatgaccctgcggctgtggtccagccgcgccaagagaagcggatctggcgtgaagcagaccctgaatttcgacctgctgaagctggctggcgacgtggaatccaacccaggccctactagtatggactggatttggcgcatccttttccttgtcggcgctgctaccggcgcgcattccttcgaagaagtgcaactggttcagagcggagccgagctgaagaaacctggggccagcgtgaaggtgtcctgtaaagccagcggctacacctttaccgactactacatgaaatgggtccgacaggccccaggccagggactcgaatggatcggcgatattatccccagcaacggggccaccttctacaaccagaaattcaagggccgcgtgaccatcaccgtggacaagagcacaagcaccgcctacatggaactgagcagcctgagaagcgaggacaccgccgtgtattattgcgccagaagccatctgctgcgggccagttggttcgcctattggggacagggaaccctggtcaccgttagctctacgcgtgaggacctgaagaacgtgttcccacctgaggtggccgtgttcgagcctagcgaggccgagatcagccacacccagaaagccaccctcgtgtgcctggctaccggcttctaccccgaccatgtggaactgtcttggtgggtcaacggcaaagaggtgcacagcggcgtgtgtaccgacccccagccactgaaagaacagcccgccctgaacgacagccggtactgcctgagcagcagactgagagtgtccgccaccttctggcagaacccccggaaccacttcagatgccaggtgcagttctacggcctgagcgagaacgacgagtggacccaggacagagccaagcccgtgacccagatcgtgtctgccgaagcctggggcagagccgattgcggctttaccagcgagagctaccagcagggcgtgctgagcgccaccatcctgtacgagatcctgctgggcaaggccaccctgtacgccgtgctggtgtctgccctggtgctgatggctatggtcaagcggaaggacagccgggga

SEQ ID NO: 2128 - DNA, 2295 bp, Artificial Sequence
  Synthetic Polynucloetide
atggccttaccagtgaccgccttgctcctgccgctggccttgctgctccacgccgccaggccggaagtgcagctggttgaatctggcggaggactggttcagcctggcggatctctgagactgtcttgtgccgccagcggcttcagcttcagcgacttttggatgagctgggtccgacaggcccctggcaaaggacttgaatgggtcgccacaatcagccaggccggcagcgagaaggactacgtggactctgtgaagggcagattcaccatcagccgggacaacgccaagaagtccctgtacctccagatgaacagcctgagagccgaggacaccgccgtgtactattgtgcctctggcgtgtacagcttcgactacagaggccagggcaccctggtcacagtctcttctggtaccggcggaggcggatctggcggcggaggtagcggtggcggaggatctgaattcgacttcgtgatgacacagagccctgatagcctggccgtgtctctcggcgagcgagtgaccatgagctgcaagtctagccagagcctgctgaacagcggcaaccagaagaactacctgacctggtatcagcagaagcccggccagcctcctaagctgctgatctactgggccagcaccagagaaagcggcgtgcccgatagattttctggctctggcagcggcaccgacttcaccctgacaatttctagcctgcaagccgaggacgtggccgtgtactactgccagaacgactacagctacccctacaccttcggccagggcaccaagctggaaatcaaactcgagatccagaaccctgatcctgccgtgtaccagctgcgggatagcaagagcagcgacaagagcgtgtgtctgttcaccgacttcgacagccagaccaacgtgtcccagagcaaggactccgacgtgtacatcaccgataagtgcgtgctggacatgcggagcatggacttcaagagcaactccgccgtggcctggtccaacaagtccgatttcgcctgcgccaacgccttcaacaacagcattatccccgaggacacattcttcccaagccccgagagcagctgcgacgtgaagctggtggaaaagagcttcgagacagacaccaacctgaacttccagaacctgagcgtgatcggcttcagaatcctgctgctgaaagtggccggctttaacctgctgatgaccctgcggctgtggtccagccgcgccaagagaagcggatctggcgtgaagcagaccctgaatttcgacctgctgaagctggctggcgacgtggaatccaacccaggccctactagtatggactggatttggcgcatccttttccttgtcggcgctgctaccggcgcgcattccttcgaacaagtgcaactggttcagagcggagccgagctgaagaaacctggggccagcgtgaaggtgtcctgtaaagccagcggctacacctttaccgactactacatgaaatgggtccgacaggccccaggccagggactcgaatggatcggcgatattatccccagcaacggggccaccttctacaaccagaaattcaagggccgcgtgaccatcaccgtggacaagagcacaagcaccgcctacatggaactgagcagcctgagaagcgaggacaccgccgtgtattattgcgccagaagccatctgctgcgggccagttggttcgcctattggggacagggaaccctggtcaccgttagctctacgcgtgaggacctgaagaacgtgttcccacctgaggtggccgtgttcgagcctagcgaggccgagatcagccacacccagaaagccaccctcgtgtgcctggctaccggcttctaccccgaccatgtggaactgtcttggtgggtcaacggcaaagaggtgcacagcggcgtgtgtaccgacccccagccactgaaagaacagcccgccctgaacgacagccggtactgcctgagcagcagactgagagtgtccgccaccttctggcagaacccccggaaccacttcagatgccaggtgcagttctacggcctgagcgagaacgacgagtggacccaggacagagccaagcccgtgacccagatcgtgtctgccgaagcctggggcagagccgattgcggctttaccagcgagagctaccagcagggcgtgctgagcgccaccatcctgtacgagatcctgctgggcaaggccaccctgtacgccgtgctggtgtctgccctggtgctgatggctatggtcaagcggaaggacagccgggga

SEQ ID NO: 2129 - DNA, 2265 bp, Artificial Sequence
  Synthetic Polynucloetide
atggccttaccagtgaccgccttgctcctgccgctggccttgctgctccacgccgccaggccggaagtgcagctggttgaatctggcggaggactggttcagcctggcggatctctgagactgtcttgtgccgccagcggcttcagcttcagcgacttttggatgagctgggtccgacaggcccctggcaaaggacttgaatgggtcgccacaatcagccaggccggcagcgagaaggactacgtggactctgtgaagggcagattcaccatcagccgggacaacgccaagaagtccctgtacctccagatgaacagcctgagagccgaggacaccgccgtgtactattgtgcctctggcgtgtacagcttcgactacagaggccagggcaccctggtcacagtctcttctggtaccggcggaggcggatctggcggcggaggtagcggtggcggaggatctgaattcgacgtgcagatcacacagagccctagctacctggctgcctctcctggcgagacaatcaccatcaactgtcgggccagcaagagcatcagcaaggacctggcctggtatcaagagaagcccggcaagaccaacaagctgctgatctacagcggcagcacactccagtctggcatccccagcagattttccggctctggcagcggcaccgatttcaccctgaccataagcagcctggaacctgaggacttcgccatgtactactgccagcagcacaacaagtacccctacacctttggcggaggcaccaagctggaaatcaagagactcgagatccagaaccctgatcctgccgtgtaccagctgcgggatagcaagagcagcgacaagagcgtgtgtctgttcaccgacttcgacagccagaccaacgtgtcccagagcaaggactccgacgtgtacatcaccgataagtgcgtgctggacatgcggagcatggacttcaagagcaactccgccgtggcctggtccaacaagtccgatttcgcctgcgccaacgccttcaacaacagcattatccccgaggacacattcttcccaagccccgagagcagctgcgacgtgaagctggtggaaaagagcttcgagacagacaccaacctgaacttccagaacctgagcgtgatcggcttcagaatcctgctgctgaaagtggccggctttaacctgctgatgaccctgcggctgtggtccagccgcgccaagagaagcggatctggcgtgaagcagaccctgaatttcgacctgctgaagctggctggcgacgtggaatccaacccaggccctactagtatggactggatttggcgcatccttttccttgtcggcgctgctaccggcgcgcattccttcgaacaagttcaactgcaacagcctggggccgagcttgttagacctggcgcttctgtgaagctgagctgcaaggccagcggctacaccttcaccagctactggatgaactgggtcaagcagcggcctgaccagggcctcgaatggatcggcagaatcgacccctacgacagcgagacacactacaaccagaagttcaaggacaaggccatcctgaccgtggacaagagcagctccaccgcctacatgcaactgagcagcctgacctctgaggatagcgccgtgtactattgcgccagaggcaactgggacgactattggggccagggcacaaccctgacagtgtctagtacgcgtgaggacctgaagaacgtgttcccacctgaggtggccgtgttcgagcctagcgaggccgagatcagccacacccagaaagccaccctcgtgtgcctggctaccggcttctaccccgaccatgtggaactgtcttggtgggtcaacggcaaagaggtgcacagcggcgtgtgtaccgacccccagccactgaaagaacagcccgccctgaacgacagccggtactgcctgagcagcagactgagagtgtccgccaccttctggcagaacccccggaaccacttcagatgccaggtgcagttctacggcctgagcgagaacgacgagtggacccaggacagagccaagcccgtgacccagatcgtgtctgccgaagcctggggcagagccgattgcggctttaccagcgagagctaccagcagggcgtgctgagcgccaccatcctgtacgagatcctgctgggcaaggccaccctgtacgccgtgctggtgtctgccctggtgctgatggctatggtcaagcggaaggacagccgggga

SEQ ID NO: 2130 - DNA, 2271 bp, Artificial Sequence
  Synthetic Polynucloetide
atggccttaccagtgaccgccttgctcctgccgctggccttgctgctccacgccgccaggccggaagtgcagctggttgaatctggcggaggactggttcagcctggcggatctctgagactgtcttgtgccgccagcggcttcagcttcagcgacttttggatgagctgggtccgacaggcccctggcaaaggacttgaatgggtcgccacaatcagccaggccggcagcgagaaggactacgtggactctgtgaagggcagattcaccatcagccgggacaacgccaagaagtccctgtacctccagatgaacagcctgagagccgaggacaccgccgtgtactattgtgcctctggcgtgtacagcttcgactacagaggccagggcaccctggtcacagtctcttctggtaccggcggaggcggatctggcggcggaggtagcggtggcggaggatctgaattcgagatcgtgctgacacagagccctaccagcatgacagcctctccaggcgagcaagtgaccatcacctgtagagccagcagcagcatcaactacatgcactggtatcagcagaagcctggcgcaagccccagaccttggatctacgagacaagcaagctggcctccggcgtgcccgatagattttctggatctgccagcggcaccagctacagcctgaccatcaacaacatggaagccgaggacgccgccacctactactgccagcagtggaattacccctcctggacctttggcggaggcaccaagctggaacttaaactcgagatccagaaccctgatcctgccgtgtaccagctgcgggatagcaagagcagcgacaagagcgtgtgtctgttcaccgacttcgacagccagaccaacgtgtcccagagcaaggactccgacgtgtacatcaccgataagtgcgtgctggacatgcggagcatggacttcaagagcaactccgccgtggcctggtccaacaagtccgatttcgcctgcgccaacgccttcaacaacagcattatccccgaggacacattcttcccaagccccgagagcagctgcgacgtgaagctggtggaaaagagcttcgagacagacaccaacctgaacttccagaacctgagcgtgatcggcttcagaatcctgctgctgaaagtggccggctttaacctgctgatgaccctgcggctgtggtccagccgcgccaagagaagcggatctggcgtgaagcagaccctgaatttcgacctgctgaagctggctggcgacgtggaatccaacccaggccctactagtatggactggatttggcgcatccttttccttgtcggcgctgctaccggcgcgcattccttcgaagaagtgcagctcgttgagtctggtggcggactggttcagcctggaagaagcctgaagctgagctgtgccgccagcggcttcaccttcagcgactacaatatggcctgggtccgacaggcccctaagaaaggactggaatgggtcgccaccatcctgtacgatggcggcagaacctactaccggggcagcgtgaagggcagattcaccatcagcagagacaacgccaagagcaccctgtacctgcggatggactctctgagaagcgaggataccgccacatattactgtgccacacacagccggggcaccgactactttgattattggggccagggcgtgatggttaccgtgtctagtacgcgtgaggacctgaagaacgtgttcccacctgaggtggccgtgttcgagcctagcgaggccgagatcagccacacccagaaagccaccctcgtgtgcctggctaccggcttctaccccgaccatgtggaactgtcttggtgggtcaacggcaaagaggtgcacagcggcgtgtgtaccgacccccagccactgaaagaacagcccgccctgaacgacagccggtactgcctgagcagcagactgagagtgtccgccaccttctggcagaacccccggaaccacttcagatgccaggtgcagttctacggcctgagcgagaacgacgagtggacccaggacagagccaagcccgtgacccagatcgtgtctgccgaagcctggggcagagccgattgcggctttaccagcgagagctaccagcagggcgtgctgagcgccaccatcctgtacgagatcctgctgggcaaggccaccctgtacgccgtgctggtgtctgccctggtgctgatggctatggtcaagcggaaggacagccgggga

SEQ ID NO: 2131 - DNA, 2298 bp, Artificial Sequence
  Synthetic Polynucloetide
atggccttaccagtgaccgccttgctcctgccgctggccttgctgctccacgccgccaggccggaagtgcagctggttgaatctggcggaggactggttcagcctggcggatctctgagactgtcttgtgccgccagcggcttcagcttcagcgacttttggatgagctgggtccgacaggcccctggcaaaggacttgaatgggtcgccacaatcagccaggccggcagcgagaaggactacgtggactctgtgaagggcagattcaccatcagccgggacaacgccaagaagtccctgtacctccagatgaacagcctgagagccgaggacaccgccgtgtactattgtgcctctggcgtgtacagcttcgactacagaggccagggcaccctggtcacagtctcttctggtaccggcggaggcggatctggcggcggaggtagcggtggcggaggatctgaattcgacatcgtgatgacacagagcccttctagcctggccgtgtctgagggcgagacagtgaccatcaactgcaagagcagccagagcttcctgtctagcggcgacggcaagaattacgtggcctggtatcagtacaagcccggacagagccccaagctgctgatctactgggccagcacaagacagagcggcgtgcccgatagattcatcggctctggcagcggcaccgacttcaccctgacaatctctacagtgcaggccgaggacctggctatctactactgccagcagtattacgacacccctctgacctttggctccggcaccaagctggaaatcaaactcgagatccagaaccctgatcctgccgtgtaccagctgcgggatagcaagagcagcgacaagagcgtgtgtctgttcaccgacttcgacagccagaccaacgtgtcccagagcaaggactccgacgtgtacatcaccgataagtgcgtgctggacatgcggagcatggacttcaagagcaactccgccgtggcctggtccaacaagtccgatttcgcctgcgccaacgccttcaacaacagcattatccccgaggacacattcttcccaagccccgagagcagctgcgacgtgaagctggtggaaaagagcttcgagacagacaccaacctgaacttccagaacctgagcgtgatcggcttcagaatcctgctgctgaaagtggccggctttaacctgctgatgaccctgcggctgtggtccagccgcgccaagagaagcggatctggcgtgaagcagaccctgaatttcgacctgctgaagctggctggcgacgtggaatccaacccaggccctactagtatggactggatttggcgcatccttttccttgtcggcgctgctaccggcgcgcattccttcgaagaagtgaagctgcaagagtctggccccagcctggtgcagagtagccaaacactgagcctgacctgtaccgtgtccggctttagcctgaccagctaccacatccactgggtccgacagacccctggcaaaggactggaatggatgggcgtgatgtggagcgacggcgacaccagctataacagcgccctgaagtcccggctgagcatcagcagagatacaagccagagccaggtgttcctgaagatgaacagcctccagaccgaggacaccgccacctactattgtgccagaggctactacagcagctacctgtacctttggttcgcctattggggccagggcaccctggttacagtcagctctacgcgtgaggacctgaagaacgtgttcccacctgaggtggccgtgttcgagcctagcgaggccgagatcagccacacccagaaagccaccctcgtgtgcctggctaccggcttctaccccgaccatgtggaactgtcttggtgggtcaacggcaaagaggtgcacagcggcgtgtgtaccgacccccagccactgaaagaacagcccgccctgaacgacagccggtactgcctgagcagcagactgagagtgtccgccaccttctggcagaacccccggaaccacttcagatgccaggtgcagttctacggcctgagcgagaacgacgagtggacccaggacagagccaagcccgtgacccagatcgtgtctgccgaagcctggggcagagccgattgcggctttaccagcgagagctaccagcagggcgtgctgagcgccaccatcctgtacgagatcctgctgggcaaggccaccctgtacgccgtgctggtgtctgccctggtgctgatggctatggtcaagcggaaggacagccgggga

SEQ ID NO: 2132 - DNA, 2310 bp, Artificial Sequence
  Synthetic Polynucloetide
atggccttaccagtgaccgccttgctcctgccgctggccttgctgctccacgccgccaggccggaagtgcagctggttgaatctggcggaggactggttcagcctggcggatctctgagactgtcttgtgccgccagcggcttcagcttcagcgacttttggatgagctgggtccgacaggcccctggcaaaggacttgaatgggtcgccacaatcagccaggccggcagcgagaaggactacgtggactctgtgaagggcagattcaccatcagccgggacaacgccaagaagtccctgtacctccagatgaacagcctgagagccgaggacaccgccgtgtactattgtgcctctggcgtgtacagcttcgactacagaggccagggcaccctggtcacagtctcttctggtaccggcggaggcggatctggcggcggaggtagcggtggcggaggatctgaattcgacgtgctgatgacccagacacctgtgtctctgccagtgtctctcggaggccaggtgtccatctcctgtagaagcagccagagcctggtgcactccgacggcgatacctacctgcactggtatctccagaagcctggacagagccctcagctcctgatctaccgggtgtccaacagattcagcggcgtgcccgatagattttccggcagcggctctggcaccgacttcaccctgaagatcagcagagtggaacccgaggacctgggcctgtactactgtctccagaccacacacttcccaccttggacctttggcggaggcaccaagctggaaatgaaactcgagatccagaaccctgatcctgccgtgtaccagctgcgggatagcaagagcagcgacaagagcgtgtgtctgttcaccgacttcgacagccagaccaacgtgtcccagagcaaggactccgacgtgtacatcaccgataagtgcgtgctggacatgcggagcatggacttcaagagcaactccgccgtggcctggtccaacaagtccgatttcgcctgcgccaacgccttcaacaacagcattatccccgaggacacattcttcccaagccccgagagcagctgcgacgtgaagctggtggaaaagagcttcgagacagacaccaacctgaacttccagaacctgagcgtgatcggcttcagaatcctgctgctgaaagtggccggctttaacctgctgatgaccctgcggctgtggtccagccgcgccaagagaagcggatctggcgtgaagcagaccctgaatttcgacctgctgaagctggctggcgacgtggaatccaacccaggccctactagtatggactggatttggcgcatccttttccttgtcggcgctgctaccggcgcgcattccttcgaacaggttcagctccagcagtctggacccgagcttagaaggccaggatctagcgtcagactgagctgcaaggccagcggctaccggatcaaggacttcctgatccactggattaagaacagacccgagcacggcctggaatggatcggatggattgaccctgaggacggcgagactaagtacgcccagaagttccagaccaaggccacactgaccgccgacacctctagcaacaccgcctacatgcaactgagcagcctgaccagcgaggacaccgccacctacttttgtgctagatggggcgacgtgtactacggcctgatgagaggccatgtgatggatgcctggggccagggaacaagcgtgacagtctcttctacgcgtgaggacctgaagaacgtgttcccacctgaggtggccgtgttcgagcctagcgaggccgagatcagccacacccagaaagccaccctcgtgtgcctggctaccggcttctaccccgaccatgtggaactgtcttggtgggtcaacggcaaagaggtgcacagcggcgtgtgtaccgacccccagccactgaaagaacagcccgccctgaacgacagccggtactgcctgagcagcagactgagagtgtccgccaccttctggcagaacccccggaaccacttcagatgccaggtgcagttctacggcctgagcgagaacgacgagtggacccaggacagagccaagcccgtgacccagatcgtgtctgccgaagcctggggcagagccgattgcggctttaccagcgagagctaccagcagggcgtgctgagcgccaccatcctgtacgagatcctgctgggcaaggccaccctgtacgccgtgctggtgtctgccctggtgctgatggctatggtcaagcggaaggacagccgggga

SEQ ID NO: 2133 - DNA, 2295 bp, Artificial Sequence
  Synthetic Polynucloetide
atggccttaccagtgaccgccttgctcctgccgctggccttgctgctccacgccgccaggccggaagtgcagctggttgaatctggcggaggactggttcagcctggcggatctctgagactgtcttgtgccgccagcggcttcagcttcagcgacttttggatgagctgggtccgacaggcccctggcaaaggacttgaatgggtcgccacaatcagccaggccggcagcgagaaggactacgtggactctgtgaagggcagattcaccatcagccgggacaacgccaagaagtccctgtacctccagatgaacagcctgagagccgaggacaccgccgtgtactattgtgcctctggcgtgtacagcttcgactacagaggccagggcaccctggtcacagtctcttctggtaccggcggaggcggatctggcggcggaggtagcggtggcggaggatctgaattcgacatcgtgatgacacagagccccgccacactgtcactgtctccaggcgaaagagccacactgagctgtcggagcagcaagagcctccagaacgtgaacggcaacacctacctgtactggttccagcagaagcccggccagtctcctcagctcctgatctacagaatgagcaacctgaacagcggcgtgcccgacagattttctggcagcggaagcggcaccgagttcaccctgaccataagcagcctggaacctgaggacttcgccgtgtactactgtatgcagcacctggaataccccatcaccttcggagccggcaccaagctggaaatcaaactcgagatccagaaccctgatcctgccgtgtaccagctgcgggatagcaagagcagcgacaagagcgtgtgtctgttcaccgacttcgacagccagaccaacgtgtcccagagcaaggactccgacgtgtacatcaccgataagtgcgtgctggacatgcggagcatggacttcaagagcaactccgccgtggcctggtccaacaagtccgatttcgcctgcgccaacgccttcaacaacagcattatccccgaggacacattcttcccaagccccgagagcagctgcgacgtgaagctggtggaaaagagcttcgagacagacaccaacctgaacttccagaacctgagcgtgatcggcttcagaatcctgctgctgaaagtggccggctttaacctgctgatgaccctgcggctgtggtccagccgcgccaagagaagcggatctggcgtgaagcagaccctgaatttcgacctgctgaagctggctggcgacgtggaatccaacccaggccctactagtatggactggatttggcgcatccttttccttgtcggcgctgctaccggcgcgcattccttcgaagaagtgcaactggttgaatctggcggcggactggttaagcctggcggatctctgaagctgagctgtgccgccagcggctacacctttaccagctacgtgatgcactgggtccgacaggcccctggcaaaggacttgagtggatcggctacatcaacccctacaacgatggcaccaagtacaacgagaagttccagggcagagtgaccatcagctccgacaagagcatcagcaccgcctacatggaactgagcagcctgagaagcgaggataccgccatgtactattgcgccagaggcacctactactacggcaccagagtgttcgactactggggccagggaaccctggtcacagtctcttctacgcgtgaggacctgaagaacgtgttcccacctgaggtggccgtgttcgagcctagcgaggccgagatcagccacacccagaaagccaccctcgtgtgcctggctaccggcttctaccccgaccatgtggaactgtcttggtgggtcaacggcaaagaggtgcacagcggcgtgtgtaccgacccccagccactgaaagaacagcccgccctgaacgacagccggtactgcctgagcagcagactgagagtgtccgccaccttctggcagaacccccggaaccacttcagatgccaggtgcagttctacggcctgagcgagaacgacgagtggacccaggacagagccaagcccgtgacccagatcgtgtctgccgaagcctggggcagagccgattgcggctttaccagcgagagctaccagcagggcgtgctgagcgccaccatcctgtacgagatcctgctgggcaaggccaccctgtacgccgtgctggtgtctgccctggtgctgatggctatggtcaagcggaaggacagccgggga

SEQ ID NO: 2134 - DNA, 2283 bp, Artificial Sequence
  Synthetic Polynucloetide
atggccttaccagtgaccgccttgctcctgccgctggccttgctgctccacgccgccaggccggaagtgcagctggttgaatctggcggaggactggttcagcctggcggatctctgagactgtcttgtgccgccagcggcttcagcttcagcgacttttggatgagctgggtccgacaggcccctggcaaaggacttgaatgggtcgccacaatcagccaggccggcagcgagaaggactacgtggactctgtgaagggcagattcaccatcagccgggacaacgccaagaagtccctgtacctccagatgaacagcctgagagccgaggacaccgccgtgtactattgtgcctctggcgtgtacagcttcgactacagaggccagggcaccctggtcacagtctcttctggtaccggcggaggcggatctggcggcggaggtagcggtggcggaggatctgaattcgacatccagatgacacagagccctagcagcctgtctgccagcgtgggagacagagtgaccatcacatgcaaggccagcgaccacatcaacaactggctggcctggtatcagcagaagcctggacaggcccctaagctgctgatctacggcgctaccacactggaaacaggcgtgcccagcagattttctggcagcggctctggcaccgactacaccctgacaatatccagcctccagcctgaggacttcgccacctactactgtcagcagagctggaacaccccttggacattcggccagggcaccaagctggaaatcaagagactcgagatccagaaccctgatcctgccgtgtaccagctgcgggatagcaagagcagcgacaagagcgtgtgtctgttcaccgacttcgacagccagaccaacgtgtcccagagcaaggactccgacgtgtacatcaccgataagtgcgtgctggacatgcggagcatggacttcaagagcaactccgccgtggcctggtccaacaagtccgatttcgcctgcgccaacgccttcaacaacagcattatccccgaggacacattcttcccaagccccgagagcagctgcgacgtgaagctggtggaaaagagcttcgagacagacaccaacctgaacttccagaacctgagcgtgatcggcttcagaatcctgctgctgaaagtggccggctttaacctgctgatgaccctgcggctgtggtccagccgcgccaagagaagcggatctggcgtgaagcagaccctgaatttcgacctgctgaagctggctggcgacgtggaatccaacccaggccctactagtatggactggatttggcgcatccttttccttgtcggcgctgctaccggcgcgcattccttcgaacaagttcagcttcaacagcctggcgctgagctggtcaaacctggcgcttctgtgaagatgagctgcaaagccagcggctacgccttcagcagctactggatcaactggatgaagcagaaacccggccagggactcgaatggatcggccaaatctatcccggcgacggcgacaccaactacaacggcaagttcaagggcagagccacactgaccgccgatacctctagcagcacagcctacatgcagctgagcagcctgaccagcgaagatagcgccgtgtacttctgtgcccggtccatcacaacagtcgtgggctgcgctatggactattggggccagggaacaagcgtgaccgtgtctagtacgcgtgaggacctgaagaacgtgttcccacctgaggtggccgtgttcgagcctagcgaggccgagatcagccacacccagaaagccaccctcgtgtgcctggctaccggcttctaccccgaccatgtggaactgtcttggtgggtcaacggcaaagaggtgcacagcggcgtgtgtaccgacccccagccactgaaagaacagcccgccctgaacgacagccggtactgcctgagcagcagactgagagtgtccgccaccttctggcagaacccccggaaccacttcagatgccaggtgcagttctacggcctgagcgagaacgacgagtggacccaggacagagccaagcccgtgacccagatcgtgtctgccgaagcctggggcagagccgattgcggctttaccagcgagagctaccagcagggcgtgctgagcgccaccatcctgtacgagatcctgctgggcaaggccaccctgtacgccgtgctggtgtctgccctggtgctgatggctatggtcaagcggaaggacagccgggga

SEQ ID NO: 2135 - DNA, 2289 bp, Artificial Sequence
  Synthetic Polynucloetide
atggccttaccagtgaccgccttgctcctgccgctggccttgctgctccacgccgccaggccggaagtgcagctggttgaatctggcggaggactggttcagcctggcggatctctgagactgtcttgtgccgccagcggcttcagcttcagcgacttttggatgagctgggtccgacaggcccctggcaaaggacttgaatgggtcgccacaatcagccaggccggcagcgagaaggactacgtggactctgtgaagggcagattcaccatcagccgggacaacgccaagaagtccctgtacctccagatgaacagcctgagagccgaggacaccgccgtgtactattgtgcctctggcgtgtacagcttcgactacagaggccagggcaccctggtcacagtctcttctggtaccggcggaggcggatctggcggcggaggtagcggtggcggaggatctgaattccagatcgtgctgtctcagtctcctgccatcctgagcgcttccccaggcgagaaagtgaccatgacctgtagagccagcagcagcgtgtcctacatgcactggtatcagcagaagcccggcagcagccctaagccttggatctacgccaccagcaatctggcctctggcgtgccagccagattttctggctctggcagcggcaccagctacagcttcacaatcagcagagtggaagccgaggacgccgccacctactattgtcagcagtggaccttcaatcctcctaccttcggcggaggcacccggctggaaatcaaaagaacagtggctgctctcgagatccagaaccctgatcctgccgtgtaccagctgcgggatagcaagagcagcgacaagagcgtgtgtctgttcaccgacttcgacagccagaccaacgtgtcccagagcaaggactccgacgtgtacatcaccgataagtgcgtgctggacatgcggagcatggacttcaagagcaactccgccgtggcctggtccaacaagtccgatttcgcctgcgccaacgccttcaacaacagcattatccccgaggacacattcttcccaagccccgagagcagctgcgacgtgaagctggtggaaaagagcttcgagacagacaccaacctgaacttccagaacctgagcgtgatcggcttcagaatcctgctgctgaaagtggccggctttaacctgctgatgaccctgcggctgtggtccagccgcgccaagagaagcggatctggcgtgaagcagaccctgaatttcgacctgctgaagctggctggcgacgtggaatccaacccaggccctactagtatggactggatttggcgcatccttttccttgtcggcgctgctaccggcgcgcattccttcgaacaggcttatctgcaacagagcggagccgaactcgtcagacctggcgcttctgtgaagatgagctgcaaggccagcggctacaccttcaccagctataatatgcactgggtcaagcagacccctcggcagggactcgaatggatcggcggaatctatcccggcaacggcgacacctcctacaaccagaagttcaagggcaaagccacactgaccgtgggcaagagcagcagcaccgcctatatgcagctcagcagcctgaccagcgaggacagcgccgtgtacttctgcgccagatacgactacaactacgctatggactactggggccagggcaccagcgtgacagttagctctgccagcacgcgtgaggacctgaagaacgtgttcccacctgaggtggccgtgttcgagcctagcgaggccgagatcagccacacccagaaagccaccctcgtgtgcctggctaccggcttctaccccgaccatgtggaactgtcttggtgggtcaacggcaaagaggtgcacagcggcgtgtgtaccgacccccagccactgaaagaacagcccgccctgaacgacagccggtactgcctgagcagcagactgagagtgtccgccaccttctggcagaacccccggaaccacttcagatgccaggtgcagttctacggcctgagcgagaacgacgagtggacccaggacagagccaagcccgtgacccagatcgtgtctgccgaagcctggggcagagccgattgcggctttaccagcgagagctaccagcagggcgtgctgagcgccaccatcctgtacgagatcctgctgggcaaggccaccctgtacgccgtgctggtgtctgccctggtgctgatggctatggtcaagcggaaggacagccgggga

SEQ ID NO: 2136 - DNA, 2283 bp, Artificial Sequence
  Synthetic Polynucloetide
atggccttaccagtgaccgccttgctcctgccgctggccttgctgctccacgccgccaggccggaagtgcagctggttgaatctggcggaggactggttcagcctggcggatctctgagactgtcttgtgccgccagcggcttcagcttcagcgacttttggatgagctgggtccgacaggcccctggcaaaggacttgaatgggtcgccacaatcagccaggccggcagcgagaaggactacgtggactctgtgaagggcagattcaccatcagccgggacaacgccaagaagtccctgtacctccagatgaacagcctgagagccgaggacaccgccgtgtactattgtgcctctggcgtgtacagcttcgactacagaggccagggcaccctggtcacagtctcttctggtaccggcggaggcggatctggcggcggaggtagcggtggcggaggatctgaattcgagatcgtgctgacacagagccctgccaccctgtctctgagccctggcgaaagagccaccctgagctgtagagccagccagagcgtgtccagctacctggcctggtatcagcagaagcccggccaggctccccggctgctgatctacgatgccagcaatagagccaccggcatccccgccagattttccggctctggcagcggcaccgacttcaccctgaccatcagctccctggaacccgaggacttcgccgtgtactactgccagcagcggagcaactggcccatcacattcggccagggcacccggctggaaatcaaactcgagatccagaaccctgatcctgccgtgtaccagctgcgggatagcaagagcagcgacaagagcgtgtgtctgttcaccgacttcgacagccagaccaacgtgtcccagagcaaggactccgacgtgtacatcaccgataagtgcgtgctggacatgcggagcatggacttcaagagcaactccgccgtggcctggtccaacaagtccgatttcgcctgcgccaacgccttcaacaacagcattatccccgaggacacattcttcccaagccccgagagcagctgcgacgtgaagctggtggaaaagagcttcgagacagacaccaacctgaacttccagaacctgagcgtgatcggcttcagaatcctgctgctgaaagtggccggctttaacctgctgatgaccctgcggctgtggtccagccgcgccaagagaagcggatctggcgtgaagcagaccctgaatttcgacctgctgaagctggctggcgacgtggaatccaacccaggccctactagtatggactggatttggcgcatccttttccttgtcggcgctgctaccggcgcgcattccttcgaagaggtgcagcttgttgagtctggcggaggactggtgcagcccgatagaagcctgagactgtcttgtgccgccagcggcttcaccttccacgattatgccatgcactgggtccgacaggcccctggcaaaggacttgaatgggtgtccaccatctcttggaacagcggcacaatcggctacgccgactctgtgaagggcagattcaccatcagccgggacaacgccaagaacagcctgtacctccagatgaactccctgagagccgaggacacagccctgtactactgcgccaaggacatccagtacggcaactactactacggcatggacgtgtggggccagggcacaacagtgacagtctcttctacgcgtgaggacctgaagaacgtgttcccacctgaggtggccgtgttcgagcctagcgaggccgagatcagccacacccagaaagccaccctcgtgtgcctggctaccggcttctaccccgaccatgtggaactgtcttggtgggtcaacggcaaagaggtgcacagcggcgtgtgtaccgacccccagccactgaaagaacagcccgccctgaacgacagccggtactgcctgagcagcagactgagagtgtccgccaccttctggcagaacccccggaaccacttcagatgccaggtgcagttctacggcctgagcgagaacgacgagtggacccaggacagagccaagcccgtgacccagatcgtgtctgccgaagcctggggcagagccgattgcggctttaccagcgagagctaccagcagggcgtgctgagcgccaccatcctgtacgagatcctgctgggcaaggccaccctgtacgccgtgctggtgtctgccctggtgctgatggctatggtcaagcggaaggacagccgggga

SEQ ID NO: 2137 - DNA, 2268 bp, Artificial Sequence
  Synthetic Polynucloetide
atggccttaccagtgaccgccttgctcctgccgctggccttgctgctccacgccgccaggccggaagtgcagctggttgaatctggcggaggactggttcagcctggcggatctctgagactgtcttgtgccgccagcggcttcagcttcagcgacttttggatgagctgggtccgacaggcccctggcaaaggacttgaatgggtcgccacaatcagccaggccggcagcgagaaggactacgtggactctgtgaagggcagattcaccatcagccgggacaacgccaagaagtccctgtacctccagatgaacagcctgagagccgaggacaccgccgtgtactattgtgcctctggcgtgtacagcttcgactacagaggccagggcaccctggtcacagtctcttctggtaccggcggaggcggatctggcggcggaggtagcggtggcggaggatctgaattcgacatccagatgacacagagccctagcagcctgtctgccagcgtgggagatagagtgaccatcaactgcaaggccagccaggacatcaacagctacctgagctggttccagcagaagcctggcaaggcccctaagacactgatctaccgggccaacagactggtggatggcgtgccaagcagattttctggcagcggcagcggccaggattacaccctgacaatatccagcctccagcctgaggacttcgccacctactactgcctccagtacgacgagttccctctgacctttggcggaggcaccaaggtggaaatcaaactcgagatccagaaccctgatcctgccgtgtaccagctgcgggatagcaagagcagcgacaagagcgtgtgtctgttcaccgacttcgacagccagaccaacgtgtcccagagcaaggactccgacgtgtacatcaccgataagtgcgtgctggacatgcggagcatggacttcaagagcaactccgccgtggcctggtccaacaagtccgatttcgcctgcgccaacgccttcaacaacagcattatccccgaggacacattcttcccaagccccgagagcagctgcgacgtgaagctggtggaaaagagcttcgagacagacaccaacctgaacttccagaacctgagcgtgatcggcttcagaatcctgctgctgaaagtggccggctttaacctgctgatgaccctgcggctgtggtccagccgcgccaagagaagcggatctggcgtgaagcagaccctgaatttcgacctgctgaagctggctggcgacgtggaatccaacccaggccctactagtatggactggatttggcgcatccttttccttgtcggcgctgctaccggcgcgcattccttcgaacaggtgcaactggtgcagtctggggccgaagtgaagaaacctggggcctctgtgaaggtgtcctgcaaagccagcggctacacctttaccaactacgacatcaactgggtccgacaggctccaggccaaggactggaatggatcggctggatctatcctggcgacggcagcaccaagtacaacgagaagttcaaggccaaggccacactgaccgccgataccagcacaagcaccgcctacatggaactgcggagcctgagaagcgacgacaccgccgtgtactattgtgcctccggctacgaggacgctatggactattggggccagggcaccaccgtgacagtgtctagtacgcgtgaggacctgaagaacgtgttcccacctgaggtggccgtgttcgagcctagcgaggccgagatcagccacacccagaaagccaccctcgtgtgcctggctaccggcttctaccccgaccatgtggaactgtcttggtgggtcaacggcaaagaggtgcacagcggcgtgtgtaccgacccccagccactgaaagaacagcccgccctgaacgacagccggtactgcctgagcagcagactgagagtgtccgccaccttctggcagaacccccggaaccacttcagatgccaggtgcagttctacggcctgagcgagaacgacgagtggacccaggacagagccaagcccgtgacccagatcgtgtctgccgaagcctggggcagagccgattgcggctttaccagcgagagctaccagcagggcgtgctgagcgccaccatcctgtacgagatcctgctgggcaaggccaccctgtacgccgtgctggtgtctgccctggtgctgatggctatggtcaagcggaaggacagccgggga

SEQ ID NO: 2138 - DNA, 2274 bp, Artificial Sequence
  Synthetic Polynucloetide
atggccttaccagtgaccgccttgctcctgccgctggccttgctgctccacgccgccaggccggaagtgcagctggttgaatctggcggaggactggttcagcctggcggatctctgagactgtcttgtgccgccagcggcttcagcttcagcgacttttggatgagctgggtccgacaggcccctggcaaaggacttgaatgggtcgccacaatcagccaggccggcagcgagaaggactacgtggactctgtgaagggcagattcaccatcagccgggacaacgccaagaagtccctgtacctccagatgaacagcctgagagccgaggacaccgccgtgtactattgtgcctctggcgtgtacagcttcgactacagaggccagggcaccctggtcacagtctcttctggtaccggcggaggcggatctggcggcggaggtagcggtggcggaggatctgaattcgacatcgtgatgacccagacacctctgagcctgagcgtgacacctggacagcctgccagcattagctgcaagagcagccagtctctgctggacggcgacggcaagacctacctgaattggctgctccagaagcctggacagagccctcagcggctgatctacctggtgtccaagctggatagcggcgtgcccgatagattttctggcagcggctctggcaccgacttcaccctgaagatcagcagagtggaagccgaggacgtgggcgtgtactactgttggcagggcacacacttccccagaacattcggccagggcacaaagctggaaatcaaactcgagatccagaaccctgatcctgccgtgtaccagctgcgggatagcaagagcagcgacaagagcgtgtgtctgttcaccgacttcgacagccagaccaacgtgtcccagagcaaggactccgacgtgtacatcaccgataagtgcgtgctggacatgcggagcatggacttcaagagcaactccgccgtggcctggtccaacaagtccgatttcgcctgcgccaacgccttcaacaacagcattatccccgaggacacattcttcccaagccccgagagcagctgcgacgtgaagctggtggaaaagagcttcgagacagacaccaacctgaacttccagaacctgagcgtgatcggcttcagaatcctgctgctgaaagtggccggctttaacctgctgatgaccctgcggctgtggtccagccgcgccaagagaagcggatctggcgtgaagcagaccctgaatttcgacctgctgaagctggctggcgacgtggaatccaacccaggccctactagtatggactggatttggcgcatccttttccttgtcggcgctgctaccggcgcgcattccttcgaacaagtgcaactggttcagagcggagccgaagtgaagaaacctggggcctctgtgaaggtgtcctgcaaggccagcggctacaccttcaaggacacctacatccactgggtccgacaggcccctggacaaggacttgagtggatgggcagaatcgaccccgccaacggcaacaccaaatacgaccccaagttccagggcagagtgaccatgaccagagacaccagcatcagcaccgcctacatggaactgagccggctgagatccgatgacaccgccgtgtactattgcgctagaagaggcggagtggattggggccagggaacactggttaccgtgtctagtacgcgtgaggacctgaagaacgtgttcccacctgaggtggccgtgttcgagcctagcgaggccgagatcagccacacccagaaagccaccctcgtgtgcctggctaccggcttctaccccgaccatgtggaactgtcttggtgggtcaacggcaaagaggtgcacagcggcgtgtgtaccgacccccagccactgaaagaacagcccgccctgaacgacagccggtactgcctgagcagcagactgagagtgtccgccaccttctggcagaacccccggaaccacttcagatgccaggtgcagttctacggcctgagcgagaacgacgagtggacccaggacagagccaagcccgtgacccagatcgtgtctgccgaagcctggggcagagccgattgcggctttaccagcgagagctaccagcagggcgtgctgagcgccaccatcctgtacgagatcctgctgggcaaggccaccctgtacgccgtgctggtgtctgccctggtgctgatggctatggtcaagcggaaggacagccgggga

SEQ ID NO: 2139 - DNA, 2277 bp, Artificial Sequence
  Synthetic Polynucloetide
atggccttaccagtgaccgccttgctcctgccgctggccttgctgctccacgccgccaggccggaagtgcagctggttgaatctggcggaggactggttcagcctggcggatctctgagactgtcttgtgccgccagcggcttcagcttcagcgacttttggatgagctgggtccgacaggcccctggcaaaggacttgaatgggtcgccacaatcagccaggccggcagcgagaaggactacgtggactctgtgaagggcagattcaccatcagccgggacaacgccaagaagtccctgtacctccagatgaacagcctgagagccgaggacaccgccgtgtactattgtgcctctggcgtgtacagcttcgactacagaggccagggcaccctggtcacagtctcttctggtaccggcggaggcggatctggcggcggaggtagcggtggcggaggatctgaattcgacatccagatgacacagagccctagcagcctgtctgccagcgtgggagacagagtgaccatcacatgcaaggccagccaggatgtgtctacagccgtggcctggttccagcagaagcctggaaaagcccctaagctgctgatctacagccccagctacagatacaccggcgtgcccagcagattttctggcagcggctctggcaccgacttcaccctgacaatatccagcctccagcctgaggacttcacctactactgccagcagctctacagcaccccttacacattcggccagggcaccaaggtggaaatcaaactcgagatccagaaccctgatcctgccgtgtaccagctgcgggatagcaagagcagcgacaagagcgtgtgtctgttcaccgacttcgacagccagaccaacgtgtcccagagcaaggactccgacgtgtacatcaccgataagtgcgtgctggacatgcggagcatggacttcaagagcaactccgccgtggcctggtccaacaagtccgatttcgcctgcgccaacgccttcaacaacagcattatccccgaggacacattcttcccaagccccgagagcagctgcgacgtgaagctggtggaaaagagcttcgagacagacaccaacctgaacttccagaacctgagcgtgatcggcttcagaatcctgctgctgaaagtggccggctttaacctgctgatgaccctgcggctgtggtccagccgcgccaagagaagcggatctggcgtgaagcagaccctgaatttcgacctgctgaagctggctggcgacgtggaatccaacccaggccctactagtatggactggatttggcgcatccttttccttgtcggcgctgctaccggcgcgcattccttcgaagaagtgcaactggttcagagcggagccgaagtgaagaaacctggggcctctgtgaaggtgtcctgcaaagccagcggctacacctttaccgactactacctggacgtggtcgtgcggcaagctcctggacaaggactggaatggatcggcagagtgaacccctacaacggcggcaccatctacaaccagaaattcaagggaagagtgaccctgaccagagacaccagcacctccacagcctacctggaactgagcagcctgagaagcgaagataccgccgtgtactactgcgccagggaccactacagatatgaccctctgctggactactggggccagggaaccctggttacagtgtctagtacgcgtgaggacctgaagaacgtgttcccacctgaggtggccgtgttcgagcctagcgaggccgagatcagccacacccagaaagccaccctcgtgtgcctggctaccggcttctaccccgaccatgtggaactgtcttggtgggtcaacggcaaagaggtgcacagcggcgtgtgtaccgacccccagccactgaaagaacagcccgccctgaacgacagccggtactgcctgagcagcagactgagagtgtccgccaccttctggcagaacccccggaaccacttcagatgccaggtgcagttctacggcctgagcgagaacgacgagtggacccaggacagagccaagcccgtgacccagatcgtgtctgccgaagcctggggcagagccgattgcggctttaccagcgagagctaccagcagggcgtgctgagcgccaccatcctgtacgagatcctgctgggcaaggccaccctgtacgccgtgctggtgtctgccctggtgctgatggctatggtcaagcggaaggacagccgggga

SEQ ID NO: 2140 - DNA, 2295 bp, Artificial Sequence
  Synthetic Polynucloetide
atggccttaccagtgaccgccttgctcctgccgctggccttgctgctccacgccgccaggccggaagtgcagctggttgaatctggcggaggactggttcagcctggcggatctctgagactgtcttgtgccgccagcggcttcagcttcagcgacttttggatgagctgggtccgacaggcccctggcaaaggacttgaatgggtcgccacaatcagccaggccggcagcgagaaggactacgtggactctgtgaagggcagattcaccatcagccgggacaacgccaagaagtccctgtacctccagatgaacagcctgagagccgaggacaccgccgtgtactattgtgcctctggcgtgtacagcttcgactacagaggccagggcaccctggtcacagtctcttctggtaccggcggaggcggatctggcggcggaggtagcggtggcggaggatctgaattcgacatccagatgacacagagccctagcagcctgtctgccagcgtgggagacagagtgaccatcacctgtagagccagccagagcgtgtccaccagcagctacaactacatgcactggtatcagcagaagcccggcaagcctcctaagctgctgattaagtacgccagcaacctggaaagcggcgtgcccagcagattttctggcagcggctctggcaccgacttcaccctgacaatatccagcctccagcctgaggacttcgccacctactactgtcagcactcctgggagatccctctgacattcggccagggcaccaaggtggaaatcaaactcgagatccagaaccctgatcctgccgtgtaccagctgcgggatagcaagagcagcgacaagagcgtgtgtctgttcaccgacttcgacagccagaccaacgtgtcccagagcaaggactccgacgtgtacatcaccgataagtgcgtgctggacatgcggagcatggacttcaagagcaactccgccgtggcctggtccaacaagtccgatttcgcctgcgccaacgccttcaacaacagcattatccccgaggacacattcttcccaagccccgagagcagctgcgacgtgaagctggtggaaaagagcttcgagacagacaccaacctgaacttccagaacctgagcgtgatcggcttcagaatcctgctgctgaaagtggccggctttaacctgctgatgaccctgcggctgtggtccagccgcgccaagagaagcggatctggcgtgaagcagaccctgaatttcgacctgctgaagctggctggcgacgtggaatccaacccaggccctactagtatggactggatttggcgcatccttttccttgtcggcgctgctaccggcgcgcattccttcgaagaagtgcaactggttcagagcggagccgaagtgaagaaacctggggcctctgtgaaggtgtcctgcaaggccagcggctacagcttcaccgactattatatgcactgggtccgacaggctccaggccagggacttgagtggatcggcagaatcaacccctacaacggcgctgccttctacagccagaacttcaaggatagagtgaccctgaccgtggacaccagcaccagcacagcctacctggaactgagcagcctgagaagcgaggacaccgccgtgtactactgcgccattgagagaggcgctgacctggaaggctacgctatggattattggggccagggaaccctggtcaccgtgtcatctacgcgtgaggacctgaagaacgtgttcccacctgaggtggccgtgttcgagcctagcgaggccgagatcagccacacccagaaagccaccctcgtgtgcctggctaccggcttctaccccgaccatgtggaactgtcttggtgggtcaacggcaaagaggtgcacagcggcgtgtgtaccgacccccagccactgaaagaacagcccgccctgaacgacagccggtactgcctgagcagcagactgagagtgtccgccaccttctggcagaacccccggaaccacttcagatgccaggtgcagttctacggcctgagcgagaacgacgagtggacccaggacagagccaagcccgtgacccagatcgtgtctgccgaagcctggggcagagccgattgcggctttaccagcgagagctaccagcagggcgtgctgagcgccaccatcctgtacgagatcctgctgggcaaggccaccctgtacgccgtgctggtgtctgccctggtgctgatggctatggtcaagcggaaggacagccgggga

SEQ ID NO: 2141 - DNA, 2289 bp, Artificial Sequence
  Synthetic Polynucloetide
atggccttaccagtgaccgccttgctcctgccgctggccttgctgctccacgccgccaggccggaagtgcagctggttgaatctggcggaggactggttcagcctggcggatctctgagactgtcttgtgccgccagcggcttcagcttcagcgacttttggatgagctgggtccgacaggcccctggcaaaggacttgaatgggtcgccacaatcagccaggccggcagcgagaaggactacgtggactctgtgaagggcagattcaccatcagccgggacaacgccaagaagtccctgtacctccagatgaacagcctgagagccgaggacaccgccgtgtactattgtgcctctggcgtgtacagcttcgactacagaggccagggcaccctggtcacagtctcttctggtaccggcggaggcggatctggcggcggaggtagcggtggcggaggatctgaattcgagatcgtgctgacacagtctccagccacactgagcgcttctccaggcgagagagtgaccctgacctgtagagccagcagcaacgtgatctccagctacgtgcactggtatcagcagaagcctggcagcagccccagactgtttctgtacagcaccagcaatctggcctccggcgtgccaagcagattttctggctctggcagcggcaccgacttcacctttaccatctctagcctggaagccgaggacgccgccacctactactgtcagcagtacagcggctaccctctgaccttcggccagggcacaagactggaaatcaaactcgagatccagaaccctgatcctgccgtgtaccagctgcgggatagcaagagcagcgacaagagcgtgtgtctgttcaccgacttcgacagccagaccaacgtgtcccagagcaaggactccgacgtgtacatcaccgataagtgcgtgctggacatgcggagcatggacttcaagagcaactccgccgtggcctggtccaacaagtccgatttcgcctgcgccaacgccttcaacaacagcattatccccgaggacacattcttcccaagccccgagagcagctgcgacgtgaagctggtggaaaagagcttcgagacagacaccaacctgaacttccagaacctgagcgtgatcggcttcagaatcctgctgctgaaagtggccggctttaacctgctgatgaccctgcggctgtggtccagccgcgccaagagaagcggatctggcgtgaagcagaccctgaatttcgacctgctgaagctggctggcgacgtggaatccaacccaggccctactagtatggactggatttggcgcatccttttccttgtcggcgctgctaccggcgcgcattccttcgaacaagttcagctgcaagagtctggccctggcctggtcaagcctagcgaaacactgagcctgacctgcgccgtgtctggctactctatcaccagcgcctactattggaactggatcagacagcctcctggcaaaggactggaatggatcggctacatcagctacgacggcagaaacaactacaaccccagcctgaagaaccggatcaccatcaatcccgacaccagcaagaaccagttcagcctccagctgaacagcgtgacccctgaggataccgccgtgtactactgtgccagagaaggcgactacgacgtgggcaactactacgctatggactactggggccagggaaccctggtcacagtctcttctacgcgtgaggacctgaagaacgtgttcccacctgaggtggccgtgttcgagcctagcgaggccgagatcagccacacccagaaagccaccctcgtgtgcctggctaccggcttctaccccgaccatgtggaactgtcttggtgggtcaacggcaaagaggtgcacagcggcgtgtgtaccgacccccagccactgaaagaacagcccgccctgaacgacagccggtactgcctgagcagcagactgagagtgtccgccaccttctggcagaacccccggaaccacttcagatgccaggtgcagttctacggcctgagcgagaacgacgagtggacccaggacagagccaagcccgtgacccagatcgtgtctgccgaagcctggggcagagccgattgcggctttaccagcgagagctaccagcagggcgtgctgagcgccaccatcctgtacgagatcctgctgggcaaggccaccctgtacgccgtgctggtgtctgccctggtgctgatggctatggtcaagcggaaggacagccgggga

SEQ ID NO: 2142 - DNA, 2289 bp, Artificial Sequence
  Synthetic Polynucloetide
atggccttaccagtgaccgccttgctcctgccgctggccttgctgctccacgccgccaggccggaagtgcagctggttgaatctggcggaggactggttcagcctggcggatctctgagactgtcttgtgccgccagcggcttcagcttcagcgacttttggatgagctgggtccgacaggcccctggcaaaggacttgaatgggtcgccacaatcagccaggccggcagcgagaaggactacgtggactctgtgaagggcagattcaccatcagccgggacaacgccaagaagtccctgtacctccagatgaacagcctgagagccgaggacaccgccgtgtactattgtgcctctggcgtgtacagcttcgactacagaggccagggcaccctggtcacagtctcttctggtaccggcggaggcggatctggcggcggaggtagcggtggcggaggatctgaattcgagatcgtgctgacacagtctcccgccacactgtcactgtctccaggcgaaagagccacactgagctgtagagccagcagcaacgtgatctccagctacgtgcactggtatcagcagaagcctggacaggcccctcggctgctgatctacagcacaagcaatctggcctctggcatccccgccagattttctggctctggaagcggcaccgacttcaccctgaccataagcagcctggaacctgaggacttcgccgtgtactactgccagcagtatagcggctaccctctgaccttcggccagggcacaagactggaaatcaaactcgagatccagaaccctgatcctgccgtgtaccagctgcgggatagcaagagcagcgacaagagcgtgtgtctgttcaccgacttcgacagccagaccaacgtgtcccagagcaaggactccgacgtgtacatcaccgataagtgcgtgctggacatgcggagcatggacttcaagagcaactccgccgtggcctggtccaacaagtccgatttcgcctgcgccaacgccttcaacaacagcattatccccgaggacacattcttcccaagccccgagagcagctgcgacgtgaagctggtggaaaagagcttcgagacagacaccaacctgaacttccagaacctgagcgtgatcggcttcagaatcctgctgctgaaagtggccggctttaacctgctgatgaccctgcggctgtggtccagccgcgccaagagaagcggatctggcgtgaagcagaccctgaatttcgacctgctgaagctggctggcgacgtggaatccaacccaggccctactagtatggactggatttggcgcatccttttccttgtcggcgctgctaccggcgcgcattccttcgaagaagtgcaactggtggaaagtggcggcggactggtgcaacctggaagaagcctgagactgtcctgtgccgccagcggctactctatcacaagcgcctactactggaactgggtccgacaggctcctggcaaaggactggaatgggtgtcctacatcagctacgacggcagaaacaactacaaccccagcctgaagaaccgcttcaccatcagccgggacaacgccaagaagtccctgtacctccagatgaacagcctgagagccgaggacacagccctgtactattgcgccaaagagggcgactacgacgtcggcaactactacgctatggactactggggccagggaaccaccgtgactgtctcttctacgcgtgaggacctgaagaacgtgttcccacctgaggtggccgtgttcgagcctagcgaggccgagatcagccacacccagaaagccaccctcgtgtgcctggctaccggcttctaccccgaccatgtggaactgtcttggtgggtcaacggcaaagaggtgcacagcggcgtgtgtaccgacccccagccactgaaagaacagcccgccctgaacgacagccggtactgcctgagcagcagactgagagtgtccgccaccttctggcagaacccccggaaccacttcagatgccaggtgcagttctacggcctgagcgagaacgacgagtggacccaggacagagccaagcccgtgacccagatcgtgtctgccgaagcctggggcagagccgattgcggctttaccagcgagagctaccagcagggcgtgctgagcgccaccatcctgtacgagatcctgctgggcaaggccaccctgtacgccgtgctggtgtctgccctggtgctgatggctatggtcaagcggaaggacagccgggga

SEQ ID NO: 2143 - DNA, 2286 bp, Artificial Sequence
  Synthetic Polynucloetide
atggccttaccagtgaccgccttgctcctgccgctggccttgctgctccacgccgccaggccggaagtgcagctggttgaatctggcggaggactggttcagcctggcggatctctgagactgtcttgtgccgccagcggcttcagcttcagcgacttttggatgagctgggtccgacaggcccctggcaaaggacttgaatgggtcgccacaatcagccaggccggcagcgagaaggactacgtggactctgtgaagggcagattcaccatcagccgggacaacgccaagaagtccctgtacctccagatgaacagcctgagagccgaggacaccgccgtgtactattgtgcctctggcgtgtacagcttcgactacagaggccagggcaccctggtcacagtctcttctggtaccggcggaggcggatctggcggcggaggtagcggtggcggaggatctgaattcgacgtggtcatgacacagaccccactgagcctgcctgtgtctctgggagatcaggccagcatctcctgtagaagcagccagagcctggtgcacagcaacggcaacacctacctgcggtggtatctccagaagcctggacagagccccaaggtgctgatctacaaggtgtccaacagagtgtccggcgtgcccgatagattttctggcagcggctctggcaccgacttcaccctgaagatcaatagagtggaagccgaggacctgggcgtgtacttctgtagccagagcacccatgtgccttggacctttggcggaggcaccaagctggaaatcaagctcgagatccagaaccctgatcctgccgtgtaccagctgcgggatagcaagagcagcgacaagagcgtgtgtctgttcaccgacttcgacagccagaccaacgtgtcccagagcaaggactccgacgtgtacatcaccgataagtgcgtgctggacatgcggagcatggacttcaagagcaactccgccgtggcctggtccaacaagtccgatttcgcctgcgccaacgccttcaacaacagcattatccccgaggacacattcttcccaagccccgagagcagctgcgacgtgaagctggtggaaaagagcttcgagacagacaccaacctgaacttccagaacctgagcgtgatcggcttcagaatcctgctgctgaaagtggccggctttaacctgctgatgaccctgcggctgtggtccagccgcgccaagagaagcggatctggcgtgaagcagaccctgaatttcgacctgctgaagctggctggcgacgtggaatccaacccaggccctactagtatggactggatttggcgcatccttttccttgtcggcgctgctaccggcgcgcattccttcgaaggcgtgaagctggacgagacaggcggaggacttgttcaacctggcggagccatgaagctgagctgtgtgaccagcggctttaccttcggccactactggatgaactgggtccgacagtcccctgagaaaggactggaatgggtcgcccagttcagaaacaagccctacaactacgaaacctactacagcgacagcgtgaagggcagattcaccatcagccgggacgacagcaagtccagcgtgtacctccagatgaacaacctgcgcgtggaagataccggcatctactactgtaccggggccagctacggcatggaatatctcggccagggcaccagcgtgaccgtgtctacaacgcgtgaggacctgaagaacgtgttcccacctgaggtggccgtgttcgagcctagcgaggccgagatcagccacacccagaaagccaccctcgtgtgcctggctaccggcttctaccccgaccatgtggaactgtcttggtgggtcaacggcaaagaggtgcacagcggcgtgtgtaccgacccccagccactgaaagaacagcccgccctgaacgacagccggtactgcctgagcagcagactgagagtgtccgccaccttctggcagaacccccggaaccacttcagatgccaggtgcagttctacggcctgagcgagaacgacgagtggacccaggacagagccaagcccgtgacccagatcgtgtctgccgaagcctggggcagagccgattgcggctttaccagcgagagctaccagcagggcgtgctgagcgccaccatcctgtacgagatcctgctgggcaaggccaccctgtacgccgtgctggtgtctgccctggtgctgatggctatggtcaagcggaaggacagccgggga

SEQ ID NO: 2144 - DNA, 2304 bp, Artificial Sequence
  Synthetic Polynucloetide
atggccttaccagtgaccgccttgctcctgccgctggccttgctgctccacgccgccaggccggaagtgcagctggttgaatctggcggaggactggttcagcctggcggatctctgagactgtcttgtgccgccagcggcttcagcttcagcgacttttggatgagctgggtccgacaggcccctggcaaaggacttgaatgggtcgccacaatcagccaggccggcagcgagaaggactacgtggactctgtgaagggcagattcaccatcagccgggacaacgccaagaagtccctgtacctccagatgaacagcctgagagccgaggacaccgccgtgtactattgtgcctctggcgtgtacagcttcgactacagaggccagggcaccctggtcacagtctcttctggtaccggcggaggcggatctggcggcggaggtagcggtggcggaggatctgaattccaggtgcaactggtggaatctggcggcaatctggttcagcctggcggctctctgagactgtcttgtgccgccagcggcttcaccttcggcagcttttctatgagctgggtccgacaagctcctggcggaggacttgaatgggtggcaggactgtctgccagaagcagcctgacacactacgccgactctgtgaagggcagattcaccatcagccgggacaacgccaagaacagcgtgtacctccagatgaacagcctgagagtggaagataccgccgtgtactactgcgccagaagaagctacgacagcagcggctactggggccacttctacagctacatggatgtgtggggccagggcaccctggttacagtttctctcgagatccagaaccctgatcctgccgtgtaccagctgcgggatagcaagagcagcgacaagagcgtgtgtctgttcaccgacttcgacagccagaccaacgtgtcccagagcaaggactccgacgtgtacatcaccgataagtgcgtgctggacatgcggagcatggacttcaagagcaactccgccgtggcctggtccaacaagtccgatttcgcctgcgccaacgccttcaacaacagcattatccccgaggacacattcttcccaagccccgagagcagctgcgacgtgaagctggtggaaaagagcttcgagacagacaccaacctgaacttccagaacctgagcgtgatcggcttcagaatcctgctgctgaaagtggccggctttaacctgctgatgaccctgcggctgtggtccagccgcgccaagagaagcggatctggcgtgaagcagaccctgaatttcgacctgctgaagctggctggcgacgtggaatccaacccaggccctactagtatggactggatttggcgcatccttttccttgtcggcgctgctaccggcgcgcattccttcgaatctgtgctgacccagcctagctccgtgtctgctgctcctggacagaaagtgaccatctcctgtagcggcagcaccagcaacatcggcaacaactacgtgtcctggtatcagcagcaccccggcaaggcccctaagctgatgatctacgacgtgtccaagaggcccagcggcgtgccagatagattttccggcagcaagagcggcaacagcgccagcctggatattagcggactccagtctgaggacgaggccgactactattgcgccgcctgggatgatagcctgagcgagtttctgtttggcaccggcaccaagctgacagtgcttggaacgcgtgaggacctgaagaacgtgttcccacctgaggtggccgtgttcgagcctagcgaggccgagatcagccacacccagaaagccaccctcgtgtgcctggctaccggcttctaccccgaccatgtggaactgtcttggtgggtcaacggcaaagaggtgcacagcggcgtgtgtaccgacccccagccactgaaagaacagcccgccctgaacgacagccggtactgcctgagcagcagactgagagtgtccgccaccttctggcagaacccccggaaccacttcagatgccaggtgcagttctacggcctgagcgagaacgacgagtggacccaggacagagccaagcccgtgacccagatcgtgtctgccgaagcctggggcagagccgattgcggctttaccagcgagagctaccagcagggcgtgctgagcgccaccatcctgtacgagatcctgctgggcaaggccaccctgtacgccgtgctggtgtctgccctggtgctgatggctatggtcaagcggaaggacagccgggga

SEQ ID NO: 2145 - DNA, 2289 bp, Artificial Sequence
  Synthetic Polynucloetide
atggccttaccagtgaccgccttgctcctgccgctggccttgctgctccacgccgccaggccggaagtgcagctggttgaatctggcggaggactggttcagcctggcggatctctgagactgtcttgtgccgccagcggcttcagcttcagcgacttttggatgagctgggtccgacaggcccctggcaaaggacttgaatgggtcgccacaatcagccaggccggcagcgagaaggactacgtggactctgtgaagggcagattcaccatcagccgggacaacgccaagaagtccctgtacctccagatgaacagcctgagagccgaggacaccgccgtgtactattgtgcctctggcgtgtacagcttcgactacagaggccagggcaccctggtcacagtctcttctggtaccggcggaggcggatctggcggcggaggtagcggtggcggaggatctgaattcgacgtggtcatgacacagagcccttctagcctgtctgccagcgtgggcgacagagtgacaatcacctgtcagagcagcctggacatcagccactacctgaactggtatcagcagaagcccggcaaggcccctaagctgctgatctacgacgccagcaatctggaaaccggcgtgcccagcagattttctggcagcggaagcggcacccacttcaccttcacaatatccagcctccagcctgaggacttcgccacctactactgccagcagtacgacaacctgcctctgacctttggcggaggcaccaagctggaaatcaagagactcgagatccagaaccctgatcctgccgtgtaccagctgcgggatagcaagagcagcgacaagagcgtgtgtctgttcaccgacttcgacagccagaccaacgtgtcccagagcaaggactccgacgtgtacatcaccgataagtgcgtgctggacatgcggagcatggacttcaagagcaactccgccgtggcctggtccaacaagtccgatttcgcctgcgccaacgccttcaacaacagcattatccccgaggacacattcttcccaagccccgagagcagctgcgacgtgaagctggtggaaaagagcttcgagacagacaccaacctgaacttccagaacctgagcgtgatcggcttcagaatcctgctgctgaaagtggccggctttaacctgctgatgaccctgcggctgtggtccagccgcgccaagagaagcggatctggcgtgaagcagaccctgaatttcgacctgctgaagctggctggcgacgtggaatccaacccaggccctactagtatggactggatttggcgcatccttttccttgtcggcgctgctaccggcgcgcattccttcgaacaagttcaactggttcaatcaggcggaggcgtggtgcaacctggtggctctctgagagtgtcttgtgctgcctctggcgtgaccctgagcgactatggaatgcactgggtccgacaggcccctggcaaaggacttgagtgggtcgccttcatcagaaacgacggcagcgacaagtattacgccgacagcgtgaagggcagattcaccatcagccgggacaacagcgagaaaaccgtgtctctccagatgtctagcctgagagccgaggacaccgccgtgtactactgtgccaagaatggcgagagcggccctctggactactggtatctggatctgtggggcagaggcaccctggtcacagtctcttctacgcgtgaggacctgaagaacgtgttcccacctgaggtggccgtgttcgagcctagcgaggccgagatcagccacacccagaaagccaccctcgtgtgcctggctaccggcttctaccccgaccatgtggaactgtcttggtgggtcaacggcaaagaggtgcacagcggcgtgtgtaccgacccccagccactgaaagaacagcccgccctgaacgacagccggtactgcctgagcagcagactgagagtgtccgccaccttctggcagaacccccggaaccacttcagatgccaggtgcagttctacggcctgagcgagaacgacgagtggacccaggacagagccaagcccgtgacccagatcgtgtctgccgaagcctggggcagagccgattgcggctttaccagcgagagctaccagcagggcgtgctgagcgccaccatcctgtacgagatcctgctgggcaaggccaccctgtacgccgtgctggtgtctgccctggtgctgatggctatggtcaagcggaaggacagccgggga

SEQ ID NO: 2146 - DNA, 2301 bp, Artificial Sequence
  Synthetic Polynucloetide
atggccttaccagtgaccgccttgctcctgccgctggccttgctgctccacgccgccaggccggaagtgcagctggttgaatctggcggaggactggttcagcctggcggatctctgagactgtcttgtgccgccagcggcttcagcttcagcgacttttggatgagctgggtccgacaggcccctggcaaaggacttgaatgggtcgccacaatcagccaggccggcagcgagaaggactacgtggactctgtgaagggcagattcaccatcagccgggacaacgccaagaagtccctgtacctccagatgaacagcctgagagccgaggacaccgccgtgtactattgtgcctctggcgtgtacagcttcgactacagaggccagggcaccctggtcacagtctcttctggtaccggcggaggcggatctggcggcggaggtagcggtggcggaggatctgaattcagctacgagctgacacagcctccatccgtgtctggcacacctggacagagagtggctatctcctgtagcggcagcagcagcaacatcggcaccagaatggtcacctggtatcagcacgtgccaggcacagcccctaagctgctgatcttcaacaacaaccagcggcctagcggcgtgcccgatagattttctgccagcaagagcggcacaagcgccagcctggctatcatcggactccagtctgacgacgaggccgactactactgtgccacctgggacgacaacgtgaagtcctacgtgttcggcaccggcaccaaagtgacagtgcttggaagtagactcgagatccagaaccctgatcctgccgtgtaccagctgcgggatagcaagagcagcgacaagagcgtgtgtctgttcaccgacttcgacagccagaccaacgtgtcccagagcaaggactccgacgtgtacatcaccgataagtgcgtgctggacatgcggagcatggacttcaagagcaactccgccgtggcctggtccaacaagtccgatttcgcctgcgccaacgccttcaacaacagcattatccccgaggacacattcttcccaagccccgagagcagctgcgacgtgaagctggtggaaaagagcttcgagacagacaccaacctgaacttccagaacctgagcgtgatcggcttcagaatcctgctgctgaaagtggccggctttaacctgctgatgaccctgcggctgtggtccagccgcgccaagagaagcggatctggcgtgaagcagaccctgaatttcgacctgctgaagctggctggcgacgtggaatccaacccaggccctactagtatggactggatttggcgcatccttttccttgtcggcgctgctaccggcgcgcattccttcgaacttgaaatggcccaggttcagctccagcagtggggagctggactgctgaagcctagcgagacactgagcctgacctgtgctgtgtacggcggcagcttcagcggctactactggtcctggatcagacagcctcctggcaaaggactggaatggatcggcgagatcaaccacagcggctccaccaactacaaccccagcctgaagtccagagtgaccatcagcgtggacaccagcaagaaccagttctccctgaagctgagcagcgtgacagccgctgataccgccgtgtactattgcgctagagcccctcagtcttggtacgtgggagatgtgtggggccagggcacactggttacagtgtcatctacgcgtgaggacctgaagaacgtgttcccacctgaggtggccgtgttcgagcctagcgaggccgagatcagccacacccagaaagccaccctcgtgtgcctggctaccggcttctaccccgaccatgtggaactgtcttggtgggtcaacggcaaagaggtgcacagcggcgtgtgtaccgacccccagccactgaaagaacagcccgccctgaacgacagccggtactgcctgagcagcagactgagagtgtccgccaccttctggcagaacccccggaaccacttcagatgccaggtgcagttctacggcctgagcgagaacgacgagtggacccaggacagagccaagcccgtgacccagatcgtgtctgccgaagcctggggcagagccgattgcggctttaccagcgagagctaccagcagggcgtgctgagcgccaccatcctgtacgagatcctgctgggcaaggccaccctgtacgccgtgctggtgtctgccctggtgctgatggctatggtcaagcggaaggacagccgggga

SEQ ID NO: 2147 - DNA, 2292 bp, Artificial Sequence
  Synthetic Polynucloetide
atggccttaccagtgaccgccttgctcctgccgctggccttgctgctccacgccgccaggccggaagtgcagctggttgaatctggcggaggactggttcagcctggcggatctctgagactgtcttgtgccgccagcggcttcagcttcagcgacttttggatgagctgggtccgacaggcccctggcaaaggacttgaatgggtcgccacaatcagccaggccggcagcgagaaggactacgtggactctgtgaagggcagattcaccatcagccgggacaacgccaagaagtccctgtacctccagatgaacagcctgagagccgaggacaccgccgtgtactattgtgcctctggcgtgtacagcttcgactacagaggccagggcaccctggtcacagtctcttctggtaccggcggaggcggatctggcggcggaggtagcggtggcggaggatctgaattccagtctgtgctgacacagcctcctagcctgtctgtggcccctggaaagacagccagcatcacatgcggcggcaacaacatcggcatgaagtccgtgcactggtatcagcagaggccaggacaggctcctgtgctggtcatctactacgacagcgacagaccctctggcatccccggcagattttccggcagcaactctggcaataccgccacactgaccatctccagagtggaagctggcgacgaggccgactactactgccaagtgtgggataccaccggcgatcaccctggctatgtgtttggcaccggcaccaaagtgacagtgcttctcgagatccagaaccctgatcctgccgtgtaccagctgcgggatagcaagagcagcgacaagagcgtgtgtctgttcaccgacttcgacagccagaccaacgtgtcccagagcaaggactccgacgtgtacatcaccgataagtgcgtgctggacatgcggagcatggacttcaagagcaactccgccgtggcctggtccaacaagtccgatttcgcctgcgccaacgccttcaacaacagcattatccccgaggacacattcttcccaagccccgagagcagctgcgacgtgaagctggtggaaaagagcttcgagacagacaccaacctgaacttccagaacctgagcgtgatcggcttcagaatcctgctgctgaaagtggccggctttaacctgctgatgaccctgcggctgtggtccagccgcgccaagagaagcggatctggcgtgaagcagaccctgaatttcgacctgctgaagctggctggcgacgtggaatccaacccaggccctactagtatggactggatttggcgcatccttttccttgtcggcgctgctaccggcgcgcattccttcgaacaagttcaactggttcagagcggagccgaagtgaagaaacctggcagcagcgtgaaggtgtcctgcaaagcaagcggcggcacctttagcagctacgccatctcttgggtccgacaggcacctggacaaggactggaatggatgggcggcatcatccccatcttcggcacagccaattacgcccagaaattccagggcagagtgaccatcaccgccgacgagtctacaagcaccgcctacatggaactgagcagcctgagaagcgaggacaccgccgtgtactattgtgccagaggcgtgtacggctacagcggctctgccccttatgatgagtggggccagggaaccctggtcaccgtttcttctacgcgtgaggacctgaagaacgtgttcccacctgaggtggccgtgttcgagcctagcgaggccgagatcagccacacccagaaagccaccctcgtgtgcctggctaccggcttctaccccgaccatgtggaactgtcttggtgggtcaacggcaaagaggtgcacagcggcgtgtgtaccgacccccagccactgaaagaacagcccgccctgaacgacagccggtactgcctgagcagcagactgagagtgtccgccaccttctggcagaacccccggaaccacttcagatgccaggtgcagttctacggcctgagcgagaacgacgagtggacccaggacagagccaagcccgtgacccagatcgtgtctgccgaagcctggggcagagccgattgcggctttaccagcgagagctaccagcagggcgtgctgagcgccaccatcctgtacgagatcctgctgggcaaggccaccctgtacgccgtgctggtgtctgccctggtgctgatggctatggtcaagcggaaggacagccgggga

SEQ ID NO: 2148 - DNA, 2286 bp, Artificial Sequence
  Synthetic Polynucloetide
atggccttaccagtgaccgccttgctcctgccgctggccttgctgctccacgccgccaggccggaagtgcagctggttgaatctggcggaggactggttcagcctggcggatctctgagactgtcttgtgccgccagcggcttcagcttcagcgacttttggatgagctgggtccgacaggcccctggcaaaggacttgaatgggtcgccacaatcagccaggccggcagcgagaaggactacgtggactctgtgaagggcagattcaccatcagccgggacaacgccaagaagtccctgtacctccagatgaacagcctgagagccgaggacaccgccgtgtactattgtgcctctggcgtgtacagcttcgactacagaggccagggcaccctggtcacagtctcttctggtaccggcggaggcggatctggcggcggaggtagcggtggcggaggatctgaattcgaggtgcaactggttgagtctggcggaggactggtgcagcctggaagaagcctgagactgtcttgtgccgccagcggcttcaccttcgacgattatgccatgcactgggtccgacaggcccctggcaaaggacttgaatgggtgtccggcatctcctggaacagcggctctatcggctacgccgattccgtgaagggcagattcaccatcagccgggacaacgccaagaacagcctgtacctccagatgaactccctgagagccgaggacacagccctgtactactgcgccaaagacaaaggcggaggctactacgacttttggagcggcagcgattattggggccagggcacactggtcacagtgtctagcctcgagatccagaaccctgatcctgccgtgtaccagctgcgggatagcaagagcagcgacaagagcgtgtgtctgttcaccgacttcgacagccagaccaacgtgtcccagagcaaggactccgacgtgtacatcaccgataagtgcgtgctggacatgcggagcatggacttcaagagcaactccgccgtggcctggtccaacaagtccgatttcgcctgcgccaacgccttcaacaacagcattatccccgaggacacattcttcccaagccccgagagcagctgcgacgtgaagctggtggaaaagagcttcgagacagacaccaacctgaacttccagaacctgagcgtgatcggcttcagaatcctgctgctgaaagtggccggctttaacctgctgatgaccctgcggctgtggtccagccgcgccaagagaagcggatctggcgtgaagcagaccctgaatttcgacctgctgaagctggctggcgacgtggaatccaacccaggccctactagtatggactggatttggcgcatccttttccttgtcggcgctgctaccggcgcgcattccttcgaatcttctgagctgacacaggaccctgccgtgtctgttgctctgggccagacagtgcggattacctgtcagggcgatagcctgagaagctactacgcctcctggtatcagcagaagccaggccaggctcctgtgctggtcatctacggcaagaacaacagacccagcggcatccccgatagattcagcggaagcagctctggcaataccgccagcctgacaattactggcgctcaggccgaggacgaggccgactactactgcaacagcagagatagcagcggctgggttttcggcggaggcacaaaactgacagtgctgacgcgtgaggacctgaagaacgtgttcccacctgaggtggccgtgttcgagcctagcgaggccgagatcagccacacccagaaagccaccctcgtgtgcctggctaccggcttctaccccgaccatgtggaactgtcttggtgggtcaacggcaaagaggtgcacagcggcgtgtgtaccgacccccagccactgaaagaacagcccgccctgaacgacagccggtactgcctgagcagcagactgagagtgtccgccaccttctggcagaacccccggaaccacttcagatgccaggtgcagttctacggcctgagcgagaacgacgagtggacccaggacagagccaagcccgtgacccagatcgtgtctgccgaagcctggggcagagccgattgcggctttaccagcgagagctaccagcagggcgtgctgagcgccaccatcctgtacgagatcctgctgggcaaggccaccctgtacgccgtgctggtgtctgccctggtgctgatggctatggtcaagcggaaggacagccgggga

SEQ ID NO: 2149 - DNA, 2313 bp, Artificial Sequence
  Synthetic Polynucloetide
atggccttaccagtgaccgccttgctcctgccgctggccttgctgctccacgccgccaggccggaagtgcagctggttgaatctggcggaggactggttcagcctggcggatctctgagactgtcttgtgccgccagcggcttcagcttcagcgacttttggatgagctgggtccgacaggcccctggcaaaggacttgaatgggtcgccacaatcagccaggccggcagcgagaaggactacgtggactctgtgaagggcagattcaccatcagccgggacaacgccaagaagtccctgtacctccagatgaacagcctgagagccgaggacaccgccgtgtactattgtgcctctggcgtgtacagcttcgactacagaggccagggcaccctggtcacagtctcttctggtaccggcggaggcggatctggcggcggaggtagcggtggcggaggatctgaattcgaagtgcagctccagcagtctggacctggcctggttaagcctagccagacactgagcctgacctgtgccatcagcggcgatagcgtgctgagcaacagcgacacctggaactggatcagacagagccctagcagaggactggaatggctgggcagaacctaccacagaagcacttggtacgacgactacgccagctctgtgcggggcagagtgtccatcaatgtggacaccagcaagaaccagtacagcctgcaactgaacgccgtgacacctgaggataccggcgtgtactactgcgccagagacagactccaggacggcaactcttggagcgacgcctttgatgtgtggggccagggcacaatggtcaccgtttctagcctcgagatccagaaccctgatcctgccgtgtaccagctgcgggatagcaagagcagcgacaagagcgtgtgtctgttcaccgacttcgacagccagaccaacgtgtcccagagcaaggactccgacgtgtacatcaccgataagtgcgtgctggacatgcggagcatggacttcaagagcaactccgccgtggcctggtccaacaagtccgatttcgcctgcgccaacgccttcaacaacagcattatccccgaggacacattcttcccaagccccgagagcagctgcgacgtgaagctggtggaaaagagcttcgagacagacaccaacctgaacttccagaacctgagcgtgatcggcttcagaatcctgctgctgaaagtggccggctttaacctgctgatgaccctgcggctgtggtccagccgcgccaagagaagcggatctggcgtgaagcagaccctgaatttcgacctgctgaagctggctggcgacgtggaatccaacccaggccctactagtatggactggatttggcgcatccttttccttgtcggcgctgctaccggcgcgcattccttcgaacaatctgctctgacacagcctgccagcgtgtcaggatctcctggacagagcatcaccatctcttgcaccggcaccagctctgatgtcggcggctacaattacgtgtcctggtatcagcagcaccccggcaaggcccctaagctgatgatctacgacgtgtccaacagacccagcggcgtgtccaatagattctccggcagcaagagcggcaacaccgccagcctgacaatttctggactgcaagccgaggacgaggccgactactactgtagcagctacaccagcagcagcacactggtgtacgtgttcggcacaggcaccaaagtgaccgtgcttacgcgtgaggacctgaagaacgtgttcccacctgaggtggccgtgttcgagcctagcgaggccgagatcagccacacccagaaagccaccctcgtgtgcctggctaccggcttctaccccgaccatgtggaactgtcttggtgggtcaacggcaaagaggtgcacagcggcgtgtgtaccgacccccagccactgaaagaacagcccgccctgaacgacagccggtactgcctgagcagcagactgagagtgtccgccaccttctggcagaacccccggaaccacttcagatgccaggtgcagttctacggcctgagcgagaacgacgagtggacccaggacagagccaagcccgtgacccagatcgtgtctgccgaagcctggggcagagccgattgcggctttaccagcgagagctaccagcagggcgtgctgagcgccaccatcctgtacgagatcctgctgggcaaggccaccctgtacgccgtgctggtgtctgccctggtgctgatggctatggtcaagcggaaggacagccgggga

SEQ ID NO: 2150 - DNA, 2247 bp, Artificial Sequence
  Synthetic Polynucloetide
atggccttaccagtgaccgccttgctcctgccgctggccttgctgctccacgccgccaggccggaagtgcagctggttgaatctggcggaggactggttcagcctggcggatctctgagactgtcttgtgccgccagcggcttcagcttcagcgacttttggatgagctgggtccgacaggcccctggcaaaggacttgaatgggtcgccacaatcagccaggccggcagcgagaaggactacgtggactctgtgaagggcagattcaccatcagccgggacaacgccaagaagtccctgtacctccagatgaacagcctgagagccgaggacaccgccgtgtactattgtgcctctggcgtgtacagcttcgactacagaggccagggcaccctggtcacagtctcttctggtaccggcggaggcggatctggcggcggaggtagcggtggcggaggatctgaattccaggtgcaactggttcagtctggggccgaagtgaagaaacctggggcctctgtgaaggtgtcctgcaaggcttccggctacacctttaccagctacgacatcaactgggtccgacaggccacaggccaaggactggaatggatgggctggatgaaccccaacagcggcaataccggctacgcccagaaattccagggcagagtgaccatgaccagaaacaccagcatcagcaccgcctacatggaactgagcagcctgagaagcgaggacaccgccgtgtactattgcgccagaggcgacagcaccaaggtggaaatcaaactcgagatccagaaccctgatcctgccgtgtaccagctgcgggatagcaagagcagcgacaagagcgtgtgtctgttcaccgacttcgacagccagaccaacgtgtcccagagcaaggactccgacgtgtacatcaccgataagtgcgtgctggacatgcggagcatggacttcaagagcaactccgccgtggcctggtccaacaagtccgatttcgcctgcgccaacgccttcaacaacagcattatccccgaggacacattcttcccaagccccgagagcagctgcgacgtgaagctggtggaaaagagcttcgagacagacaccaacctgaacttccagaacctgagcgtgatcggcttcagaatcctgctgctgaaagtggccggctttaacctgctgatgaccctgcggctgtggtccagccgcgccaagagaagcggatctggcgtgaagcagaccctgaatttcgacctgctgaagctggctggcgacgtggaatccaacccaggccctactagtatggactggatttggcgcatccttttccttgtcggcgctgctaccggcgcgcattccttcgaacaatctgtgctgacccagcctagatccgtgtctggctctcctggacagagcgtgaccatctcttgtaccggcaccagctctgatgtcggcggctacaattacgtgtcctggtatcagcagcaccccggcgaagcccctaagctgattatctacgacgccgacaagcggcccagcggcatcagcaatagattcagctctggcaagagcggcaacaccgccagcctgacaatcagcggactccaggtggaagatgaggccgactactactgctgctcctatgccggcggaagcacctgggttttcggaggcggtacaaaagtgaccgtgctgacgcgtgaggacctgaagaacgtgttcccacctgaggtggccgtgttcgagcctagcgaggccgagatcagccacacccagaaagccaccctcgtgtgcctggctaccggcttctaccccgaccatgtggaactgtcttggtgggtcaacggcaaagaggtgcacagcggcgtgtgtaccgacccccagccactgaaagaacagcccgccctgaacgacagccggtactgcctgagcagcagactgagagtgtccgccaccttctggcagaacccccggaaccacttcagatgccaggtgcagttctacggcctgagcgagaacgacgagtggacccaggacagagccaagcccgtgacccagatcgtgtctgccgaagcctggggcagagccgattgcggctttaccagcgagagctaccagcagggcgtgctgagcgccaccatcctgtacgagatcctgctgggcaaggccaccctgtacgccgtgctggtgtctgccctggtgctgatggctatggtcaagcggaaggacagccgggga

SEQ ID NO: 2151 - DNA, 2313 bp, Artificial Sequence
  Synthetic Polynucloetide
atggccttaccagtgaccgccttgctcctgccgctggccttgctgctccacgccgccaggccggaagtgcagctggttgaatctggcggaggactggttcagcctggcggatctctgagactgtcttgtgccgccagcggcttcagcttcagcgacttttggatgagctgggtccgacaggcccctggcaaaggacttgaatgggtcgccacaatcagccaggccggcagcgagaaggactacgtggactctgtgaagggcagattcaccatcagccgggacaacgccaagaagtccctgtacctccagatgaacagcctgagagccgaggacaccgccgtgtactattgtgcctctggcgtgtacagcttcgactacagaggccagggcaccctggtcacagtctcttctggtaccggcggaggcggatctggcggcggaggtagcggtggcggaggatctgaattcgaagtgcagctccagcagtctggacctggcctggttaagcctagccagacactgagcctgacctgtgccatcagcggcgatagcgtgtcctctaatagcgccgcctggaactggatcagacagagccctagcagaggactggaatggctgggcagaacctactaccgcagcaagtggtacagcgactacgccgtgtccgtgaagtcccggatcaccatcaatcccgacaccagcaagaaccagttcagcctgcaactgaacagcgtgacccctgaggataccgccgtgtactactgcgccagagatccctacgacttttggagcggctaccccgacgcctttgacatctggggacagggcacaatggtcaccgtttctagcctcgagatccagaaccctgatcctgccgtgtaccagctgcgggatagcaagagcagcgacaagagcgtgtgtctgttcaccgacttcgacagccagaccaacgtgtcccagagcaaggactccgacgtgtacatcaccgataagtgcgtgctggacatgcggagcatggacttcaagagcaactccgccgtggcctggtccaacaagtccgatttcgcctgcgccaacgccttcaacaacagcattatccccgaggacacattcttcccaagccccgagagcagctgcgacgtgaagctggtggaaaagagcttcgagacagacaccaacctgaacttccagaacctgagcgtgatcggcttcagaatcctgctgctgaaagtggccggctttaacctgctgatgaccctgcggctgtggtccagccgcgccaagagaagcggatctggcgtgaagcagaccctgaatttcgacctgctgaagctggctggcgacgtggaatccaacccaggccctactagtatggactggatttggcgcatccttttccttgtcggcgctgctaccggcgcgcattccttcgaacaatctgctctgacacagcctgccagcgtgtcaggatctcctggacagagcatcaccatctcttgcaccggcaccagctctgatgtcggcggctacaattacgtgtcctggtatcagcagcaccccggcaaggcccctaaagtgattatcagcgaagtgaacaacagacccagcggcgtgtcccacagattcagcggctctaagtctggcaacaccgccagcctgacaatctctggactgcaagccgaggacgaggccgactacttctgtagcagctacaccagcggcagaaccctgtacgtgttcggcacaggcagcaaagtgacagtgctgggaacgcgtgaggacctgaagaacgtgttcccacctgaggtggccgtgttcgagcctagcgaggccgagatcagccacacccagaaagccaccctcgtgtgcctggctaccggcttctaccccgaccatgtggaactgtcttggtgggtcaacggcaaagaggtgcacagcggcgtgtgtaccgacccccagccactgaaagaacagcccgccctgaacgacagccggtactgcctgagcagcagactgagagtgtccgccaccttctggcagaacccccggaaccacttcagatgccaggtgcagttctacggcctgagcgagaacgacgagtggacccaggacagagccaagcccgtgacccagatcgtgtctgccgaagcctggggcagagccgattgcggctttaccagcgagagctaccagcagggcgtgctgagcgccaccatcctgtacgagatcctgctgggcaaggccaccctgtacgccgtgctggtgtctgccctggtgctgatggctatggtcaagcggaaggacagccgggga

SEQ ID NO: 2152 - DNA, 2310 bp, Artificial Sequence
  Synthetic Polynucloetide
atggccttaccagtgaccgccttgctcctgccgctggccttgctgctccacgccgccaggccggaagtgcagctggttgaatctggcggaggactggttcagcctggcggatctctgagactgtcttgtgccgccagcggcttcagcttcagcgacttttggatgagctgggtccgacaggcccctggcaaaggacttgaatgggtcgccacaatcagccaggccggcagcgagaaggactacgtggactctgtgaagggcagattcaccatcagccgggacaacgccaagaagtccctgtacctccagatgaacagcctgagagccgaggacaccgccgtgtactattgtgcctctggcgtgtacagcttcgactacagaggccagggcaccctggtcacagtctcttctggtaccggcggaggcggatctggcggcggaggtagcggtggcggaggatctgaattccaatctgctctgacacagcctgccagcgcctctggatctcctggacagagcgtgaccatctcctgtaccggcacctcttctgatgtcggcggctacaactacgtgtcctggtatcagcagcaccccggcaaggcccctaagctgatgatctacgacgtgtccaacagacccagcggcgtgtccaatagattctccggcagcaagagcggcaacaccgccagcctgacaatttctggactgcaagccgaggacgaggccgactactactgtagcagctacaccagcagcagcacactgtacgtgttcggcacaggcacccagctcacagttcttctcgagatccagaaccctgatcctgccgtgtaccagctgcgggatagcaagagcagcgacaagagcgtgtgtctgttcaccgacttcgacagccagaccaacgtgtcccagagcaaggactccgacgtgtacatcaccgataagtgcgtgctggacatgcggagcatggacttcaagagcaactccgccgtggcctggtccaacaagtccgatttcgcctgcgccaacgccttcaacaacagcattatccccgaggacacattcttcccaagccccgagagcagctgcgacgtgaagctggtggaaaagagcttcgagacagacaccaacctgaacttccagaacctgagcgtgatcggcttcagaatcctgctgctgaaagtggccggctttaacctgctgatgaccctgcggctgtggtccagccgcgccaagagaagcggatctggcgtgaagcagaccctgaatttcgacctgctgaagctggctggcgacgtggaatccaacccaggccctactagtatggactggatttggcgcatccttttccttgtcggcgctgctaccggcgcgcattccttcgaagaagtgcagctccagcagtctggacctggcctggttaagcctagccagacactgagcctgacctgtgccatcagcggcgattccatgctgagcaacagcgacacctggaactggatcagacagagccccagcagaggcctggaatggctgggcagaacataccacagaagcacttggtacgacgactacgccagctctgtgcggggcagagtgtccatcaatgtggacaccagcaagaaccagtacagcctgcaactgaacgccgtgacacctgaggataccggcgtgtactactgtgccagagtgcggctccaggacggcaattcttggagcgacgcctttgatgtgtggggccagggcacaatggtcaccgtttctagcacgcgtgaggacctgaagaacgtgttcccacctgaggtggccgtgttcgagcctagcgaggccgagatcagccacacccagaaagccaccctcgtgtgcctggctaccggcttctaccccgaccatgtggaactgtcttggtgggtcaacggcaaagaggtgcacagcggcgtgtgtaccgacccccagccactgaaagaacagcccgccctgaacgacagccggtactgcctgagcagcagactgagagtgtccgccaccttctggcagaacccccggaaccacttcagatgccaggtgcagttctacggcctgagcgagaacgacgagtggacccaggacagagccaagcccgtgacccagatcgtgtctgccgaagcctggggcagagccgattgcggctttaccagcgagagctaccagcagggcgtgctgagcgccaccatcctgtacgagatcctgctgggcaaggccaccctgtacgccgtgctggtgtctgccctggtgctgatggctatggtcaagcggaaggacagccgggga

SEQ ID NO: 2153 - DNA, 2310 bp, Artificial Sequence
  Synthetic Polynucloetide
atggccttaccagtgaccgccttgctcctgccgctggccttgctgctccacgccgccaggccggaagtgcagctggttgaatctggcggaggactggttcagcctggcggatctctgagactgtcttgtgccgccagcggcttcagcttcagcgacttttggatgagctgggtccgacaggcccctggcaaaggacttgaatgggtcgccacaatcagccaggccggcagcgagaaggactacgtggactctgtgaagggcagattcaccatcagccgggacaacgccaagaagtccctgtacctccagatgaacagcctgagagccgaggacaccgccgtgtactattgtgcctctggcgtgtacagcttcgactacagaggccagggcaccctggtcacagtctcttctggtaccggcggaggcggatctggcggcggaggtagcggtggcggaggatctgaattcgacgtgatgctgacccagacaccactgagcctgcctgtgtctctgggcgatcaggccagcatctcctgtagaagcagccagagcatcctgcacagcaccggcgatacctacctggaatggtatctccagaagcctggacagagccccaagctgctgattaacaaggtgtccaaccggctgagcggcgtgcccgatagattttctggcagcggctctggcaccgacttcaccctgaagatcagcagagtggaagccgaggacctgggcgtgtactactgcttccaaggcagccatgttccttggacctttggcggaggcaccaagctggaaatcaagagagctgacgccgctcctaccgtgtccatctttcctctcgagatccagaaccctgatcctgccgtgtaccagctgcgggatagcaagagcagcgacaagagcgtgtgtctgttcaccgacttcgacagccagaccaacgtgtcccagagcaaggactccgacgtgtacatcaccgataagtgcgtgctggacatgcggagcatggacttcaagagcaactccgccgtggcctggtccaacaagtccgatttcgcctgcgccaacgccttcaacaacagcattatccccgaggacacattcttcccaagccccgagagcagctgcgacgtgaagctggtggaaaagagcttcgagacagacaccaacctgaacttccagaacctgagcgtgatcggcttcagaatcctgctgctgaaagtggccggctttaacctgctgatgaccctgcggctgtggtccagccgcgccaagagaagcggatctggcgtgaagcagaccctgaatttcgacctgctgaagctggctggcgacgtggaatccaacccaggccctactagtatggactggatttggcgcatccttttccttgtcggcgctgctaccggcgcgcattccttcgaacaagtgaagctccagcagagcggccctagccttgtgaaacctggcgcttccgtgaagatgagctgcaaggccagcggctacaccttcaccgatttctacatgaaatgggtcaagcagagccacggcaagtctctggaatggatcggcgacatcaaccccaacatcggagacaccttctacaaccagaagttcaagggcaaagccacactgaccgtggacaagagcagcagcaccgcctacatgcagctcaacagcctgaccagcgaggacagcgccgtgtacttttgttccgtgggctacttcgacgtgtggggagccggaacaaccgtgacagtctcttctacgcgtgaggacctgaagaacgtgttcccacctgaggtggccgtgttcgagcctagcgaggccgagatcagccacacccagaaagccaccctcgtgtgcctggctaccggcttctaccccgaccatgtggaactgtcttggtgggtcaacggcaaagaggtgcacagcggcgtgtgtaccgacccccagccactgaaagaacagcccgccctgaacgacagccggtactgcctgagcagcagactgagagtgtccgccaccttctggcagaacccccggaaccacttcagatgccaggtgcagttctacggcctgagcgagaacgacgagtggacccaggacagagccaagcccgtgacccagatcgtgtctgccgaagcctggggcagagccgattgcggctttaccagcgagagctaccagcagggcgtgctgagcgccaccatcctgtacgagatcctgctgggcaaggccaccctgtacgccgtgctggtgtctgccctggtgctgatggctatggtcaagcggaaggacagccgggga

SEQ ID NO: 2154 - DNA, 2298 bp, Artificial Sequence
  Synthetic Polynucloetide
atggccttaccagtgaccgccttgctcctgccgctggccttgctgctccacgccgccaggccggaagtgcagctggttgaatctggcggaggactggttcagcctggcggatctctgagactgtcttgtgccgccagcggcttcagcttcagcgacttttggatgagctgggtccgacaggcccctggcaaaggacttgaatgggtcgccacaatcagccaggccggcagcgagaaggactacgtggactctgtgaagggcagattcaccatcagccgggacaacgccaagaagtccctgtacctccagatgaacagcctgagagccgaggacaccgccgtgtactattgtgcctctggcgtgtacagcttcgactacagaggccagggcaccctggtcacagtctcttctggtaccggcggaggcggatctggcggcggaggtagcggtggcggaggatctgaattcgagatcgtgctgacacagtctcccgccacactgtcactgtctccaggcgaaagagccacactgagctgtagagccagccagagcgtgtccatctacctggcctggtatcagcagaagcctggacaggctccccggctgctgatctacgatgccagcaatagagccacaggcatccccgccagattttctggctctggcagcggcaccgatttcaccctgaccataagcagcctggaacctgaggacttcgccgtgtactactgccagcagagaagcaactggcctcctttcacattcggccctggcaccaaggtggacatcaaactcgagatccagaaccctgatcctgccgtgtaccagctgcgggatagcaagagcagcgacaagagcgtgtgtctgttcaccgacttcgacagccagaccaacgtgtcccagagcaaggactccgacgtgtacatcaccgataagtgcgtgctggacatgcggagcatggacttcaagagcaactccgccgtggcctggtccaacaagtccgatttcgcctgcgccaacgccttcaacaacagcattatccccgaggacacattcttcccaagccccgagagcagctgcgacgtgaagctggtggaaaagagcttcgagacagacaccaacctgaacttccagaacctgagcgtgatcggcttcagaatcctgctgctgaaagtggccggctttaacctgctgatgaccctgcggctgtggtccagccgcgccaagagaagcggatctggcgtgaagcagaccctgaatttcgacctgctgaagctggctggcgacgtggaatccaacccaggccctactagtatggactggatttggcgcatccttttccttgtcggcgctgctaccggcgcgcattccttcgaacaggtgcagcttgttgaaagcggaggcggagttgtgcagcctggcagaagtctgagactgtcttgtgccgccagcggcttcaccttcagcagctatggaatgcactgggtccgacaggcccctggcaaaggacttgaatgggttgccgtgatctgggacgacggcagcaacaagtattacgtggacagcgtgaagggcagattcaccatcagccgggacaacagcaagaacaccctgtacctccagatgaacagcctgagagccgaggacacagccgtgtattattgcgccagagatgactactacggcagcggctccttcaacagctactatggcacagacgtgtggggccagggcacaacagttaccgttagctctacgcgtgaggacctgaagaacgtgttcccacctgaggtggccgtgttcgagcctagcgaggccgagatcagccacacccagaaagccaccctcgtgtgcctggctaccggcttctaccccgaccatgtggaactgtcttggtgggtcaacggcaaagaggtgcacagcggcgtgtgtaccgacccccagccactgaaagaacagcccgccctgaacgacagccggtactgcctgagcagcagactgagagtgtccgccaccttctggcagaacccccggaaccacttcagatgccaggtgcagttctacggcctgagcgagaacgacgagtggacccaggacagagccaagcccgtgacccagatcgtgtctgccgaagcctggggcagagccgattgcggctttaccagcgagagctaccagcagggcgtgctgagcgccaccatcctgtacgagatcctgctgggcaaggccaccctgtacgccgtgctggtgtctgccctggtgctgatggctatggtcaagcggaaggacagccgggga

SEQ ID NO: 2155 - DNA, 2253 bp, Artificial Sequence
  Synthetic Polynucloetide
atggccttaccagtgaccgccttgctcctgccgctggccttgctgctccacgccgccaggccggaagtgcagctggttgaatctggcggaggactggttcagcctggcggatctctgagactgtcttgtgccgccagcggcttcagcttcagcgacttttggatgagctgggtccgacaggcccctggcaaaggacttgaatgggtcgccacaatcagccaggccggcagcgagaaggactacgtggactctgtgaagggcagattcaccatcagccgggacaacgccaagaagtccctgtacctccagatgaacagcctgagagccgaggacaccgccgtgtactattgtgcctctggcgtgtacagcttcgactacagaggccagggcaccctggtcacagtctcttctggtaccggcggaggcggatctggcggcggaggtagcggtggcggaggatctgaattcgacatccagatgacacagagccctagcagcctgtctgccagcgtgggagacagagtgaccatcacctgtagagccagccagggcatctcttcttggctggcctggtatcagcagaagcccgagaaggcccctaagagcctgatctatgccgccagctctctccagagcggagtgcctagcagattttctggcagcggctccggcaccgatttcaccctgacaatatccagcctccagcctgaggacttcgccacctactactgccagcagtacaacagctacccctacaccttcggccagggcaccaagctggaaatcaaactcgagatccagaaccctgatcctgccgtgtaccagctgcgggatagcaagagcagcgacaagagcgtgtgtctgttcaccgacttcgacagccagaccaacgtgtcccagagcaaggactccgacgtgtacatcaccgataagtgcgtgctggacatgcggagcatggacttcaagagcaactccgccgtggcctggtccaacaagtccgatttcgcctgcgccaacgccttcaacaacagcattatccccgaggacacattcttcccaagccccgagagcagctgcgacgtgaagctggtggaaaagagcttcgagacagacaccaacctgaacttccagaacctgagcgtgatcggcttcagaatcctgctgctgaaagtggccggctttaacctgctgatgaccctgcggctgtggtccagccgcgccaagagaagcggatctggcgtgaagcagaccctgaatttcgacctgctgaagctggctggcgacgtggaatccaacccaggccctactagtatggactggatttggcgcatccttttccttgtcggcgctgctaccggcgcgcattccttcgaagaagtgcaactggttcaatctggcggcggactggttcatccaggcggttctctgagactgagctgtgccggctctggcttcaccttcagcacctacctgatgtactgggtccgacaggcccctggcaagacactggaatgggtgtccgctattggcagcggaggcgatacctactacgccgactctgtgaagggcagattcaccatcagccgggacaacgccaagaacagcctgtacctccagatgaactccctgagagccgaggacatggccgtgtactactgtgccagaggactcggctattggggccagggaacactggtcacagtgtcctctacgcgtgaggacctgaagaacgtgttcccacctgaggtggccgtgttcgagcctagcgaggccgagatcagccacacccagaaagccaccctcgtgtgcctggctaccggcttctaccccgaccatgtggaactgtcttggtgggtcaacggcaaagaggtgcacagcggcgtgtgtaccgacccccagccactgaaagaacagcccgccctgaacgacagccggtactgcctgagcagcagactgagagtgtccgccaccttctggcagaacccccggaaccacttcagatgccaggtgcagttctacggcctgagcgagaacgacgagtggacccaggacagagccaagcccgtgacccagatcgtgtctgccgaagcctggggcagagccgattgcggctttaccagcgagagctaccagcagggcgtgctgagcgccaccatcctgtacgagatcctgctgggcaaggccaccctgtacgccgtgctggtgtctgccctggtgctgatggctatggtcaagcggaaggacagccgggga

SEQ ID NO: 2156 - DNA, 2310 bp, Artificial Sequence
  Synthetic Polynucloetide
atggccttaccagtgaccgccttgctcctgccgctggccttgctgctccacgccgccaggccggaagtgcagctggttgaatctggcggaggactggttcagcctggcggatctctgagactgtcttgtgccgccagcggcttcagcttcagcgacttttggatgagctgggtccgacaggcccctggcaaaggacttgaatgggtcgccacaatcagccaggccggcagcgagaaggactacgtggactctgtgaagggcagattcaccatcagccgggacaacgccaagaagtccctgtacctccagatgaacagcctgagagccgaggacaccgccgtgtactattgtgcctctggcgtgtacagcttcgactacagaggccagggcaccctggtcacagtctcttctggtaccggcggaggcggatctggcggcggaggtagcggtggcggaggatctgaattcctgcctgttctgacacagcctccatccgtgtctgtggcccctggaaagaccgccagaatcacatgcggcggcaacaacatcggcagcaagagcgtgcactggtatcagcagaagcctggacaggctcctgtgctggtggtgtacgacgacagcgatagacctagcggcatccccgagagattcagcggcagcaattccggcaataccgccacactgaccatcagcagagtggaagctggcgacgaggccgactactactgccaagtgtgggacagcagcagcgactacgtggtgtttggcggcggaacaaagctgacagtgcttctcgagatccagaaccctgatcctgccgtgtaccagctgcgggatagcaagagcagcgacaagagcgtgtgtctgttcaccgacttcgacagccagaccaacgtgtcccagagcaaggactccgacgtgtacatcaccgataagtgcgtgctggacatgcggagcatggacttcaagagcaactccgccgtggcctggtccaacaagtccgatttcgcctgcgccaacgccttcaacaacagcattatccccgaggacacattcttcccaagccccgagagcagctgcgacgtgaagctggtggaaaagagcttcgagacagacaccaacctgaacttccagaacctgagcgtgatcggcttcagaatcctgctgctgaaagtggccggctttaacctgctgatgaccctgcggctgtggtccagccgcgccaagagaagcggatctggcgtgaagcagaccctgaatttcgacctgctgaagctggctggcgacgtggaatccaacccaggccctactagtatggactggatttggcgcatccttttccttgtcggcgctgctaccggcgcgcattccttcgaagaagttcaactggtgcagagcggagccgaagtgaagaagccaggcgagagcctgaagattagctgcaaaggcagcggctacagcttcaccagctactggatcggctgggtccgacagatgcctggcaaaggactggaatggatgggcatcatctaccccggcgacagcgacaccagatacagccctagctttcagggccaagtgaccatctccgccgacaagagcatcagcacagcctacctccagtggtcctctctgaaggccagcgataccgccatgtactactgcgccagacaagtctggggatggcaaggcggcatgtaccccaggtctaactggtggtacaacctggactcttggggccagggcacactggtcacagtctcttctacgcgtgaggacctgaagaacgtgttcccacctgaggtggccgtgttcgagcctagcgaggccgagatcagccacacccagaaagccaccctcgtgtgcctggctaccggcttctaccccgaccatgtggaactgtcttggtgggtcaacggcaaagaggtgcacagcggcgtgtgtaccgacccccagccactgaaagaacagcccgccctgaacgacagccggtactgcctgagcagcagactgagagtgtccgccaccttctggcagaacccccggaaccacttcagatgccaggtgcagttctacggcctgagcgagaacgacgagtggacccaggacagagccaagcccgtgacccagatcgtgtctgccgaagcctggggcagagccgattgcggctttaccagcgagagctaccagcagggcgtgctgagcgccaccatcctgtacgagatcctgctgggcaaggccaccctgtacgccgtgctggtgtctgccctggtgctgatggctatggtcaagcggaaggacagccgggga

SEQ ID NO: 2157 - DNA, 2289 bp, Artificial Sequence
  Synthetic Polynucloetide
atggccttaccagtgaccgccttgctcctgccgctggccttgctgctccacgccgccaggccggaagtgcagctggttgaatctggcggaggactggttcagcctggcggatctctgagactgtcttgtgccgccagcggcttcagcttcagcgacttttggatgagctgggtccgacaggcccctggcaaaggacttgaatgggtcgccacaatcagccaggccggcagcgagaaggactacgtggactctgtgaagggcagattcaccatcagccgggacaacgccaagaagtccctgtacctccagatgaacagcctgagagccgaggacaccgccgtgtactattgtgcctctggcgtgtacagcttcgactacagaggccagggcaccctggtcacagtctcttctggtaccggcggaggcggatctggcggcggaggtagcggtggcggaggatctgaattcgagctggtcatgacacagagccctgcttctctggccgtgtcactgggacagagagccaccatctcttgcagagccagcgagagcgtggacagctacggcaagagcttcatgcactggtatcagctcaagcccggccagcctcctaagctgctgatctacagagcctccaacctggaaagcggcgtgccagccagattttctggcagcggcagcagaaccgacttcaccctgaccattgatcccgtggaagccgatgatgccgccacctactactgccagcagaacaacgaggacccctggacatttggcggaggcaccaagctggaaatcaaactcgagatccagaaccctgatcctgccgtgtaccagctgcgggatagcaagagcagcgacaagagcgtgtgtctgttcaccgacttcgacagccagaccaacgtgtcccagagcaaggactccgacgtgtacatcaccgataagtgcgtgctggacatgcggagcatggacttcaagagcaactccgccgtggcctggtccaacaagtccgatttcgcctgcgccaacgccttcaacaacagcattatccccgaggacacattcttcccaagccccgagagcagctgcgacgtgaagctggtggaaaagagcttcgagacagacaccaacctgaacttccagaacctgagcgtgatcggcttcagaatcctgctgctgaaagtggccggctttaacctgctgatgaccctgcggctgtggtccagccgcgccaagagaagcggatctggcgtgaagcagaccctgaatttcgacctgctgaagctggctggcgacgtggaatccaacccaggccctactagtatggactggatttggcgcatccttttccttgtcggcgctgctaccggcgcgcattccttcgaagaagtgcagctcgaacagtctggccccgagcttgtgaaacctggcgcttccgtgaagatgagctgcaaggccagcggctacaccttcaccaactactacatgaaatgggtcaagcagagccacggcaagtccctggaatggatcggcgatctgaaccccaacaacggcgacaccttctacaaccagaagttcaagggcaaagccacactgaccgtggacaagagcagcaacaccgcctacatgcagctcaactccctgaccagcgaggacagcgccgtgtactactgtgccagaaccggcagatacgaagagaacgctatggactactggggccagggcacaagcgtgacagtctcttctacgcgtgaggacctgaagaacgtgttcccacctgaggtggccgtgttcgagcctagcgaggccgagatcagccacacccagaaagccaccctcgtgtgcctggctaccggcttctaccccgaccatgtggaactgtcttggtgggtcaacggcaaagaggtgcacagcggcgtgtgtaccgacccccagccactgaaagaacagcccgccctgaacgacagccggtactgcctgagcagcagactgagagtgtccgccaccttctggcagaacccccggaaccacttcagatgccaggtgcagttctacggcctgagcgagaacgacgagtggacccaggacagagccaagcccgtgacccagatcgtgtctgccgaagcctggggcagagccgattgcggctttaccagcgagagctaccagcagggcgtgctgagcgccaccatcctgtacgagatcctgctgggcaaggccaccctgtacgccgtgctggtgtctgccctggtgctgatggctatggtcaagcggaaggacagccgggga

SEQ ID NO: 2158 - DNA, 2271 bp, Artificial Sequence
  Synthetic Polynucloetide
atggccttaccagtgaccgccttgctcctgccgctggccttgctgctccacgccgccaggccggaagtgcagctggttgaatctggcggaggactggttcagcctggcggatctctgagactgtcttgtgccgccagcggcttcagcttcagcgacttttggatgagctgggtccgacaggcccctggcaaaggacttgaatgggtcgccacaatcagccaggccggcagcgagaaggactacgtggactctgtgaagggcagattcaccatcagccgggacaacgccaagaagtccctgtacctccagatgaacagcctgagagccgaggacaccgccgtgtactattgtgcctctggcgtgtacagcttcgactacagaggccagggcaccctggtcacagtctcttctggtaccggcggaggcggatctggcggcggaggtagcggtggcggaggatctgaattcgacgtggtcatgacacagagcccttctagcctgtctgccagcgtgggcgacagagtgaccatcacctgtatggcctccgaggacatctacatccggctggcctggtatcagcagaagcctggaaacgcccctaagctgctgatctacgccgccacctctctggaaacaggcgtgccaagcagattttccggcagcggctctggcaccgatttcaccctgacaatatccagcctccagcctgaggacttcgccacctactactgccagcagtattggagcagcccctggacatttggcggaggcaccaaggtggaaatcaaactcgagatccagaaccctgatcctgccgtgtaccagctgcgggatagcaagagcagcgacaagagcgtgtgtctgttcaccgacttcgacagccagaccaacgtgtcccagagcaaggactccgacgtgtacatcaccgataagtgcgtgctggacatgcggagcatggacttcaagagcaactccgccgtggcctggtccaacaagtccgatttcgcctgcgccaacgccttcaacaacagcattatccccgaggacacattcttcccaagccccgagagcagctgcgacgtgaagctggtggaaaagagcttcgagacagacaccaacctgaacttccagaacctgagcgtgatcggcttcagaatcctgctgctgaaagtggccggctttaacctgctgatgaccctgcggctgtggtccagccgcgccaagagaagcggatctggcgtgaagcagaccctgaatttcgacctgctgaagctggctggcgacgtggaatccaacccaggccctactagtatggactggatttggcgcatccttttccttgtcggcgctgctaccggcgcgcattccttcgaacaggttcagctgcaagagtctggccccggactggtcaagcctagccaaacactgagcctgacctgtaccgtgtccggctacagcatcaccagcgactacacctggaactggatcagacagcctcctggcaacggactggaatggatcggctacatcacctacagcggcagcaccagctacaaccccagcctgaaaagccgggtgctgatctccgtggacaccagcaagaatcaggtgtccctgaagctgagcagcgtgacagccgctgataccgccgtgtactactgtgccagactggggagaagatacacaatggactactggggccagggcaccaccgtgacagtttcttctacgcgtgaggacctgaagaacgtgttcccacctgaggtggccgtgttcgagcctagcgaggccgagatcagccacacccagaaagccaccctcgtgtgcctggctaccggcttctaccccgaccatgtggaactgtcttggtgggtcaacggcaaagaggtgcacagcggcgtgtgtaccgacccccagccactgaaagaacagcccgccctgaacgacagccggtactgcctgagcagcagactgagagtgtccgccaccttctggcagaacccccggaaccacttcagatgccaggtgcagttctacggcctgagcgagaacgacgagtggacccaggacagagccaagcccgtgacccagatcgtgtctgccgaagcctggggcagagccgattgcggctttaccagcgagagctaccagcagggcgtgctgagcgccaccatcctgtacgagatcctgctgggcaaggccaccctgtacgccgtgctggtgtctgccctggtgctgatggctatggtcaagcggaaggacagccgggga

SEQ ID NO: 2159 - DNA, 2283 bp, Artificial Sequence
  Synthetic Polynucloetide
atggccttaccagtgaccgccttgctcctgccgctggccttgctgctccacgccgccaggccggaagtgcagctggttgaatctggcggaggactggttcagcctggcggatctctgagactgtcttgtgccgccagcggcttcagcttcagcgacttttggatgagctgggtccgacaggcccctggcaaaggacttgaatgggtcgccacaatcagccaggccggcagcgagaaggactacgtggactctgtgaagggcagattcaccatcagccgggacaacgccaagaagtccctgtacctccagatgaacagcctgagagccgaggacaccgccgtgtactattgtgcctctggcgtgtacagcttcgactacagaggccagggcaccctggtcacagtctcttctggtaccggcggaggcggatctggcggcggaggtagcggtggcggaggatctgaattcgatattgtgctgactcagagccctgccactctgagccttagtccaggcgacagagctaccatctcctgtagggcctctgaatccgtgaccattctgggctctcatctcatatattggtatcaacaaaagccgggccagcctccacggctgctcattcaactggcctctaacgtgcagaccggcgtgccagctagattttctggctctggctcccggaccgactttacactgacaatcagctccgtggaacccgaagattttgccgtctattattgcctccagtccaggaccattcctcggacattcggccagggaacaaaactcgaaatcaagcggctcgagatccagaaccctgatcctgccgtgtaccagctgcgggatagcaagagcagcgacaagagcgtgtgtctgttcaccgacttcgacagccagaccaacgtgtcccagagcaaggactccgacgtgtacatcaccgataagtgcgtgctggacatgcggagcatggacttcaagagcaactccgccgtggcctggtccaacaagtccgatttcgcctgcgccaacgccttcaacaacagcattatccccgaggacacattcttcccaagccccgagagcagctgcgacgtgaagctggtggaaaagagcttcgagacagacaccaacctgaacttccagaacctgagcgtgatcggcttcagaatcctgctgctgaaagtggccggctttaacctgctgatgaccctgcggctgtggtccagccgcgccaagagaagcggatctggcgtgaagcagaccctgaatttcgacctgctgaagctggctggcgacgtggaatccaacccaggccctactagtatggactggatttggcgcatccttttccttgtcggcgctgctaccggcgcgcattccttcgaacaggtgcagctcgttcagagtggccccgaagtgaaaaagccaggcgagtccgtgaagatttcctgcaaagcctccggctacacattccggcactactctatgaattgggtcaagcaggccccaggccagggccttaagtggatgggacgcatcaataccgagtccggcgtgccaatctacgccgatgacttcaaaggccggttcagcttcaccgtggatacctctgcctccaccgcctacctggaaatcagcagcctgaccagcgaggatacagctgtgtacttctgtagcaacgattacctctacagcctggatttctggggacagggaaccacactgaccgtgtctagcacgcgtgaggacctgaagaacgtgttcccacctgaggtggccgtgttcgagcctagcgaggccgagatcagccacacccagaaagccaccctcgtgtgcctggctaccggcttctaccccgaccatgtggaactgtcttggtgggtcaacggcaaagaggtgcacagcggcgtgtgtaccgacccccagccactgaaagaacagcccgccctgaacgacagccggtactgcctgagcagcagactgagagtgtccgccaccttctggcagaacccccggaaccacttcagatgccaggtgcagttctacggcctgagcgagaacgacgagtggacccaggacagagccaagcccgtgacccagatcgtgtctgccgaagcctggggcagagccgattgcggctttaccagcgagagctaccagcagggcgtgctgagcgccaccatcctgtacgagatcctgctgggcaaggccaccctgtacgccgtgctggtgtctgccctggtgctgatggctatggtcaagcggaaggacagccgggga

SEQ ID NO: 2160 - DNA, 2283 bp, Artificial Sequence
  Synthetic Polynucloetide
atggccttaccagtgaccgccttgctcctgccgctggccttgctgctccacgccgccaggccggaagtgcagctggttgaatctggcggaggactggttcagcctggcggatctctgagactgtcttgtgccgccagcggcttcagcttcagcgacttttggatgagctgggtccgacaggcccctggcaaaggacttgaatgggtcgccacaatcagccaggccggcagcgagaaggactacgtggactctgtgaagggcagattcaccatcagccgggacaacgccaagaagtccctgtacctccagatgaacagcctgagagccgaggacaccgccgtgtactattgtgcctctggcgtgtacagcttcgactacagaggccagggcaccctggtcacagtctcttctggtaccggcggaggcggatctggcggcggaggtagcggtggcggaggatctgaattcgacatcgtgctgacacagtctcccgccacactgtcactgagccctggcgatagagccacactgagctgtagagccagcgagagcgtgacaatcctgggcagccacctgatctactggtatcagcagaagcccggacaggcccctagactgctgattcagctcgccagcaatgtgcagacaggcatccctgccagattttccggcagcggcagcagaaccgatttcaccctgaccataagcagcctggaacctgaggacttcgccgtgtactactgcctccagagccggacaatccccagaacctttggacagggcaccaagctggaaatcaagagactcgagatccagaaccctgatcctgccgtgtaccagctgcgggatagcaagagcagcgacaagagcgtgtgtctgttcaccgacttcgacagccagaccaacgtgtcccagagcaaggactccgacgtgtacatcaccgataagtgcgtgctggacatgcggagcatggacttcaagagcaactccgccgtggcctggtccaacaagtccgatttcgcctgcgccaacgccttcaacaacagcattatccccgaggacacattcttcccaagccccgagagcagctgcgacgtgaagctggtggaaaagagcttcgagacagacaccaacctgaacttccagaacctgagcgtgatcggcttcagaatcctgctgctgaaagtggccggctttaacctgctgatgaccctgcggctgtggtccagccgcgccaagagaagcggatctggcgtgaagcagaccctgaatttcgacctgctgaagctggctggcgacgtggaatccaacccaggccctactagtatggactggatttggcgcatccttttccttgtcggcgctgctaccggcgcgcattccttcgaacaggttcagctggtgcagtctggcagcgagctgaagaaacctggcgagagcgtgaagatcagctgcaaggccagcggctacaccttcacacactacagcatgaactgggtccgacaggcccctggacaaggactggaatggatgggcagaatcaacaccgagacaggcgagcccctgtacgccgacgatttcaagggcagattcgtgttcagcctggacaccagcgccagcacagcctatctccagatcagctctctgaaggccgaggacaccgccgtgtactactgctccaacgactacctgtactccctggactattggggccagggcacactggtcacagtgtctagtacgcgtgaggacctgaagaacgtgttcccacctgaggtggccgtgttcgagcctagcgaggccgagatcagccacacccagaaagccaccctcgtgtgcctggctaccggcttctaccccgaccatgtggaactgtcttggtgggtcaacggcaaagaggtgcacagcggcgtgtgtaccgacccccagccactgaaagaacagcccgccctgaacgacagccggtactgcctgagcagcagactgagagtgtccgccaccttctggcagaacccccggaaccacttcagatgccaggtgcagttctacggcctgagcgagaacgacgagtggacccaggacagagccaagcccgtgacccagatcgtgtctgccgaagcctggggcagagccgattgcggctttaccagcgagagctaccagcagggcgtgctgagcgccaccatcctgtacgagatcctgctgggcaaggccaccctgtacgccgtgctggtgtctgccctggtgctgatggctatggtcaagcggaaggacagccgggga

SEQ ID NO: 2161 - DNA, 2286 bp, Artificial Sequence
  Synthetic Polynucloetide
atggccttaccagtgaccgccttgctcctgccgctggccttgctgctccacgccgccaggccggaagtgcagctggttgaatctggcggaggactggttcagcctggcggatctctgagactgtcttgtgccgccagcggcttcagcttcagcgacttttggatgagctgggtccgacaggcccctggcaaaggacttgaatgggtcgccacaatcagccaggccggcagcgagaaggactacgtggactctgtgaagggcagattcaccatcagccgggacaacgccaagaagtccctgtacctccagatgaacagcctgagagccgaggacaccgccgtgtactattgtgcctctggcgtgtacagcttcgactacagaggccagggcaccctggtcacagtctcttctggtaccggcggaggcggatctggcggcggaggtagcggtggcggaggatctgaattcgacatccagctgactcagagccctagctttctgagcgccagcgtgggcgacagagtgaccattacatgtagagccagccagggcatcagcaccgacctgaactggtatcagcagaagcctggcaaggcccctaagctgctgatctacgccgccagcaatctggaaagcggcgtgccaagcagattttccggctctggcagcggcaccgagttcaccctgacaatatctagcctccagcctgaggacttcgccacctactactgccagcagagctacaactggccctacacctttggcggaggcaccaaggtggaaatcaagagactcgagatccagaaccctgatcctgccgtgtaccagctgcgggatagcaagagcagcgacaagagcgtgtgtctgttcaccgacttcgacagccagaccaacgtgtcccagagcaaggactccgacgtgtacatcaccgataagtgcgtgctggacatgcggagcatggacttcaagagcaactccgccgtggcctggtccaacaagtccgatttcgcctgcgccaacgccttcaacaacagcattatccccgaggacacattcttcccaagccccgagagcagctgcgacgtgaagctggtggaaaagagcttcgagacagacaccaacctgaacttccagaacctgagcgtgatcggcttcagaatcctgctgctgaaagtggccggctttaacctgctgatgaccctgcggctgtggtccagccgcgccaagagaagcggatctggcgtgaagcagaccctgaatttcgacctgctgaagctggctggcgacgtggaatccaacccaggccctactagtatggactggatttggcgcatccttttccttgtcggcgctgctaccggcgcgcattccttcgaagaagttcagctggttgaatcaggcggaggactcgtgaaacctggcggctctctgagactgtcttgtgccgccagcggcttcaccttcagcaacttcgagatgaactgggtccgacaggccccaggcaaaggactggaatgggtgtccggcatcagctccaatggccggtacatcaactacgccgacagcgtgaagggcagattcaccatcagccgggacaacgccaagaacagcctgtacctccagatgaactccctgagagccgaggacaccgccgtgtactattgtgccagagtggtggacttcgaccaggactacaacggcttcgactattggggccagggcaccctggttaccgttagctctacgcgtgaggacctgaagaacgtgttcccacctgaggtggccgtgttcgagcctagcgaggccgagatcagccacacccagaaagccaccctcgtgtgcctggctaccggcttctaccccgaccatgtggaactgtcttggtgggtcaacggcaaagaggtgcacagcggcgtgtgtaccgacccccagccactgaaagaacagcccgccctgaacgacagccggtactgcctgagcagcagactgagagtgtccgccaccttctggcagaacccccggaaccacttcagatgccaggtgcagttctacggcctgagcgagaacgacgagtggacccaggacagagccaagcccgtgacccagatcgtgtctgccgaagcctggggcagagccgattgcggctttaccagcgagagctaccagcagggcgtgctgagcgccaccatcctgtacgagatcctgctgggcaaggccaccctgtacgccgtgctggtgtctgccctggtgctgatggctatggtcaagcggaaggacagccgggga

SEQ ID NO: 2162 - DNA, 2280 bp, Artificial Sequence
  Synthetic Polynucloetide
atggccttaccagtgaccgccttgctcctgccgctggccttgctgctccacgccgccaggccggaagtgcagctggttgaatctggcggaggactggttcagcctggcggatctctgagactgtcttgtgccgccagcggcttcagcttcagcgacttttggatgagctgggtccgacaggcccctggcaaaggacttgaatgggtcgccacaatcagccaggccggcagcgagaaggactacgtggactctgtgaagggcagattcaccatcagccgggacaacgccaagaagtccctgtacctccagatgaacagcctgagagccgaggacaccgccgtgtactattgtgcctctggcgtgtacagcttcgactacagaggccagggcaccctggtcacagtctcttctggtaccggcggaggcggatctggcggcggaggtagcggtggcggaggatctgaattcgacatccaactgactcagagccccagctttctgagcgcctctgtgggcgacagagtgaccatcacatgtagtctcagcctgggcatcagcacatggcgggattggtttccgccgaggcttggcaggggccttgagccgctgacctacgccgccagcacactgcaaagcggagtgcctagcagattttccggcagcggctctggcaccgagttcaccctgacaatatccagcctccagcctgaggacttcgccacctactactgccagcagctcaacagctaccctctgacctttggcggaggcaccaaggtggaaatcaagagactcgagatccagaaccctgatcctgccgtgtaccagctgcgggatagcaagagcagcgacaagagcgtgtgtctgttcaccgacttcgacagccagaccaacgtgtcccagagcaaggactccgacgtgtacatcaccgataagtgcgtgctggacatgcggagcatggacttcaagagcaactccgccgtggcctggtccaacaagtccgatttcgcctgcgccaacgccttcaacaacagcattatccccgaggacacattcttcccaagccccgagagcagctgcgacgtgaagctggtggaaaagagcttcgagacagacaccaacctgaacttccagaacctgagcgtgatcggcttcagaatcctgctgctgaaagtggccggctttaacctgctgatgaccctgcggctgtggtccagccgcgccaagagaagcggatctggcgtgaagcagaccctgaatttcgacctgctgaagctggctggcgacgtggaatccaacccaggccctactagtatggactggatttggcgcatccttttccttgtcggcgctgctaccggcgcgcattccttcgaagaagttcaactggttgagtctggtggcggcctggttaagcctggcggatctctgagactgagctgtgccgccagcggcttcacctttagcacatacggcatgagctgggtccgacaggcccctggaaaaggacttgagtgggtcgcctacatcaacaacggctccggctacatctactacgccgacagcgtgaagggcagattcaccatcagccgggacaacgccaagaacagcctgtacctccagatgaactccctgagagccgaggacaccgccgtgtactattgtgccagaggacagtggtggagcggcggagactttgattattggggccagggcaccctggtcaccgtttcttctacgcgtgaggacctgaagaacgtgttcccacctgaggtggccgtgttcgagcctagcgaggccgagatcagccacacccagaaagccaccctcgtgtgcctggctaccggcttctaccccgaccatgtggaactgtcttggtgggtcaacggcaaagaggtgcacagcggcgtgtgtaccgacccccagccactgaaagaacagcccgccctgaacgacagccggtactgcctgagcagcagactgagagtgtccgccaccttctggcagaacccccggaaccacttcagatgccaggtgcagttctacggcctgagcgagaacgacgagtggacccaggacagagccaagcccgtgacccagatcgtgtctgccgaagcctggggcagagccgattgcggctttaccagcgagagctaccagcagggcgtgctgagcgccaccatcctgtacgagatcctgctgggcaaggccaccctgtacgccgtgctggtgtctgccctggtgctgatggctatggtcaagcggaaggacagccgggga

SEQ ID NO: 2163 - DNA, 2283 bp, Artificial Sequence
  Synthetic Polynucloetide
atggccttaccagtgaccgccttgctcctgccgctggccttgctgctccacgccgccaggccggaagtgcagctggttgaatctggcggaggactggttcagcctggcggatctctgagactgtcttgtgccgccagcggcttcagcttcagcgacttttggatgagctgggtccgacaggcccctggcaaaggacttgaatgggtcgccacaatcagccaggccggcagcgagaaggactacgtggactctgtgaagggcagattcaccatcagccgggacaacgccaagaagtccctgtacctccagatgaacagcctgagagccgaggacaccgccgtgtactattgtgcctctggcgtgtacagcttcgactacagaggccagggcaccctggtcacagtctcttctggtaccggcggaggcggatctggcggcggaggtagcggtggcggaggatctgaattcgagatcgtgctgacacagtctcccgccacactgtcactgtctccaggcgaaagagccacactgagctgtagcgccagcagcagcgtgtcctacatgtactggtatcagcagaagcccggacaggcccctagactgctgatctacagaaccagcaacctggcctctggcatccccgccagattttctggctctggcagcggcaccgatttcaccctgaccataagcagcctggaacctgaggacttcgccgtgtactactgccagcagtaccacagctaccccaccacctttggacagggcaccaaggtggaaatcaagcggacagttctcgagatccagaaccctgatcctgccgtgtaccagctgcgggatagcaagagcagcgacaagagcgtgtgtctgttcaccgacttcgacagccagaccaacgtgtcccagagcaaggactccgacgtgtacatcaccgataagtgcgtgctggacatgcggagcatggacttcaagagcaactccgccgtggcctggtccaacaagtccgatttcgcctgcgccaacgccttcaacaacagcattatccccgaggacacattcttcccaagccccgagagcagctgcgacgtgaagctggtggaaaagagcttcgagacagacaccaacctgaacttccagaacctgagcgtgatcggcttcagaatcctgctgctgaaagtggccggctttaacctgctgatgaccctgcggctgtggtccagccgcgccaagagaagcggatctggcgtgaagcagaccctgaatttcgacctgctgaagctggctggcgacgtggaatccaacccaggccctactagtatggactggatttggcgcatccttttccttgtcggcgctgctaccggcgcgcattccttcgaagaagtgcagctggttgaatcaggtggcggcctggttcaacctggcggatctctgagactgtcttgtgccgccagcggcttcagcttcaacacctacgccatgaactgggtccgacaggctcctggcaaaggactggaatgggtgtcccacatcagaagcaagagcaacaacttcgccacctactacgccgacagcgtgaaggacagattcaccatcagccgggacaacgccaagaacagcctgtacctccagatgaactccctgagagccgaggacaccgccgtgtattattgcgccagacaaggcggcgacttccctatggattattggggccagggcaccctggtcaccgtttcttctacgcgtgaggacctgaagaacgtgttcccacctgaggtggccgtgttcgagcctagcgaggccgagatcagccacacccagaaagccaccctcgtgtgcctggctaccggcttctaccccgaccatgtggaactgtcttggtgggtcaacggcaaagaggtgcacagcggcgtgtgtaccgacccccagccactgaaagaacagcccgccctgaacgacagccggtactgcctgagcagcagactgagagtgtccgccaccttctggcagaacccccggaaccacttcagatgccaggtgcagttctacggcctgagcgagaacgacgagtggacccaggacagagccaagcccgtgacccagatcgtgtctgccgaagcctggggcagagccgattgcggctttaccagcgagagctaccagcagggcgtgctgagcgccaccatcctgtacgagatcctgctgggcaaggccaccctgtacgccgtgctggtgtctgccctggtgctgatggctatggtcaagcggaaggacagccgggga

SEQ ID NO: 2164 - DNA, 2271 bp, Artificial Sequence
  Synthetic Polynucloetide
atggccttaccagtgaccgccttgctcctgccgctggccttgctgctccacgccgccaggccggaagtgcagctggttgaatctggcggaggactggttcagcctggcggatctctgagactgtcttgtgccgccagcggcttcagcttcagcgacttttggatgagctgggtccgacaggcccctggcaaaggacttgaatgggtcgccacaatcagccaggccggcagcgagaaggactacgtggactctgtgaagggcagattcaccatcagccgggacaacgccaagaagtccctgtacctccagatgaacagcctgagagccgaggacaccgccgtgtactattgtgcctctggcgtgtacagcttcgactacagaggccagggcaccctggtcacagtctcttctggtaccggcggaggcggatctggcggcggaggtagcggtggcggaggatctgaattcgacgtggtcatgacacagagcccttctagcctgtctgccagcgtgggcgacagagtgaccatcacctgtaaagccagcgaggacatctacatccggctggcctggtatcagcagaagcctggaaaggcccctaagctgctgatctacgccgccacctctctggaaacaggcgtgccaagcagattttccggcagcggctctggcaccgatttcaccctgacaatatccagcctccagcctgaggacttcgccacctactactgccagcagtattggaccacaccttggacctttggcggaggcaccaaggtggaaatcaaactcgagatccagaaccctgatcctgccgtgtaccagctgcgggatagcaagagcagcgacaagagcgtgtgtctgttcaccgacttcgacagccagaccaacgtgtcccagagcaaggactccgacgtgtacatcaccgataagtgcgtgctggacatgcggagcatggacttcaagagcaactccgccgtggcctggtccaacaagtccgatttcgcctgcgccaacgccttcaacaacagcattatccccgaggacacattcttcccaagccccgagagcagctgcgacgtgaagctggtggaaaagagcttcgagacagacaccaacctgaacttccagaacctgagcgtgatcggcttcagaatcctgctgctgaaagtggccggctttaacctgctgatgaccctgcggctgtggtccagccgcgccaagagaagcggatctggcgtgaagcagaccctgaatttcgacctgctgaagctggctggcgacgtggaatccaacccaggccctactagtatggactggatttggcgcatccttttccttgtcggcgctgctaccggcgcgcattccttcgaacaggtgcagctccaagagtctggccctggactggtcaagcctagccagacactgagcctgacctgtaccgtgtccggctacagcatcaccatcgactacacctggaactggatcagacagcctcctggcaaaggactggaatggatcggctacatcacctacagcggcagcaccgactacaaccccagcctgaaaagccgggtgctgatctccgtggacaccagcaagaatcaggtgtccctgaagctgagcagcgtgacagccgctgataccgccgtgtactactgtgccagactgggcagaagatacgccctggattattggggccagggcaccaccgtgacagtgtcatctacgcgtgaggacctgaagaacgtgttcccacctgaggtggccgtgttcgagcctagcgaggccgagatcagccacacccagaaagccaccctcgtgtgcctggctaccggcttctaccccgaccatgtggaactgtcttggtgggtcaacggcaaagaggtgcacagcggcgtgtgtaccgacccccagccactgaaagaacagcccgccctgaacgacagccggtactgcctgagcagcagactgagagtgtccgccaccttctggcagaacccccggaaccacttcagatgccaggtgcagttctacggcctgagcgagaacgacgagtggacccaggacagagccaagcccgtgacccagatcgtgtctgccgaagcctggggcagagccgattgcggctttaccagcgagagctaccagcagggcgtgctgagcgccaccatcctgtacgagatcctgctgggcaaggccaccctgtacgccgtgctggtgtctgccctggtgctgatggctatggtcaagcggaaggacagccgggga

SEQ ID NO: 2165 - DNA, 2283 bp, Artificial Sequence
  Synthetic Polynucloetide
atggccttaccagtgaccgccttgctcctgccgctggccttgctgctccacgccgccaggccggaagtgcagctggttgaatctggcggaggactggttcagcctggcggatctctgagactgtcttgtgccgccagcggcttcagcttcagcgacttttggatgagctgggtccgacaggcccctggcaaaggacttgaatgggtcgccacaatcagccaggccggcagcgagaaggactacgtggactctgtgaagggcagattcaccatcagccgggacaacgccaagaagtccctgtacctccagatgaacagcctgagagccgaggacaccgccgtgtactattgtgcctctggcgtgtacagcttcgactacagaggccagggcaccctggtcacagtctcttctggtaccggcggaggcggatctggcggcggaggtagcggtggcggaggatctgaattcgacatccagatgacccagaccacaagcagcctgtctgccagcctgggcgacagagtgaccatctcttgtagagccagccaggacatcagcaactacctgaactggtatcagcagaaacccgacggcaccgtgaagctgctgatctactacaccagcatcctgcacagcggcgtgcccagcagattttctggctctggcagcggcaccgactacagcctgaccatcagcaatctggaacaagaggacttcgctacctacttctgccagcaaggcaacaccctgccttggacatttggcggaggcaccaagctggaaatcaaagctctcgagatccagaaccctgatcctgccgtgtaccagctgcgggatagcaagagcagcgacaagagcgtgtgtctgttcaccgacttcgacagccagaccaacgtgtcccagagcaaggactccgacgtgtacatcaccgataagtgcgtgctggacatgcggagcatggacttcaagagcaactccgccgtggcctggtccaacaagtccgatttcgcctgcgccaacgccttcaacaacagcattatccccgaggacacattcttcccaagccccgagagcagctgcgacgtgaagctggtggaaaagagcttcgagacagacaccaacctgaacttccagaacctgagcgtgatcggcttcagaatcctgctgctgaaagtggccggctttaacctgctgatgaccctgcggctgtggtccagccgcgccaagagaagcggatctggcgtgaagcagaccctgaatttcgacctgctgaagctggctggcgacgtggaatccaacccaggccctactagtatggactggatttggcgcatccttttccttgtcggcgctgctaccggcgcgcattccttcgaagtgcaactggttgaatctggcggcggactggttaagcctggcggatctctgaagctgagctgtgccgcctctggcttcgccttcagcatctacgatatgagctgggtccgacagacccctgagaagagactggaatgggtcgcctacatctctagcggcggagggacctactatcccgacacagtgaagggcagattcaccatctccagagacaacgccaagaacaccctgtacctccagatgagcagcctgaagtccgaggacaccgccatgtactactgcgccagacacagcggctatggcacacattggggagtgctgtttgcctactggggccagggaacactggtcacagtttctgctacgcgtgaggacctgaagaacgtgttcccacctgaggtggccgtgttcgagcctagcgaggccgagatcagccacacccagaaagccaccctcgtgtgcctggctaccggcttctaccccgaccatgtggaactgtcttggtgggtcaacggcaaagaggtgcacagcggcgtgtgtaccgacccccagccactgaaagaacagcccgccctgaacgacagccggtactgcctgagcagcagactgagagtgtccgccaccttctggcagaacccccggaaccacttcagatgccaggtgcagttctacggcctgagcgagaacgacgagtggacccaggacagagccaagcccgtgacccagatcgtgtctgccgaagcctggggcagagccgattgcggctttaccagcgagagctaccagcagggcgtgctgagcgccaccatcctgtacgagatcctgctgggcaaggccaccctgtacgccgtgctggtgtctgccctggtgctgatggctatggtcaagcggaaggacagccgggga

SEQ ID NO: 2166 - DNA, 2316 bp, Artificial Sequence
  Synthetic Polynucloetide
atggccttaccagtgaccgccttgctcctgccgctggccttgctgctccacgccgccaggccggaagtgcagctggttgaatctggcggaggactggttcagcctggcggatctctgagactgtcttgtgccgccagcggcttcagcttcagcgacttttggatgagctgggtccgacaggcccctggcaaaggacttgaatgggtcgccacaatcagccaggccggcagcgagaaggactacgtggactctgtgaagggcagattcaccatcagccgggacaacgccaagaagtccctgtacctccagatgaacagcctgagagccgaggacaccgccgtgtactattgtgcctctggcgtgtacagcttcgactacagaggccagggcaccctggtcacagtctcttctggtaccggcggaggcggatctggcggcggaggtagcggtggcggaggatctgaattcgacatcgtgatgacacagagccctgatagcctggccgtgtctctgggagagagagccaccatcaactgcaagagcagccagagcctgctgtacagaagcaaccagaagaactacctggcctggtatcagcagaagcccggccagcctcctaagctgctgatctactgggccagcaccagagaaagcggcgtgcccgatagattttctggctctggcagcggcaccgacttcaccctgacaatttctagcctgcaagccgaggacgtggccgtgtactactgccagcagtattacaactaccccagaaccttcggccagggcaccaaggtggaaatcaagagaacagttctcgagatccagaaccctgatcctgccgtgtaccagctgcgggatagcaagagcagcgacaagagcgtgtgtctgttcaccgacttcgacagccagaccaacgtgtcccagagcaaggactccgacgtgtacatcaccgataagtgcgtgctggacatgcggagcatggacttcaagagcaactccgccgtggcctggtccaacaagtccgatttcgcctgcgccaacgccttcaacaacagcattatccccgaggacacattcttcccaagccccgagagcagctgcgacgtgaagctggtggaaaagagcttcgagacagacaccaacctgaacttccagaacctgagcgtgatcggcttcagaatcctgctgctgaaagtggccggctttaacctgctgatgaccctgcggctgtggtccagccgcgccaagagaagcggatctggcgtgaagcagaccctgaatttcgacctgctgaagctggctggcgacgtggaatccaacccaggccctactagtatggactggatttggcgcatccttttccttgtcggcgctgctaccggcgcgcattccttcgaagaagttcagctgcttgaatcaggcggcggactggttcaacctggcggatctctgagactgagctgtgccgccagcggctacagcatcacaagcgactatgcctggaactgggtccgacaggcccctggcaaaggactggaatgggtgtcctacatcagcaacagcggcagcaccagctacaaccccagcctgaagtcccggttcaccatcagcagagacaacagcaagaacaccctgtacctccagatgaacagcctgagagctgaggacaccgccgtgtattattgcgccaaagagcggaactacgactacgacgattactactacgctatggactactggggccagggaaccctggtcacagtctcttctacgcgtgaggacctgaagaacgtgttcccacctgaggtggccgtgttcgagcctagcgaggccgagatcagccacacccagaaagccaccctcgtgtgcctggctaccggcttctaccccgaccatgtggaactgtcttggtgggtcaacggcaaagaggtgcacagcggcgtgtgtaccgacccccagccactgaaagaacagcccgccctgaacgacagccggtactgcctgagcagcagactgagagtgtccgccaccttctggcagaacccccggaaccacttcagatgccaggtgcagttctacggcctgagcgagaacgacgagtggacccaggacagagccaagcccgtgacccagatcgtgtctgccgaagcctggggcagagccgattgcggctttaccagcgagagctaccagcagggcgtgctgagcgccaccatcctgtacgagatcctgctgggcaaggccaccctgtacgccgtgctggtgtctgccctggtgctgatggctatggtcaagcggaaggacagccgggga

SEQ ID NO: 2167 - DNA, 2295 bp, Artificial Sequence
  Synthetic Polynucloetide
atggccttaccagtgaccgccttgctcctgccgctggccttgctgctccacgccgccaggccggaagtgcagctggttgaatctggcggaggactggttcagcctggcggatctctgagactgtcttgtgccgccagcggcttcagcttcagcgacttttggatgagctgggtccgacaggcccctggcaaaggacttgaatgggtcgccacaatcagccaggccggcagcgagaaggactacgtggactctgtgaagggcagattcaccatcagccgggacaacgccaagaagtccctgtacctccagatgaacagcctgagagccgaggacaccgccgtgtactattgtgcctctggcgtgtacagcttcgactacagaggccagggcaccctggtcacagtctcttctggtaccggcggaggcggatctggcggcggaggtagcggtggcggaggatctgaattcgacgtggtcatgacacagagccctctgagcctgcctgtgacacttggacagcctgccagcatcagctgtagaagcagccagagcctgctgcacagcagcggcaatacctacctggaatggtatcagcagaggcccggacagagccccagacctctgatctacaagatcagcacccggttcagcggcgtgcccgatagattttctggctctggcagcggcaccgacttcaccctgaagattagcagagtggaagccgaggacgtgggcgtgtactactgcttccaaggcagccacgtgccatacacctttggcggcggaacaaaggtggaaatcaagagactcgagatccagaaccctgatcctgccgtgtaccagctgcgggatagcaagagcagcgacaagagcgtgtgtctgttcaccgacttcgacagccagaccaacgtgtcccagagcaaggactccgacgtgtacatcaccgataagtgcgtgctggacatgcggagcatggacttcaagagcaactccgccgtggcctggtccaacaagtccgatttcgcctgcgccaacgccttcaacaacagcattatccccgaggacacattcttcccaagccccgagagcagctgcgacgtgaagctggtggaaaagagcttcgagacagacaccaacctgaacttccagaacctgagcgtgatcggcttcagaatcctgctgctgaaagtggccggctttaacctgctgatgaccctgcggctgtggtccagccgcgccaagagaagcggatctggcgtgaagcagaccctgaatttcgacctgctgaagctggctggcgacgtggaatccaacccaggccctactagtatggactggatttggcgcatccttttccttgtcggcgctgctaccggcgcgcattccttcgaacaagttcagctggttcagagcggagccgaagtgaagaaacctggggcctctgtgaaggtgtcctgcaaagcctctggcctgaccatcgaggactactacatgcactgggtccgacaggcccctggacaaggacttgaatggatgggctggatcgaccccgagaacggcgatacagagtacggccctaagttccagggcagagtgaccatgaccagagacaccagcatcaacaccgcctacatggaactgagccggctgagatccgatgacaccgccgtgtactattgcgccgtgcacaatgcccactacggcacttggtttgcctattggggccagggcacactggtcaccgttagctctacgcgtgaggacctgaagaacgtgttcccacctgaggtggccgtgttcgagcctagcgaggccgagatcagccacacccagaaagccaccctcgtgtgcctggctaccggcttctaccccgaccatgtggaactgtcttggtgggtcaacggcaaagaggtgcacagcggcgtgtgtaccgacccccagccactgaaagaacagcccgccctgaacgacagccggtactgcctgagcagcagactgagagtgtccgccaccttctggcagaacccccggaaccacttcagatgccaggtgcagttctacggcctgagcgagaacgacgagtggacccaggacagagccaagcccgtgacccagatcgtgtctgccgaagcctggggcagagccgattgcggctttaccagcgagagctaccagcagggcgtgctgagcgccaccatcctgtacgagatcctgctgggcaaggccaccctgtacgccgtgctggtgtctgccctggtgctgatggctatggtcaagcggaaggacagccgggga

SEQ ID NO: 2168 - DNA, 2271 bp, Artificial Sequence
  Synthetic Polynucloetide
atggccttaccagtgaccgccttgctcctgccgctggccttgctgctccacgccgccaggccggaagtgcagctggttgaatctggcggaggactggttcagcctggcggatctctgagactgtcttgtgccgccagcggcttcagcttcagcgacttttggatgagctgggtccgacaggcccctggcaaaggacttgaatgggtcgccacaatcagccaggccggcagcgagaaggactacgtggactctgtgaagggcagattcaccatcagccgggacaacgccaagaagtccctgtacctccagatgaacagcctgagagccgaggacaccgccgtgtactattgtgcctctggcgtgtacagcttcgactacagaggccagggcaccctggtcacagtctcttctggtaccggcggaggcggatctggcggcggaggtagcggtggcggaggatctgaattcgacatccagatgacacagagccctagcagcctgtctgccagcgtgggagacagagtgaccatcacctgtagagccagcgagaacatctacagcaacctggcctggtatcagcagaagcctggcaaggcccctaagctgctgatctacgccgccaccaatctggctgatggcgtgccaagcagattttccggctctggcagcggcaccgatttcaccctgacaatatccagcctccagcctgaggacttcgccacctactactgccagcacttttggggcacccctacattcggccagggcaccaaggtggaaatcaagagaacagttctcgagatccagaaccctgatcctgccgtgtaccagctgcgggatagcaagagcagcgacaagagcgtgtgtctgttcaccgacttcgacagccagaccaacgtgtcccagagcaaggactccgacgtgtacatcaccgataagtgcgtgctggacatgcggagcatggacttcaagagcaactccgccgtggcctggtccaacaagtccgatttcgcctgcgccaacgccttcaacaacagcattatccccgaggacacattcttcccaagccccgagagcagctgcgacgtgaagctggtggaaaagagcttcgagacagacaccaacctgaacttccagaacctgagcgtgatcggcttcagaatcctgctgctgaaagtggccggctttaacctgctgatgaccctgcggctgtggtccagccgcgccaagagaagcggatctggcgtgaagcagaccctgaatttcgacctgctgaagctggctggcgacgtggaatccaacccaggccctactagtatggactggatttggcgcatccttttccttgtcggcgctgctaccggcgcgcattccttcgaagaagtgcagctggttgaatcaggtggcggcctggttcaacctggcggatctctgagactgagctgtgccgcctctggcttcagcctgacaaattacggcgtgcactgggtccgacaggcccctggaaaaggactggaatgggtgtccgtgatttggagcggcggcagcaccgattacaacgccgccttcatcagccggttcaccatcagcgccgacaccagcaagaataccgcctacctccagatgaactccctgagagccgaggacaccgccgtgtactattgcgccagagaactgatccacgctatggacaactggggccagggaaccctggtcacagtctcttctacgcgtgaggacctgaagaacgtgttcccacctgaggtggccgtgttcgagcctagcgaggccgagatcagccacacccagaaagccaccctcgtgtgcctggctaccggcttctaccccgaccatgtggaactgtcttggtgggtcaacggcaaagaggtgcacagcggcgtgtgtaccgacccccagccactgaaagaacagcccgccctgaacgacagccggtactgcctgagcagcagactgagagtgtccgccaccttctggcagaacccccggaaccacttcagatgccaggtgcagttctacggcctgagcgagaacgacgagtggacccaggacagagccaagcccgtgacccagatcgtgtctgccgaagcctggggcagagccgattgcggctttaccagcgagagctaccagcagggcgtgctgagcgccaccatcctgtacgagatcctgctgggcaaggccaccctgtacgccgtgctggtgtctgccctggtgctgatggctatggtcaagcggaaggacagccgggga

SEQ ID NO: 2169 - DNA, 2292 bp, Artificial Sequence
  Synthetic Polynucloetide
atggccttaccagtgaccgccttgctcctgccgctggccttgctgctccacgccgccaggccggaagtgcagctggttgaatctggcggaggactggttcagcctggcggatctctgagactgtcttgtgccgccagcggcttcagcttcagcgacttttggatgagctgggtccgacaggcccctggcaaaggacttgaatgggtcgccacaatcagccaggccggcagcgagaaggactacgtggactctgtgaagggcagattcaccatcagccgggacaacgccaagaagtccctgtacctccagatgaacagcctgagagccgaggacaccgccgtgtactattgtgcctctggcgtgtacagcttcgactacagaggccagggcaccctggtcacagtctcttctggtaccggcggaggcggatctggcggcggaggtagcggtggcggaggatctgaattcgacttcgtgatgacacagagccctctgagcctgcctgtgacacctggcgaacctgccagcatcagctgtagaagcagccagagcatcgtgcacagcaacggcaacacctacctggaatggtatctccagaagcctggacagagcccacagctgctgatctacaaggtgtccaacagattcagcggcgtgcccgacagattttctggcagcggctctggcaccgacttcaccctgaagattagcagagtggaagccgaggacgtgggcgtgtactactgcttccaaggctctcacgtgcccctgacctttggacagggcaccaagctggaaatcaagagactcgagatccagaaccctgatcctgccgtgtaccagctgcgggatagcaagagcagcgacaagagcgtgtgtctgttcaccgacttcgacagccagaccaacgtgtcccagagcaaggactccgacgtgtacatcaccgataagtgcgtgctggacatgcggagcatggacttcaagagcaactccgccgtggcctggtccaacaagtccgatttcgcctgcgccaacgccttcaacaacagcattatccccgaggacacattcttcccaagccccgagagcagctgcgacgtgaagctggtggaaaagagcttcgagacagacaccaacctgaacttccagaacctgagcgtgatcggcttcagaatcctgctgctgaaagtggccggctttaacctgctgatgaccctgcggctgtggtccagccgcgccaagagaagcggatctggcgtgaagcagaccctgaatttcgacctgctgaagctggctggcgacgtggaatccaacccaggccctactagtatggactggatttggcgcatccttttccttgtcggcgctgctaccggcgcgcattccttcgaagaagtgcagctggttgaaagcggagccgaagtgaagaaacctggggcctctgtgaaggtgtcctgcaaggccagcggctacacctttaccagctactggattcactgggtccgacaggcccctggacaaggacttgagtggatgggcgagaacgacccctccaacggcaggaccaactacaacgagaagttcaagaaccgcgtgaccctgaccgtggacaccagcatctctaccgcctacatggaactgagccggctgagatccgatgacaccgccgtgtactattgcgccagaggacccaactacttttacagcatggactactggggccagggcacaatggtcaccgttagctctacgcgtgaggacctgaagaacgtgttcccacctgaggtggccgtgttcgagcctagcgaggccgagatcagccacacccagaaagccaccctcgtgtgcctggctaccggcttctaccccgaccatgtggaactgtcttggtgggtcaacggcaaagaggtgcacagcggcgtgtgtaccgacccccagccactgaaagaacagcccgccctgaacgacagccggtactgcctgagcagcagactgagagtgtccgccaccttctggcagaacccccggaaccacttcagatgccaggtgcagttctacggcctgagcgagaacgacgagtggacccaggacagagccaagcccgtgacccagatcgtgtctgccgaagcctggggcagagccgattgcggctttaccagcgagagctaccagcagggcgtgctgagcgccaccatcctgtacgagatcctgctgggcaaggccaccctgtacgccgtgctggtgtctgccctggtgctgatggctatggtcaagcggaaggacagccgggga

SEQ ID NO: 2170 - DNA, 2271 bp, Artificial Sequence
  Synthetic Polynucloetide
atggccttaccagtgaccgccttgctcctgccgctggccttgctgctccacgccgccaggccggaagtgcagctggttgaatctggcggaggactggttcagcctggcggatctctgagactgtcttgtgccgccagcggcttcagcttcagcgacttttggatgagctgggtccgacaggcccctggcaaaggacttgaatgggtcgccacaatcagccaggccggcagcgagaaggactacgtggactctgtgaagggcagattcaccatcagccgggacaacgccaagaagtccctgtacctccagatgaacagcctgagagccgaggacaccgccgtgtactattgtgcctctggcgtgtacagcttcgactacagaggccagggcaccctggtcacagtctcttctggtaccggcggaggcggatctggcggcggaggtagcggtggcggaggatctgaattcgacatccagctgactcagagccctagctttctgagcgccagcgtgggcgacagagtgaccatcacatgtagcgccagatccagcatcagcttcatgtactggtatcagcagaagcccggcaaggcccctaagctgctgatctacgacaccagcaatctggcctctggcgtgcccagcagattttctggaagcggcagcggcaccgagttcaccctgacaatctctagcctggaagccgaggatgccgccacctactattgccagcagtggtccagctatcccctgacatttggacagggcaccaagctggaaatcaaactcgagatccagaaccctgatcctgccgtgtaccagctgcgggatagcaagagcagcgacaagagcgtgtgtctgttcaccgacttcgacagccagaccaacgtgtcccagagcaaggactccgacgtgtacatcaccgataagtgcgtgctggacatgcggagcatggacttcaagagcaactccgccgtggcctggtccaacaagtccgatttcgcctgcgccaacgccttcaacaacagcattatccccgaggacacattcttcccaagccccgagagcagctgcgacgtgaagctggtggaaaagagcttcgagacagacaccaacctgaacttccagaacctgagcgtgatcggcttcagaatcctgctgctgaaagtggccggctttaacctgctgatgaccctgcggctgtggtccagccgcgccaagagaagcggatctggcgtgaagcagaccctgaatttcgacctgctgaagctggctggcgacgtggaatccaacccaggccctactagtatggactggatttggcgcatccttttccttgtcggcgctgctaccggcgcgcattccttcgaacaggttcagctggttcagtctggggccgaagtgaagaaacctggggcctctgtgaaggtgtcctgcaaggcttccggctacacctttaccggctcttggatgaactgggtccgacaggctcctggacagggactcgaatggatcggcagaatctatcctggcgacggcgagacaaactacaacggcaagttcaaggaccgcgtgacaatcaccgccgacaagagcacaagcaccgcctacatggaactgagcagcctgcggagcgaagataccgccgtgtactactgcgcccggatctacggcaacaacgtgtacttcgatgtgtggggccagggcacaaccgtgacagtctcttctacgcgtgaggacctgaagaacgtgttcccacctgaggtggccgtgttcgagcctagcgaggccgagatcagccacacccagaaagccaccctcgtgtgcctggctaccggcttctaccccgaccatgtggaactgtcttggtgggtcaacggcaaagaggtgcacagcggcgtgtgtaccgacccccagccactgaaagaacagcccgccctgaacgacagccggtactgcctgagcagcagactgagagtgtccgccaccttctggcagaacccccggaaccacttcagatgccaggtgcagttctacggcctgagcgagaacgacgagtggacccaggacagagccaagcccgtgacccagatcgtgtctgccgaagcctggggcagagccgattgcggctttaccagcgagagctaccagcagggcgtgctgagcgccaccatcctgtacgagatcctgctgggcaaggccaccctgtacgccgtgctggtgtctgccctggtgctgatggctatggtcaagcggaaggacagccgggga

SEQ ID NO: 2171 - DNA, 2295 bp, Artificial Sequence
  Synthetic Polynucloetide
atggccttaccagtgaccgccttgctcctgccgctggccttgctgctccacgccgccaggccggaagtgcagctggttgaatctggcggaggactggttcagcctggcggatctctgagactgtcttgtgccgccagcggcttcagcttcagcgacttttggatgagctgggtccgacaggcccctggcaaaggacttgaatgggtcgccacaatcagccaggccggcagcgagaaggactacgtggactctgtgaagggcagattcaccatcagccgggacaacgccaagaagtccctgtacctccagatgaacagcctgagagccgaggacaccgccgtgtactattgtgcctctggcgtgtacagcttcgactacagaggccagggcaccctggtcacagtctcttctggtaccggcggaggcggatctggcggcggaggtagcggtggcggaggatctgaattccagctggtgctgacacagtctccaagcgcctctgccagcctgggatctagcgtgaagctgacctgtacactgagcagcggccacaagaccgacaccatcgactggtatcagcagcagcctggcaaggcccctagatacctgatgaagctggaaggcagcggcagctacaacaaaggctctggcgtgcccgatagattcagcggcagttcttctggcgctgattggtatctgaccatcagcagcctccagagcgaggacgaggccgattactactgcggcacagactaccccggcaactacctgtttggcggcggaacacagctgacagtgcttggcctcgagatccagaaccctgatcctgccgtgtaccagctgcgggatagcaagagcagcgacaagagcgtgtgtctgttcaccgacttcgacagccagaccaacgtgtcccagagcaaggactccgacgtgtacatcaccgataagtgcgtgctggacatgcggagcatggacttcaagagcaactccgccgtggcctggtccaacaagtccgatttcgcctgcgccaacgccttcaacaacagcattatccccgaggacacattcttcccaagccccgagagcagctgcgacgtgaagctggtggaaaagagcttcgagacagacaccaacctgaacttccagaacctgagcgtgatcggcttcagaatcctgctgctgaaagtggccggctttaacctgctgatgaccctgcggctgtggtccagccgcgccaagagaagcggatctggcgtgaagcagaccctgaatttcgacctgctgaagctggctggcgacgtggaatccaacccaggccctactagtatggactggatttggcgcatccttttccttgtcggcgctgctaccggcgcgcattccttcgaacaagaacagctggttgaaagcggcggaggactggttcaacctggcggttctctgagactgagctgtgccgccagcggcttcaccttcagcgactactacatgagctggatcagacaggccccaggcaaaggactggaatgggtcgccacaatctaccccagcagcggcaagacctactacgccgattctgccaagggcagactgaccatctccagcgacaacgccaaggacagcctgtacctccagatgaacagcctgagagccgaggacaccgccgtgtactactgcaccagagatagctacgccgacgacgccgctctgtttgacatttggggccagggcaccaccgtgaccgtttcttctacgcgtgaggacctgaagaacgtgttcccacctgaggtggccgtgttcgagcctagcgaggccgagatcagccacacccagaaagccaccctcgtgtgcctggctaccggcttctaccccgaccatgtggaactgtcttggtgggtcaacggcaaagaggtgcacagcggcgtgtgtaccgacccccagccactgaaagaacagcccgccctgaacgacagccggtactgcctgagcagcagactgagagtgtccgccaccttctggcagaacccccggaaccacttcagatgccaggtgcagttctacggcctgagcgagaacgacgagtggacccaggacagagccaagcccgtgacccagatcgtgtctgccgaagcctggggcagagccgattgcggctttaccagcgagagctaccagcagggcgtgctgagcgccaccatcctgtacgagatcctgctgggcaaggccaccctgtacgccgtgctggtgtctgccctggtgctgatggctatggtcaagcggaaggacagccgggga

SEQ ID NO: 2172 - DNA, 2285 bp, Artificial Sequence
  Synthetic Polynucloetide
atggccttaccagtgaccgccttgctcctgccgctggccttgctgctccacgccgccaggccggaagtgcagctggttgaatctggcggaggactggttcagcctggcggatctctgagactgtcttgtgccgccagcggcttcagcttcagcgacttttggatgagctgggtccgacaggcccctggcaaaggacttgaatgggtcgccacaatcagccaggccggcagcgagaaggactacgtggactctgtgaagggcagattcaccatcagccgggacaacgccaagaagtccctgtacctccagatgaacagcctgagagccgaggacaccgccgtgtactattgtgcctctggcgtgtacagcttcgactacagaggccagggcaccctggtcacagtctcttctggtaccggcggaggcggatctggcggcggaggtagcggtggcggaggatctgaattcgagattgtgttgacacagtctcccgataccctgtcactgtcacccggcgagaaggcaacgctgagttgcagagcaagccagtcagtctcctcttcttttctggcctggtatcagcaaaaaccaggtcaggcaccatctctcctgatttacgttgccagcagacgggcggctggcattcccgacaggttctctggaagcggatctgggaccgattttaccctgacaattagccgcttggagcccgaagactttggtatgttttactgccagcactacggaaggacacctttcacatttggcccgggcacgaaagtcgatataaaacgcgcctcgagatccagaaccctgatcctgccgtgtaccagctgcgggatagcaagagcagcgacaagagcgtgtgtctgttcaccgacttcgacagccagaccaacgtgtcccagagcaaggactccgacgtgtacatcaccgataagtgcgtgctggacatgcggagcatggacttcaagagcaactccgccgtggcctggtccaacaagtccgatttcgcctgcgccaacgccttcaacaacagcattatccccgaggacacattcttcccaagccccgagagcagctgcgacgtgaagctggtggaaaagagcttcgagacagacaccaacctgaacttccagaacctgagcgtgatcggcttcagaatcctgctgctgaaagtggccggctttaacctgctgatgaccctgcggctgtggtccagccgcgccaagagaagcggatctggcgtgaagcagaccctgaatttcgacctgctgaagctggctggcgacgtggaatccaacccaggccctactagtatggactggatttggcgcatccttttccttgtcggcgctgctaccggcgcgcattccttcgaacagatccagttggtggaatcagggggcggtgtggtgcagccgggtaggagcctgagactgtcatgcgtggcgtctggcttcacattcaagaactacggcatgcactgggtgcgacaggcccccggaaagggtttggagtgggtcgccgtgatctggtacgacggatctaatgagtattacggagatcctgtgaagggaaggttcaccatctcccgcgacaatagcaaaaatatgctctacctgcaaatgaactcactcagggcggatgatacggcggtctactattgcgctcgctcagggattgctgtggccggcgcattcgattactggggacagggtaccctggtgacagtatcaagcacgcgtgaggacctgaagaacgtgttcccacctgaggtggccgtgttcgagcctagcgaggccgagatcagccacacccagaaagccaccctcgtgtgcctggctaccggcttctaccccgaccatgtggaactgtcttggtgggtcaacggcaaagaggtgcacagcggcgtgtgtaccgacccccagccactgaaagaacagcccgccctgaacgacagccggtactgcctgagcagcagactgagagtgtccgccaccttctggcagaacccccggaaccacttcagatgccaggtgcagttctacggcctgagcgagaacgacgagtggacccaggacagagccaagcccgtgacccagatcgtgtctgccgaagcctggggcagagccgattgcggctttaccagcgagagctaccagcagggcgtgctgagcgccaccatcctgtacgagatcctgctgggcaaggccaccctgtacgccgtgctggtgtctgccctggtgctgatggctatggtcaagcggaaggacagccgggga

SEQ ID NO: 2173 - DNA, 2301 bp, Artificial Sequence
  Synthetic Polynucloetide
atggccttaccagtgaccgccttgctcctgccgctggccttgctgctccacgccgccaggccggaagtgcagctggttgaatctggcggaggactggttcagcctggcggatctctgagactgtcttgtgccgccagcggcttcagcttcagcgacttttggatgagctgggtccgacaggcccctggcaaaggacttgaatgggtcgccacaatcagccaggccggcagcgagaaggactacgtggactctgtgaagggcagattcaccatcagccgggacaacgccaagaagtccctgtacctccagatgaacagcctgagagccgaggacaccgccgtgtactattgtgcctctggcgtgtacagcttcgactacagaggccagggcaccctggtcacagtctcttctggtaccggcggaggcggatctggcggcggaggtagcggtggcggaggatctgaattcgacattcagatgacccaaagcccgtccagcctgtccgccagcctgggagatagagtgacaatcacgtgtagagcttcccaagggataagaaatgatctcgggtggtatcagcagaagcccggcaaagcccccaaaaggcttatatatgctagtagtacactgcagtctggagttccttcccgattttcaggtagcggctccggtacagagttcaccctcacgataagctcactccagcctgaggatttcgcaacgtactactgcctccagcacaacaattttccctggactttcggccagggcaccaaggtggagatcaagaggctcgagatccagaaccctgatcctgccgtgtaccagctgcgggatagcaagagcagcgacaagagcgtgtgtctgttcaccgacttcgacagccagaccaacgtgtcccagagcaaggactccgacgtgtacatcaccgataagtgcgtgctggacatgcggagcatggacttcaagagcaactccgccgtggcctggtccaacaagtccgatttcgcctgcgccaacgccttcaacaacagcattatccccgaggacacattcttcccaagccccgagagcagctgcgacgtgaagctggtggaaaagagcttcgagacagacaccaacctgaacttccagaacctgagcgtgatcggcttcagaatcctgctgctgaaagtggccggctttaacctgctgatgaccctgcggctgtggtccagccgcgccaagagaagcggatctggcgtgaagcagaccctgaatttcgacctgctgaagctggctggcgacgtggaatccaacccaggccctactagtatggactggatttggcgcatccttttccttgtcggcgctgctaccggcgcgcattccttcgaacaagttactttgaaggagtctggacctgtactggtgaagccaaccgagacactgacactcacgtgtacagtgagtggtttttccttgatcaacgcaaggatgggcgtcagctggatcaggcaaccccctggcaaggctctggaatggctcgctcacatattcagcaatgccgaaaaaagctaccggacaagcctgaaatcccgcctgactatttccaaggacacttctaagtctcaggtggtgctgaccatgaccaacatggacccggtggacaccgccacctattactgcgcaagaatccctgggtatggtgggaatggtgactaccattattatgggatggatgtgtgggggcaaggcacaaccgtaacggtctcaagcacgcgtgaggacctgaagaacgtgttcccacctgaggtggccgtgttcgagcctagcgaggccgagatcagccacacccagaaagccaccctcgtgtgcctggctaccggcttctaccccgaccatgtggaactgtcttggtgggtcaacggcaaagaggtgcacagcggcgtgtgtaccgacccccagccactgaaagaacagcccgccctgaacgacagccggtactgcctgagcagcagactgagagtgtccgccaccttctggcagaacccccggaaccacttcagatgccaggtgcagttctacggcctgagcgagaacgacgagtggacccaggacagagccaagcccgtgacccagatcgtgtctgccgaagcctggggcagagccgattgcggctttaccagcgagagctaccagcagggcgtgctgagcgccaccatcctgtacgagatcctgctgggcaaggccaccctgtacgccgtgctggtgtctgccctggtgctgatggctatggtcaagcggaaggacagccgggga

SEQ ID NO: 2174 - DNA, 2280 bp, Artificial Sequence
  Synthetic Polynucloetide
atggccttaccagtgaccgccttgctcctgccgctggccttgctgctccacgccgccaggccggaagtgcagctggttgaatctggcggaggactggttcagcctggcggatctctgagactgtcttgtgccgccagcggcttcagcttcagcgacttttggatgagctgggtccgacaggcccctggcaaaggacttgaatgggtcgccacaatcagccaggccggcagcgagaaggactacgtggactctgtgaagggcagattcaccatcagccgggacaacgccaagaagtccctgtacctccagatgaacagcctgagagccgaggacaccgccgtgtactattgtgcctctggcgtgtacagcttcgactacagaggccagggcaccctggtcacagtctcttctggtaccggcggaggcggatctggcggcggaggtagcggtggcggaggatctgaattcgacatcgtgctgacacagagccctccaagcctggctatgagcctgggaaagagagccaccatcagctgtagagccagcgagagcgtgacaatcctgggctctcacctgatccactggtatcagcagaagcccggccagcctcctacactgctgattcagctggcctccaatgtgcagacaggcgtgccagccagattttctggcagcggcagcagaaccgacttcaccctgaccattgatcccgtggaagaggacgacgtggccgtgtactactgcctccagagcagaacaatccccagaacctttggcggaggcaccaagctggaaatcaaactcgagatccagaaccctgatcctgccgtgtaccagctgcgggatagcaagagcagcgacaagagcgtgtgtctgttcaccgacttcgacagccagaccaacgtgtcccagagcaaggactccgacgtgtacatcaccgataagtgcgtgctggacatgcggagcatggacttcaagagcaactccgccgtggcctggtccaacaagtccgatttcgcctgcgccaacgccttcaacaacagcattatccccgaggacacattcttcccaagccccgagagcagctgcgacgtgaagctggtggaaaagagcttcgagacagacaccaacctgaacttccagaacctgagcgtgatcggcttcagaatcctgctgctgaaagtggccggctttaacctgctgatgaccctgcggctgtggtccagccgcgccaagagaagcggatctggcgtgaagcagaccctgaatttcgacctgctgaagctggctggcgacgtggaatccaacccaggccctactagtatggactggatttggcgcatccttttccttgtcggcgctgctaccggcgcgcattccttcgaacaaatccagctggtgcagtctggccccgagctgaagaaacctggcgagacagtgaagatcagctgcaaggccagcggctacaccttcaccgactacagcatcaactgggtcaagagagcccctggcaagggcctgaaatggatgggctggatcaacaccgaaaccagagagcccgcctacgcctacgacttcagaggcagattcgccttcagcctggaaaccagcgccagcacagcctacctccagatcaacaacctgaagtacgaggacaccgccacctacttttgcgccctggactacagctacgctatggactattggggccagggcaccagcgtgacagtctcttctacgcgtgaggacctgaagaacgtgttcccacctgaggtggccgtgttcgagcctagcgaggccgagatcagccacacccagaaagccaccctcgtgtgcctggctaccggcttctaccccgaccatgtggaactgtcttggtgggtcaacggcaaagaggtgcacagcggcgtgtgtaccgacccccagccactgaaagaacagcccgccctgaacgacagccggtactgcctgagcagcagactgagagtgtccgccaccttctggcagaacccccggaaccacttcagatgccaggtgcagttctacggcctgagcgagaacgacgagtggacccaggacagagccaagcccgtgacccagatcgtgtctgccgaagcctggggcagagccgattgcggctttaccagcgagagctaccagcagggcgtgctgagcgccaccatcctgtacgagatcctgctgggcaaggccaccctgtacgccgtgctggtgtctgccctggtgctgatggctatggtcaagcggaaggacagccgggga

SEQ ID NO: 2175 - DNA, 2286 bp, Artificial Sequence
  Synthetic Polynucloetide
atggccttaccagtgaccgccttgctcctgccgctggccttgctgctccacgccgccaggccggaagtgcagctggttgaatctggcggaggactggttcagcctggcggatctctgagactgtcttgtgccgccagcggcttcagcttcagcgacttttggatgagctgggtccgacaggcccctggcaaaggacttgaatgggtcgccacaatcagccaggccggcagcgagaaggactacgtggactctgtgaagggcagattcaccatcagccgggacaacgccaagaagtccctgtacctccagatgaacagcctgagagccgaggacaccgccgtgtactattgtgcctctggcgtgtacagcttcgactacagaggccagggcaccctggtcacagtctcttctggtaccggcggaggcggatctggcggcggaggtagcggtggcggaggatctgaattcgatattcaactgacacaatcccccagctcactcagcgccagcgtgggggacagggttagctttacctgtcaagcctctcaggatataaataactttctgaactggtatcaacagaagcctgggaaggcgcccaaactcctgatctatgatgcgtccaacctggaaactggcgtgccttcacgctttagcggctctggcagtggtacagacttcacttttaccatctcttcacttcagccggaggacatcgccacatattactgtcaacagtacggaaacttgccctttacttttggaggcggcaccaaagttgaaatcaaaagactcgagatccagaaccctgatcctgccgtgtaccagctgcgggatagcaagagcagcgacaagagcgtgtgtctgttcaccgacttcgacagccagaccaacgtgtcccagagcaaggactccgacgtgtacatcaccgataagtgcgtgctggacatgcggagcatggacttcaagagcaactccgccgtggcctggtccaacaagtccgatttcgcctgcgccaacgccttcaacaacagcattatccccgaggacacattcttcccaagccccgagagcagctgcgacgtgaagctggtggaaaagagcttcgagacagacaccaacctgaacttccagaacctgagcgtgatcggcttcagaatcctgctgctgaaagtggccggctttaacctgctgatgaccctgcggctgtggtccagccgcgccaagagaagcggatctggcgtgaagcagaccctgaatttcgacctgctgaagctggctggcgacgtggaatccaacccaggccctactagtatggactggatttggcgcatccttttccttgtcggcgctgctaccggcgcgcattccttcgaacaggtccaactgcaagaaagcggacccggactggtgaagccttctgagacacttagtctgacgtgcacggtcagtggcggctccatctcctcctattattggtcatggatacgacaacccccaggtaagggcctggaatggattggctatatctactattcaggaagcacgaactacaatcccagcctgaagtcccgagtgacaatttcagtagataccagtaaaaaccagttcagtcttaaactgtcaagcgtgacagctgccgacaccgctgtgtattactgcgtctcactggtgtattgtggaggggattgttatagcgggttcgattattggggacagggaaccctggtgactgtatcttccacgcgtgaggacctgaagaacgtgttcccacctgaggtggccgtgttcgagcctagcgaggccgagatcagccacacccagaaagccaccctcgtgtgcctggctaccggcttctaccccgaccatgtggaactgtcttggtgggtcaacggcaaagaggtgcacagcggcgtgtgtaccgacccccagccactgaaagaacagcccgccctgaacgacagccggtactgcctgagcagcagactgagagtgtccgccaccttctggcagaacccccggaaccacttcagatgccaggtgcagttctacggcctgagcgagaacgacgagtggacccaggacagagccaagcccgtgacccagatcgtgtctgccgaagcctggggcagagccgattgcggctttaccagcgagagctaccagcagggcgtgctgagcgccaccatcctgtacgagatcctgctgggcaaggccaccctgtacgccgtgctggtgtctgccctggtgctgatggctatggtcaagcggaaggacagccgggga

SEQ ID NO: 2176 - DNA, 2292 bp, Artificial Sequence
  Synthetic Polynucloetide
atggccttaccagtgaccgccttgctcctgccgctggccttgctgctccacgccgccaggccggaagtgcagctggttgaatctggcggaggactggttcagcctggcggatctctgagactgtcttgtgccgccagcggcttcagcttcagcgacttttggatgagctgggtccgacaggcccctggcaaaggacttgaatgggtcgccacaatcagccaggccggcagcgagaaggactacgtggactctgtgaagggcagattcaccatcagccgggacaacgccaagaagtccctgtacctccagatgaacagcctgagagccgaggacaccgccgtgtactattgtgcctctggcgtgtacagcttcgactacagaggccagggcaccctggtcacagtctcttctggtaccggcggaggcggatctggcggcggaggtagcggtggcggaggatctgaattcgatatccagctcactcaaagcccctctagtctctctgcctcagtgggggatcgggtcagttttacttgtcaagcttcacaggatatcaacaacttccttaattggtatcagcagaagccaggaaaagcacccaagctgctcatctatgatgcctcaaatttggagacgggtgttcccagtcgattctctgggtcagggtccgggaccgactttacgtttacgatctcctctctgcagcccgaagacatcgccacatactattgtcaacagtacggcaacttgcctttcacatttgggggcgggactaaggttgaaatcaagaggctcgagatccagaaccctgatcctgccgtgtaccagctgcgggatagcaagagcagcgacaagagcgtgtgtctgttcaccgacttcgacagccagaccaacgtgtcccagagcaaggactccgacgtgtacatcaccgataagtgcgtgctggacatgcggagcatggacttcaagagcaactccgccgtggcctggtccaacaagtccgatttcgcctgcgccaacgccttcaacaacagcattatccccgaggacacattcttcccaagccccgagagcagctgcgacgtgaagctggtggaaaagagcttcgagacagacaccaacctgaacttccagaacctgagcgtgatcggcttcagaatcctgctgctgaaagtggccggctttaacctgctgatgaccctgcggctgtggtccagccgcgccaagagaagcggatctggcgtgaagcagaccctgaatttcgacctgctgaagctggctggcgacgtggaatccaacccaggccctactagtatggactggatttggcgcatccttttccttgtcggcgctgctaccggcgcgcattccttcgaacaggtacagctgcaggaatctgggcccggacttgtcaagccaagtcagacactttctcttacatgtaccgtgagcggcggaagtataagcagtggaggcttttactggtcttggatacggcagcacccaggcaaaggcttggagtggattggatacattcatcattcaggatctacacactataatccatcccttaagtcccgggtcaccattagcattgatacgtctaagaatctgttcagtctcaggctgtcctccgtcactgctgccgacacagccgtgtactactgcgcctccttggtttactgcggaggcgactgttatagcggctttgattattgggggcaggggaccctcgtaaccgtgagctctacgcgtgaggacctgaagaacgtgttcccacctgaggtggccgtgttcgagcctagcgaggccgagatcagccacacccagaaagccaccctcgtgtgcctggctaccggcttctaccccgaccatgtggaactgtcttggtgggtcaacggcaaagaggtgcacagcggcgtgtgtaccgacccccagccactgaaagaacagcccgccctgaacgacagccggtactgcctgagcagcagactgagagtgtccgccaccttctggcagaacccccggaaccacttcagatgccaggtgcagttctacggcctgagcgagaacgacgagtggacccaggacagagccaagcccgtgacccagatcgtgtctgccgaagcctggggcagagccgattgcggctttaccagcgagagctaccagcagggcgtgctgagcgccaccatcctgtacgagatcctgctgggcaaggccaccctgtacgccgtgctggtgtctgccctggtgctgatggctatggtcaagcggaaggacagccgggga

SEQ ID NO: 2177 - DNA, 2280 bp, Artificial Sequence
  Synthetic Polynucloetide
atggccttaccagtgaccgccttgctcctgccgctggccttgctgctccacgccgccaggccggaagtgcagctggttgaatctggcggaggactggttcagcctggcggatctctgagactgtcttgtgccgccagcggcttcagcttcagcgacttttggatgagctgggtccgacaggcccctggcaaaggacttgaatgggtcgccacaatcagccaggccggcagcgagaaggactacgtggactctgtgaagggcagattcaccatcagccgggacaacgccaagaagtccctgtacctccagatgaacagcctgagagccgaggacaccgccgtgtactattgtgcctctggcgtgtacagcttcgactacagaggccagggcaccctggtcacagtctcttctggtaccggcggaggcggatctggcggcggaggtagcggtggcggaggatctgaattcgacattcagatgacacagagccctagcagcctgagcgcctctgtgggagacagagtgaccatcacatgcaagagcagccagagcgtgctgtactccagcaatcagaagaactacctggcctggttccagcagaagcctggcaaggctcctaagctgctgatctactgggccagcaccagagaaagcggcgtgccaagcagattttctggcagcggctctggcaccgacttcaccctgacaatatccagcctccagcctgaggacttcgccacctacttttgccaccagtacctgagcagctacacattcggacagggcaccaaggtggaaatcaagcggctcgagatccagaaccctgatcctgccgtgtaccagctgcgggatagcaagagcagcgacaagagcgtgtgtctgttcaccgacttcgacagccagaccaacgtgtcccagagcaaggactccgacgtgtacatcaccgataagtgcgtgctggacatgcggagcatggacttcaagagcaactccgccgtggcctggtccaacaagtccgatttcgcctgcgccaacgccttcaacaacagcattatccccgaggacacattcttcccaagccccgagagcagctgcgacgtgaagctggtggaaaagagcttcgagacagacaccaacctgaacttccagaacctgagcgtgatcggcttcagaatcctgctgctgaaagtggccggctttaacctgctgatgaccctgcggctgtggtccagccgcgccaagagaagcggatctggcgtgaagcagaccctgaatttcgacctgctgaagctggctggcgacgtggaatccaacccaggccctactagtatggactggatttggcgcatccttttccttgtcggcgctgctaccggcgcgcattccttcgaagaggtgcagctggttgaatctggcggaggactggttcagcctggcggatctctgagactgtcttgtgccgccagcggctacaccttcaccacctattggatgcactgggtccgacaggcccctggcaaaggacttgagtgggtcggatatatcaggcccagcaccggctacacagagtacaaccagaagttcaaggaccgcttcaccatcagcgccgacaccagcaagaataccgcctacctccagatgaacagcctgagagccgaggacaccgccgtgtactactgtgccagatccagatggctgctggactattggggccagggcacactggttacagtttctacgcgtgaggacctgaagaacgtgttcccacctgaggtggccgtgttcgagcctagcgaggccgagatcagccacacccagaaagccaccctcgtgtgcctggctaccggcttctaccccgaccatgtggaactgtcttggtgggtcaacggcaaagaggtgcacagcggcgtgtgtaccgacccccagccactgaaagaacagcccgccctgaacgacagccggtactgcctgagcagcagactgagagtgtccgccaccttctggcagaacccccggaaccacttcagatgccaggtgcagttctacggcctgagcgagaacgacgagtggacccaggacagagccaagcccgtgacccagatcgtgtctgccgaagcctggggcagagccgattgcggctttaccagcgagagctaccagcagggcgtgctgagcgccaccatcctgtacgagatcctgctgggcaaggccaccctgtacgccgtgctggtgtctgccctggtgctgatggctatggtcaagcggaaggacagccgggga

SEQ ID NO: 2178 - DNA, 2271 bp, Artificial Sequence
  Synthetic Polynucloetide
atggccttaccagtgaccgccttgctcctgccgctggccttgctgctccacgccgccaggccggaagtgcagctggttgaatctggcggaggactggttcagcctggcggatctctgagactgtcttgtgccgccagcggcttcagcttcagcgacttttggatgagctgggtccgacaggcccctggcaaaggacttgaatgggtcgccacaatcagccaggccggcagcgagaaggactacgtggactctgtgaagggcagattcaccatcagccgggacaacgccaagaagtccctgtacctccagatgaacagcctgagagccgaggacaccgccgtgtactattgtgcctctggcgtgtacagcttcgactacagaggccagggcaccctggtcacagtctcttctggtaccggcggaggcggatctggcggcggaggtagcggtggcggaggatctgaattcgacatccagatgacacagagccctagcagcctgtctgccagcgtgggagacagagtgaccatcacctgtagagccagccaggacatcagcaactacctgaactggtatcagcagaagcccggcaaggcccctaagctgctgatctactacaccagcagactgcacagcggcgtgcccagcagattttctggctctggcagcggcaccgacttcaccctgacaatatctagcctccagcctgaggacttcgccacctactattgccagcagggcaacaccctgccttacacatttggacagggcaccaaggtggaaatcaagagactcgagatccagaaccctgatcctgccgtgtaccagctgcgggatagcaagagcagcgacaagagcgtgtgtctgttcaccgacttcgacagccagaccaacgtgtcccagagcaaggactccgacgtgtacatcaccgataagtgcgtgctggacatgcggagcatggacttcaagagcaactccgccgtggcctggtccaacaagtccgatttcgcctgcgccaacgccttcaacaacagcattatccccgaggacacattcttcccaagccccgagagcagctgcgacgtgaagctggtggaaaagagcttcgagacagacaccaacctgaacttccagaacctgagcgtgatcggcttcagaatcctgctgctgaaagtggccggctttaacctgctgatgaccctgcggctgtggtccagccgcgccaagagaagcggatctggcgtgaagcagaccctgaatttcgacctgctgaagctggctggcgacgtggaatccaacccaggccctactagtatggactggatttggcgcatccttttccttgtcggcgctgctaccggcgcgcattccttcgaagaagtgcagctggttgaatcaggtggcggcctggttcaacctggcggatctctgagactgagctgtgccgccagcggcttcaccttcagcgactactttatgagctgggtccgacaggcccctggcaaaggacttgaatgggtcgccaccatcagcaatggcggcacctacacttactaccccgacagcgtgaagggcagattcaccatctccagagacaacagcaagaacaccctgtacctccagatgaactccctgagagccgaggacaccgccgtgtactactgcgccagattcgacggctacatcttcgactattggggccagggcaccctggtcacagtctcttctacgcgtgaggacctgaagaacgtgttcccacctgaggtggccgtgttcgagcctagcgaggccgagatcagccacacccagaaagccaccctcgtgtgcctggctaccggcttctaccccgaccatgtggaactgtcttggtgggtcaacggcaaagaggtgcacagcggcgtgtgtaccgacccccagccactgaaagaacagcccgccctgaacgacagccggtactgcctgagcagcagactgagagtgtccgccaccttctggcagaacccccggaaccacttcagatgccaggtgcagttctacggcctgagcgagaacgacgagtggacccaggacagagccaagcccgtgacccagatcgtgtctgccgaagcctggggcagagccgattgcggctttaccagcgagagctaccagcagggcgtgctgagcgccaccatcctgtacgagatcctgctgggcaaggccaccctgtacgccgtgctggtgtctgccctggtgctgatggctatggtcaagcggaaggacagccgggga

SEQ ID NO: 2179 - DNA, 2850 bp, Artificial Sequence
  Synthetic Polynucloetide
atggccttaccagtgaccgccttgctcctgccgctggccttgctgctccacgccgccaggccggaagtgcagctggttgaatctggcggaggactggttcagcctggcggatctctgagactgtcttgtgccgccagcggcttcagcttcagcgacttttggatgagctgggtccgacaggcccctggcaaaggacttgaatgggtcgccacaatcagccaggccggcagcgagaaggactacgtggactctgtgaagggcagattcaccatcagccgggacaacgccaagaagtccctgtacctccagatgaacagcctgagagccgaggacaccgccgtgtactattgtgcctctggcgtgtacagcttcgactacagaggccagggcaccctggtcacagtctcttctggtaccggcggaggcggatctggcggcggaggtagcggtggcggaggatctgaattcgacatccagatgacacagactacatcctccctgtctgcctctctgggagacagagtcaccatcagttgcagggcaagtcaggacattagtaagtacctgaactggtatcagcagaaaccagatggaactgttaaactcctgatctaccatacatcaagattacactcaggagtcccatcaaggttcagtggcagtgggtctggaacagattattctctcaccattagcaacctggagcaagaagatattgccacttacttttgccaacagggtaatacgcttccgtacacgttcggaggggggaccaagctggagatcacactcgaggacctgaagaacgtgttcccacctgaggtggccgtgttcgagcctagcgaggccgagatcagccacacccagaaagccaccctcgtgtgcctggctaccggcttctaccccgaccatgtggaactgtcttggtgggtcaacggcaaagaggtgcacagcggcgtgtctaccgacccccagccactgaaagaacagcccgccctgaacgacagccggtactgcctgagcagcagactgagagtgtccgccaccttctggcagaacccccggaaccacttcagatgccaggtgcagttctacggcctgagcgagaacgacgagtggacccaggacagagccaagcccgtgacccagatcgtgtctgccgaagcctggggcagagccgattgcggatcccagagcttcggcctgctggaccccaagctgtgctacctgctggatggcatcctgttcatctacggcgtgatcctgaccgccctgttcctgagagtgaagttcagcagaagcgccgacgcccctgcctaccagcagggacagaaccaactgtacaacgagctgaacctgggcagacgggaagagtacgacgtgctggacaagcggagaggcagggaccctgagatgggcggaaagccccagcggagaaagaacccccaggaaggactgtataacgaactccagaaagacaagatggccgaagcctacagcgagatcggcatgaagggcgagcggagaagaggcaagggccacgatggcctgtaccagggcctgagcaccgccaccaaggacacctatgacgccctgcacatgcaggccctgcctccaagaagggccaagcgatctggatctggagcaacaaacttctcactactcaaacaagcaggtgacgtggaggagaatcccgggcctactagtatggactggatttggcgcatccttttccttgtcggcgctgctaccggcgcgcattccttcgaagtgaaactgcaggagtcaggacctggcctggtggcgccctcacagagcctgtccgtcacatgcactgtctcaggggtctcattacccgactatggtgtaagctggattcgccagcctccacgaaagggtctggagtggctgggagtaatatggggtagtgaaaccacatactataattcagctctcaaatccagactgaccatcatcaaggacaactccaagagccaagttttcttaaaaatgaacagtctgcaaactgatgacacagccatttactactgtgccaaacattattactacggtggtagctatgctatggactactggggccaaggaacctcagtcaccgtctcctcaacgcgtatccagaaccctgatcctgccgtgtaccagctgcgggatagcaagagcagcgacaagagcgtgtgtctgttcaccgacttcgacagccagaccaacgtgtcccagagcaaggactccgacgtgtacatcaccgataagaccgtgctggacatgcggagcatggacttcaagagcaactccgccgtggcctggtccaacaagtccgatttcgcctgcgccaacgccttcaacaacagcattatccccgaggacacattcttcccaagccccgagagcagctgcggtacccagagttttgggttgttggaccctaaattgtgctatctgttggacggaatcctgttcatttacggagtgatcctgaccgcattgttcctgcgggttaagttttccagatccgcagacgcacccgcttaccaacaagggcagaaccaactctacaatgaacttaatttggggcggagggaagagtacgacgttctggacaaaaggaggggacgagatcccgagatgggcggaaagcctcagcgaaggaagaatccgcaagaggggctttataacgaactccagaaagataaaatggcagaagcctatagtgagattgggatgaagggagaaaggaggaggggtaaaggtcacgatgggttgtaccaaggattgagcacagccactaaagatacctatgatgcgctccacatgcaggccctgccgccaaga

SEQ ID NO: 2180 - DNA, 2853 bp, Artificial Sequence
  Synthetic Polynucloetide
atggccttaccagtgaccgccttgctcctgccgctggccttgctgctccacgccgccaggccggaagtgcagctggttgaatctggcggaggactggttcagcctggcggatctctgagactgtcttgtgccgccagcggcttcagcttcagcgacttttggatgagctgggtccgacaggcccctggcaaaggacttgaatgggtcgccacaatcagccaggccggcagcgagaaggactacgtggactctgtgaagggcagattcaccatcagccgggacaacgccaagaagtccctgtacctccagatgaacagcctgagagccgaggacaccgccgtgtactattgtgcctctggcgtgtacagcttcgactacagaggccagggcaccctggtcacagtctcttctggtaccggcggaggcggatctggcggcggaggtagcggtggcggaggatctgaattcgagatcgtgatgacccagagccctgccaccctgtctctgagccctggcgaaagagccaccctgagctgtagagccagccaggacatcagcaagtacctgaactggtatcagcagaagcccggccaggcccccagactgctgatctaccacaccagcagactgcacagcggcatccccgccagattttctggctctggcagcggcaccgactacaccctgacaatcagcagcctccagcccgaggacttcgccgtgtacttctgtcagcaaggcaacaccctgccctacaccttcggccagggcaccaagctggaaatcaagctcgaggacctgaagaacgtgttcccacctgaggtggccgtgttcgagcctagcgaggccgagatcagccacacccagaaagccaccctcgtgtgcctggctaccggcttctaccccgaccatgtggaactgtcttggtgggtcaacggcaaagaggtgcacagcggcgtgtctaccgacccccagccactgaaagaacagcccgccctgaacgacagccggtactgcctgagcagcagactgagagtgtccgccaccttctggcagaacccccggaaccacttcagatgccaggtgcagttctacggcctgagcgagaacgacgagtggacccaggacagagccaagcccgtgacccagatcgtgtctgccgaagcctggggcagagccgattgcggatcccagagcttcggcctgctggaccccaagctgtgctacctgctggatggcatcctgttcatctacggcgtgatcctgaccgccctgttcctgagagtgaagttcagcagaagcgccgacgcccctgcctaccagcagggacagaaccaactgtacaacgagctgaacctgggcagacgggaagagtacgacgtgctggacaagcggagaggcagggaccctgagatgggcggaaagccccagcggagaaagaacccccaggaaggactgtataacgaactccagaaagacaagatggccgaagcctacagcgagatcggcatgaagggcgagcggagaagaggcaagggccacgatggcctgtaccagggcctgagcaccgccaccaaggacacctatgacgccctgcacatgcaggccctgcctccaagaagggccaagcgatctggatctggagcaacaaacttctcactactcaaacaagcaggtgacgtggaggagaatcccgggcctactagtatggactggatttggcgcatccttttccttgtcggcgctgctaccggcgcgcattccttcgaacaggtgcaactccaggaatctggccctggcctcgtgaagcccagcgagacactgagcctgacctgtaccgtgtccggcgtgtccctgcctgactatggcgtgtcctggatcagacagccccctggcaagggcctggaatggatcggagtgatttggggcagcgaaaccacctactacaacagctccctgaagtccagagtgaccatctccaaggacaactccaagaaccaggtgtccctgaagctgagcagcgtgacagccgccgacaccgccgtgtattactgcgccaagcactactactacggcggcagctacgctatggactactggggccagggaaccctcgtgaccgtgtctagtacgcgtatccagaaccctgatcctgccgtgtaccagctgcgggatagcaagagcagcgacaagagcgtgtgtctgttcaccgacttcgacagccagaccaacgtgtcccagagcaaggactccgacgtgtacatcaccgataagaccgtgctggacatgcggagcatggacttcaagagcaactccgccgtggcctggtccaacaagtccgatttcgcctgcgccaacgccttcaacaacagcattatccccgaggacacattcttcccaagccccgagagcagctgcggtacccagagttttgggttgttggaccctaaattgtgctatctgttggacggaatcctgttcatttacggagtgatcctgaccgcattgttcctgcgggttaagttttccagatccgcagacgcacccgcttaccaacaagggcagaaccaactctacaatgaacttaatttggggcggagggaagagtacgacgttctggacaaaaggaggggacgagatcccgagatgggcggaaagcctcagcgaaggaagaatccgcaagaggggctttataacgaactccagaaagataaaatggcagaagcctatagtgagattgggatgaagggagaaaggaggaggggtaaaggtcacgatgggttgtaccaaggattgagcacagccactaaagatacctatgatgcgctccacatgcaggccctgccgccaaga

SEQ ID NO: 2181 - DNA, 2856 bp, Artificial Sequence
  Synthetic Polynucloetide
atggccttaccagtgaccgccttgctcctgccgctggccttgctgctccacgccgccaggccggaagtgcagctggttgaatctggcggaggactggttcagcctggcggatctctgagactgtcttgtgccgccagcggcttcagcttcagcgacttttggatgagctgggtccgacaggcccctggcaaaggacttgaatgggtcgccacaatcagccaggccggcagcgagaaggactacgtggactctgtgaagggcagattcaccatcagccgggacaacgccaagaagtccctgtacctccagatgaacagcctgagagccgaggacaccgccgtgtactattgtgcctctggcgtgtacagcttcgactacagaggccagggcaccctggtcacagtctcttctggtaccggcggaggcggatctggcggcggaggtagcggtggcggaggatctgaattcgacgagatcgtgctgacacagagccccgccaccctgtcactgtctccaggcgaaagagccaccctgagctgtagcgccagcagcagcgtgtcctacatgcactggtatcagcagaagcccggccaggcccccagactgctgatctacgataccagcaagctggcctccggcatccccgccagattttctggcagcggctccggcaccgacttcaccctgacaatcagcagcctggaacccgaggacgtggccgtgtactactgttttcaaggcagcgtgtaccccttcaccttcggccagggcaccaagctggaaatcaagagactcgaggacctgaagaacgtgttcccacctgaggtggccgtgttcgagcctagcgaggccgagatcagccacacccagaaagccaccctcgtgtgcctggctaccggcttctaccccgaccatgtggaactgtcttggtgggtcaacggcaaagaggtgcacagcggcgtgtctaccgacccccagccactgaaagaacagcccgccctgaacgacagccggtactgcctgagcagcagactgagagtgtccgccaccttctggcagaacccccggaaccacttcagatgccaggtgcagttctacggcctgagcgagaacgacgagtggacccaggacagagccaagcccgtgacccagatcgtgtctgccgaagcctggggcagagccgattgcggatcccagagcttcggcctgctggaccccaagctgtgctacctgctggatggcatcctgttcatctacggcgtgatcctgaccgccctgttcctgagagtgaagttcagcagaagcgccgacgcccctgcctaccagcagggacagaaccaactgtacaacgagctgaacctgggcagacgggaagagtacgacgtgctggacaagcggagaggcagggaccctgagatgggcggaaagccccagcggagaaagaacccccaggaaggactgtataacgaactccagaaagacaagatggccgaagcctacagcgagatcggcatgaagggcgagcggagaagaggcaagggccacgatggcctgtaccagggcctgagcaccgccaccaaggacacctatgacgccctgcacatgcaggccctgcctccaagaagggccaagcgatctggatctggagcaacaaacttctcactactcaaacaagcaggtgacgtggaggagaatcccgggcctactagtatggactggatttggcgcatccttttccttgtcggcgctgctaccggcgcgcattccttcgaacaggtgcagctccaggaatctggccctggcctcgtgaagcctagccagaccctgagcctgacctgtaccgtgtctggcggcagcatcagcacaagcggcatgggcgtgggctggatcagacagcaccctggcaagggcctggaatggatcggccacatttggtgggacgacgacaagcggtacaaccccgccctgaagtccagagtgaccatcagcgtggacaccagcaagaaccagttcagcctgaagctgagcagcgtgacagccgccgataccgccgtgtattattgcgcccggatggaactgtggtcctactacttcgactactggggccagggaaccctcgtgaccgtgtctagtacgcgtatccagaaccctgatcctgccgtgtaccagctgcgggatagcaagagcagcgacaagagcgtgtgtctgttcaccgacttcgacagccagaccaacgtgtcccagagcaaggactccgacgtgtacatcaccgataagaccgtgctggacatgcggagcatggacttcaagagcaactccgccgtggcctggtccaacaagtccgatttcgcctgcgccaacgccttcaacaacagcattatccccgaggacacattcttcccaagccccgagagcagctgcggtacccagagttttgggttgttggaccctaaattgtgctatctgttggacggaatcctgttcatttacggagtgatcctgaccgcattgttcctgcgggttaagttttccagatccgcagacgcacccgcttaccaacaagggcagaaccaactctacaatgaacttaatttggggcggagggaagagtacgacgttctggacaaaaggaggggacgagatcccgagatgggcggaaagcctcagcgaaggaagaatccgcaagaggggctttataacgaactccagaaagataaaatggcagaagcctatagtgagattgggatgaagggagaaaggaggaggggtaaaggtcacgatgggttgtaccaaggattgagcacagccactaaagatacctatgatgcgctccacatgcaggccctgccgccaaga

SEQ ID NO: 2182 - DNA, 2850 bp, Artificial Sequence
  Synthetic Polynucloetide
atggccttaccagtgaccgccttgctcctgccgctggccttgctgctccacgccgccaggccggaagtgcagctggttgaatctggcggaggactggttcagcctggcggatctctgagactgtcttgtgccgccagcggcttcagcttcagcgacttttggatgagctgggtccgacaggcccctggcaaaggacttgaatgggtcgccacaatcagccaggccggcagcgagaaggactacgtggactctgtgaagggcagattcaccatcagccgggacaacgccaagaagtccctgtacctccagatgaacagcctgagagccgaggacaccgccgtgtactattgtgcctctggcgtgtacagcttcgactacagaggccagggcaccctggtcacagtctcttctggtaccggcggaggcggatctggcggcggaggtagcggtggcggaggatctgaattcgactacatccacgtgacacagagccctagcagcctgtccgtgtccatcggcgatagagtgaccatcaactgccagacctctcaaggcgtgggcagcgacctgcactggtatcagcacaaacctggcagagcccctaagctgctgatccaccatgccagctctgtggaagatggcgtgcccagcagattttccggcaccggatttcacaccagcttcaacctgacaatcaacgacctccaggccgacgacatcggcacctactactgtcaagtgctccagagcttcggcagaggcagcagactggatacaaaactcgaggacctgaagaacgtgttcccacctgaggtggccgtgttcgagcctagcgaggccgagatcagccacacccagaaagccaccctcgtgtgcctggctaccggcttctaccccgaccatgtggaactgtcttggtgggtcaacggcaaagaggtgcacagcggcgtgtctaccgacccccagccactgaaagaacagcccgccctgaacgacagccggtactgcctgagcagcagactgagagtgtccgccaccttctggcagaacccccggaaccacttcagatgccaggtgcagttctacggcctgagcgagaacgacgagtggacccaggacagagccaagcccgtgacccagatcgtgtctgccgaagcctggggcagagccgattgcggatcccagagcttcggcctgctggaccccaagctgtgctacctgctggatggcatcctgttcatctacggcgtgatcctgaccgccctgttcctgagagtgaagttcagcagaagcgccgacgcccctgcctaccagcagggacagaaccaactgtacaacgagctgaacctgggcagacgggaagagtacgacgtgctggacaagcggagaggcagggaccctgagatgggcggaaagccccagcggagaaagaacccccaggaaggactgtataacgaactccagaaagacaagatggccgaagcctacagcgagatcggcatgaagggcgagcggagaagaggcaagggccacgatggcctgtaccagggcctgagcaccgccaccaaggacacctatgacgccctgcacatgcaggccctgcctccaagaagggccaagcgatctggatctggagcaacaaacttctcactactcaaacaagcaggtgacgtggaggagaatcccgggcctactagtatggactggatttggcgcatccttttccttgtcggcgctgctaccggcgcgcattccttcgaaagggcacacctggtgcagtctggcaccgccatgaagaaacctggcgcttccgtcagagtgtcctgtcagacaagcggctacaccttcacagcccacatcctgttctggttcagacaggccccaggcagaggactggaatgggtcggatggatcaagccccagtacggggccgtgaatttcggcggaggcttcagagacagagtgaccctgaccagggacgtgtaccgggaaatcgcctacatggacatccggggcctgaagcctgatgacaccgccgtgtactactgcgccagggatagaagctacggcgacagctcttgggctctcgatgcttggggacagggcacaacagtggtggtgtctgctacgcgtatccagaaccctgatcctgccgtgtaccagctgcgggatagcaagagcagcgacaagagcgtgtgtctgttcaccgacttcgacagccagaccaacgtgtcccagagcaaggactccgacgtgtacatcaccgataagaccgtgctggacatgcggagcatggacttcaagagcaactccgccgtggcctggtccaacaagtccgatttcgcctgcgccaacgccttcaacaacagcattatccccgaggacacattcttcccaagccccgagagcagctgcggtacccagagttttgggttgttggaccctaaattgtgctatctgttggacggaatcctgttcatttacggagtgatcctgaccgcattgttcctgcgggttaagttttccagatccgcagacgcacccgcttaccaacaagggcagaaccaactctacaatgaacttaatttggggcggagggaagagtacgacgttctggacaaaaggaggggacgagatcccgagatgggcggaaagcctcagcgaaggaagaatccgcaagaggggctttataacgaactccagaaagataaaatggcagaagcctatagtgagattgggatgaagggagaaaggaggaggggtaaaggtcacgatgggttgtaccaaggattgagcacagccactaaagatacctatgatgcgctccacatgcaggccctgccgccaaga

SEQ ID NO: 2183 - DNA, 2880 bp, Artificial Sequence
  Synthetic Polynucloetide
atggccttaccagtgaccgccttgctcctgccgctggccttgctgctccacgccgccaggccggaagtgcagctggttgaatctggcggaggactggttcagcctggcggatctctgagactgtcttgtgccgccagcggcttcagcttcagcgacttttggatgagctgggtccgacaggcccctggcaaaggacttgaatgggtcgccacaatcagccaggccggcagcgagaaggactacgtggactctgtgaagggcagattcaccatcagccgggacaacgccaagaagtccctgtacctccagatgaacagcctgagagccgaggacaccgccgtgtactattgtgcctctggcgtgtacagcttcgactacagaggccagggcaccctggtcacagtctcttctggtaccggcggaggcggatctggcggcggaggtagcggtggcggaggatctgaattcgacgtgcagatgatccagacccccgatagcctggccgtgtccctgggacagagagccaccatctcttgcagagccagcgagagcgtggacaactacggcatcagcttcatgcactggtatcagcagaagcccggccagagccccaagctgctgatctacagagcctccaacctggaaagcggcatccccgccagattttccggcagcggcagcagaaccgacttcaccctgaccatcaaccccgtggaaaccgacgacgtggcaacctactactgccagcagaacaacaaggacccccccacctttggcggaggcaccaagctggaaatcaagctcgaggacctgaagaacgtgttcccacctgaggtggccgtgttcgagcctagcgaggccgagatcagccacacccagaaagccaccctcgtgtgcctggctaccggcttctaccccgaccatgtggaactgtcttggtgggtcaacggcaaagaggtgcacagcggcgtgtctaccgacccccagccactgaaagaacagcccgccctgaacgacagccggtactgcctgagcagcagactgagagtgtccgccaccttctggcagaacccccggaaccacttcagatgccaggtgcagttctacggcctgagcgagaacgacgagtggacccaggacagagccaagcccgtgacccagatcgtgtctgccgaagcctggggcagagccgattgcggatcccagagcttcggcctgctggaccccaagctgtgctacctgctggatggcatcctgttcatctacggcgtgatcctgaccgccctgttcctgagagtgaagttcagcagaagcgccgacgcccctgcctaccagcagggacagaaccaactgtacaacgagctgaacctgggcagacgggaagagtacgacgtgctggacaagcggagaggcagggaccctgagatgggcggaaagccccagcggagaaagaacccccaggaaggactgtataacgaactccagaaagacaagatggccgaagcctacagcgagatcggcatgaagggcgagcggagaagaggcaagggccacgatggcctgtaccagggcctgagcaccgccaccaaggacacctatgacgccctgcacatgcaggccctgcctccaagaagggccaagcgatctggatctggagcaacaaacttctcactactcaaacaagcaggtgacgtggaggagaatcccgggcctactagtatggactggatttggcgcatccttttccttgtcggcgctgctaccggcgcgcattccttcgaagggggaggcggctctcaggtgcaactccagcagtctggcgctgagcttgtgaagcctggggccagcgtgaagattagctgcaaggccagcggctacgccttcagcagctactggatgaactgggtcaagcagcggcctggcaagggcctggaatggatcggccaaatctaccccggcgacggcgacaccacctacaacggcaagttcaagggcaaggccaccctgacagccgacaagagcagcagcaccgtgtacatgcaactgaacagcctgaccagcgaggacagcgccgtgtacttctgcgtgcggtactactacggcagctccggctacttcgactattggggccagggcaccacactgaccgtgtcctctacgcgtatccagaaccctgatcctgccgtgtaccagctgcgggatagcaagagcagcgacaagagcgtgtgtctgttcaccgacttcgacagccagaccaacgtgtcccagagcaaggactccgacgtgtacatcaccgataagaccgtgctggacatgcggagcatggacttcaagagcaactccgccgtggcctggtccaacaagtccgatttcgcctgcgccaacgccttcaacaacagcattatccccgaggacacattcttcccaagccccgagagcagctgcggtacccagagttttgggttgttggaccctaaattgtgctatctgttggacggaatcctgttcatttacggagtgatcctgaccgcattgttcctgcgggttaagttttccagatccgcagacgcacccgcttaccaacaagggcagaaccaactctacaatgaacttaatttggggcggagggaagagtacgacgttctggacaaaaggaggggacgagatcccgagatgggcggaaagcctcagcgaaggaagaatccgcaagaggggctttataacgaactccagaaagataaaatggcagaagcctatagtgagattgggatgaagggagaaaggaggaggggtaaaggtcacgatgggttgtaccaaggattgagcacagccactaaagatacctatgatgcgctccacatgcaggccctgccgccaaga

SEQ ID NO: 2184 - DNA, 2853 bp, Artificial Sequence
  Synthetic Polynucloetide
atggccttaccagtgaccgccttgctcctgccgctggccttgctgctccacgccgccaggccggaagtgcagctggttgaatctggcggaggactggttcagcctggcggatctctgagactgtcttgtgccgccagcggcttcagcttcagcgacttttggatgagctgggtccgacaggcccctggcaaaggacttgaatgggtcgccacaatcagccaggccggcagcgagaaggactacgtggactctgtgaagggcagattcaccatcagccgggacaacgccaagaagtccctgtacctccagatgaacagcctgagagccgaggacaccgccgtgtactattgtgcctctggcgtgtacagcttcgactacagaggccagggcaccctggtcacagtctcttctggtaccggcggaggcggatctggcggcggaggtagcggtggcggaggatctgaattcgacgtgcagatgatccagacccccagcagcctgtctgccagcctgggcgatagagtgaccatcagctgtcgggccagccaggacatcggcaactacctgaactggtatcagcagaaacccgacggcaccgtgaagctgctgatctactacaccagcagactgcacagcggcgtgcccagcagattttctggcagcggctctggcaccgagtacagcctgaccatctccaacctggaacaggaagatattgctacctacttctgtcagcaaggcagcgccctgccccctacatttggcggcggaacaaagctggaaatcaacctcgaggacctgaagaacgtgttcccacctgaggtggccgtgttcgagcctagcgaggccgagatcagccacacccagaaagccaccctcgtgtgcctggctaccggcttctaccccgaccatgtggaactgtcttggtgggtcaacggcaaagaggtgcacagcggcgtgtctaccgacccccagccactgaaagaacagcccgccctgaacgacagccggtactgcctgagcagcagactgagagtgtccgccaccttctggcagaacccccggaaccacttcagatgccaggtgcagttctacggcctgagcgagaacgacgagtggacccaggacagagccaagcccgtgacccagatcgtgtctgccgaagcctggggcagagccgattgcggatcccagagcttcggcctgctggaccccaagctgtgctacctgctggatggcatcctgttcatctacggcgtgatcctgaccgccctgttcctgagagtgaagttcagcagaagcgccgacgcccctgcctaccagcagggacagaaccaactgtacaacgagctgaacctgggcagacgggaagagtacgacgtgctggacaagcggagaggcagggaccctgagatgggcggaaagccccagcggagaaagaacccccaggaaggactgtataacgaactccagaaagacaagatggccgaagcctacagcgagatcggcatgaagggcgagcggagaagaggcaagggccacgatggcctgtaccagggcctgagcaccgccaccaaggacacctatgacgccctgcacatgcaggccctgcctccaagaagggccaagcgatctggatctggagcaacaaacttctcactactcaaacaagcaggtgacgtggaggagaatcccgggcctactagtatggactggatttggcgcatccttttccttgtcggcgctgctaccggcgcgcattccttcgaagctctccagctccagcagtctggcgcagaactcgtgcggcctggcgcttctgtgaccctgagctgtaaagccagcggctacaccttcaccgactacgagatgcactgggtcaagcagacccctgtgcacggcctggaatggatcggagccatcgaccctgagacaggcggcaccgcctacaaccagaagttcgagggcaaggccatcctgaccgccgacaagagcagcagcacagcctacatggaactgcggagcctgacctccgaggacagccccgtgtactactgtgccagacggcggtactacggcagcagctccttcgactattggggccagggcaccaccctgaccgtgtctagtacgcgtatccagaaccctgatcctgccgtgtaccagctgcgggatagcaagagcagcgacaagagcgtgtgtctgttcaccgacttcgacagccagaccaacgtgtcccagagcaaggactccgacgtgtacatcaccgataagaccgtgctggacatgcggagcatggacttcaagagcaactccgccgtggcctggtccaacaagtccgatttcgcctgcgccaacgccttcaacaacagcattatccccgaggacacattcttcccaagccccgagagcagctgcggtacccagagttttgggttgttggaccctaaattgtgctatctgttggacggaatcctgttcatttacggagtgatcctgaccgcattgttcctgcgggttaagttttccagatccgcagacgcacccgcttaccaacaagggcagaaccaactctacaatgaacttaatttggggcggagggaagagtacgacgttctggacaaaaggaggggacgagatcccgagatgggcggaaagcctcagcgaaggaagaatccgcaagaggggctttataacgaactccagaaagataaaatggcagaagcctatagtgagattgggatgaagggagaaaggaggaggggtaaaggtcacgatgggttgtaccaaggattgagcacagccactaaagatacctatgatgcgctccacatgcaggccctgccgccaaga

SEQ ID NO: 2185 - DNA, 2865 bp, Artificial Sequence
  Synthetic Polynucloetide
atggccttaccagtgaccgccttgctcctgccgctggccttgctgctccacgccgccaggccggaagtgcagctggttgaatctggcggaggactggttcagcctggcggatctctgagactgtcttgtgccgccagcggcttcagcttcagcgacttttggatgagctgggtccgacaggcccctggcaaaggacttgaatgggtcgccacaatcagccaggccggcagcgagaaggactacgtggactctgtgaagggcagattcaccatcagccgggacaacgccaagaagtccctgtacctccagatgaacagcctgagagccgaggacaccgccgtgtactattgtgcctctggcgtgtacagcttcgactacagaggccagggcaccctggtcacagtctcttctggtaccggcggaggcggatctggcggcggaggtagcggtggcggaggatctgaattcgacatcgtcctgacccagtccccagccagcctggcggtgtccctgggtcaacgagctaccatttcctgcagagcctctaagtccgtatccacttccggctatagttacctgcattggtaccaacagaaaccagggcagccacccaagctgctcatctatctggcctcaaacctggagtccggcgtgcccgccagattctccggaagtgggagcggcaccgactttacattgaacatccacccagtcgaagaggaagatgctgccacttattactgtcagcactccagggagctgccatttacatttggctctggcacaaaactggagatcaaactcgaggacctgaagaacgtgttcccacctgaggtggccgtgttcgagcctagcgaggccgagatcagccacacccagaaagccaccctcgtgtgcctggctaccggcttctaccccgaccatgtggaactgtcttggtgggtcaacggcaaagaggtgcacagcggcgtgtctaccgacccccagccactgaaagaacagcccgccctgaacgacagccggtactgcctgagcagcagactgagagtgtccgccaccttctggcagaacccccggaaccacttcagatgccaggtgcagttctacggcctgagcgagaacgacgagtggacccaggacagagccaagcccgtgacccagatcgtgtctgccgaagcctggggcagagccgattgcggatcccagagcttcggcctgctggaccccaagctgtgctacctgctggatggcatcctgttcatctacggcgtgatcctgaccgccctgttcctgagagtgaagttcagcagaagcgccgacgcccctgcctaccagcagggacagaaccaactgtacaacgagctgaacctgggcagacgggaagagtacgacgtgctggacaagcggagaggcagggaccctgagatgggcggaaagccccagcggagaaagaacccccaggaaggactgtataacgaactccagaaagacaagatggccgaagcctacagcgagatcggcatgaagggcgagcggagaagaggcaagggccacgatggcctgtaccagggcctgagcaccgccaccaaggacacctatgacgccctgcacatgcaggccctgcctccaagaagggccaagcgatctggatctggagcaacaaacttctcactactcaaacaagcaggtgacgtggaggagaatcccgggcctactagtatggactggatttggcgcatccttttccttgtcggcgctgctaccggcgcgcattccttcgaacaggttcagctggtcgagtccgggggaggtctggtacagccgggtggcagcctcaagctgtcatgtgccgcatctggttttgactttagcaggtattggatgagctgggtccgccaggccccgggcaagggacttgagtggattggagaaataaaccctacttccagcacaatcaacttcacaccttctttgaaagataaggtttttatctctcgggataacgctaaaaacacactgtacttgcagatgtctaaggtgcgaagcgaagacaccgccctctattattgcgcccggggtaattactaccgctatggggatgcgatggactattgggggcaaggtacctccgtcacggtctcaacgcgtatccagaaccctgatcctgccgtgtaccagctgcgggatagcaagagcagcgacaagagcgtgtgtctgttcaccgacttcgacagccagaccaacgtgtcccagagcaaggactccgacgtgtacatcaccgataagaccgtgctggacatgcggagcatggacttcaagagcaactccgccgtggcctggtccaacaagtccgatttcgcctgcgccaacgccttcaacaacagcattatccccgaggacacattcttcccaagccccgagagcagctgcggtacccagagttttgggttgttggaccctaaattgtgctatctgttggacggaatcctgttcatttacggagtgatcctgaccgcattgttcctgcgggttaagttttccagatccgcagacgcacccgcttaccaacaagggcagaaccaactctacaatgaacttaatttggggcggagggaagagtacgacgttctggacaaaaggaggggacgagatcccgagatgggcggaaagcctcagcgaaggaagaatccgcaagaggggctttataacgaactccagaaagataaaatggcagaagcctatagtgagattgggatgaagggagaaaggaggaggggtaaaggtcacgatgggttgtaccaaggattgagcacagccactaaagatacctatgatgcgctccacatgcaggccctgccgccaaga

SEQ ID NO: 2186 - DNA, 2859 bp, Artificial Sequence
  Synthetic Polynucloetide
atggccttaccagtgaccgccttgctcctgccgctggccttgctgctccacgccgccaggccggaagtgcagctggttgaatctggcggaggactggttcagcctggcggatctctgagactgtcttgtgccgccagcggcttcagcttcagcgacttttggatgagctgggtccgacaggcccctggcaaaggacttgaatgggtcgccacaatcagccaggccggcagcgagaaggactacgtggactctgtgaagggcagattcaccatcagccgggacaacgccaagaagtccctgtacctccagatgaacagcctgagagccgaggacaccgccgtgtactattgtgcctctggcgtgtacagcttcgactacagaggccagggcaccctggtcacagtctcttctggtaccggcggaggcggatctggcggcggaggtagcggtggcggaggatctgaattcgacatccagatgacccagagccctagctcactgagcgccagcgtgggcgacagggtgaccattacctgctccgccagccaggacatcagcaactacctgaactggtaccagcagaagcccggcaaggcccccaagctgctgatctactacacctccaacctgcactccggcgtgcccagcaggttcagcggaagcggcagcggcaccgatttcaccctgaccatctccagcctgcagcccgaggacttcgccacctactactgccagcagtacaggaagctcccctggactttcggccagggcaccaaactggagatcaagcgtctcgaggacctgaagaacgtgttcccacctgaggtggccgtgttcgagcctagcgaggccgagatcagccacacccagaaagccaccctcgtgtgcctggctaccggcttctaccccgaccatgtggaactgtcttggtgggtcaacggcaaagaggtgcacagcggcgtgtctaccgacccccagccactgaaagaacagcccgccctgaacgacagccggtactgcctgagcagcagactgagagtgtccgccaccttctggcagaacccccggaaccacttcagatgccaggtgcagttctacggcctgagcgagaacgacgagtggacccaggacagagccaagcccgtgacccagatcgtgtctgccgaagcctggggcagagccgattgcggatcccagagcttcggcctgctggaccccaagctgtgctacctgctggatggcatcctgttcatctacggcgtgatcctgaccgccctgttcctgagagtgaagttcagcagaagcgccgacgcccctgcctaccagcagggacagaaccaactgtacaacgagctgaacctgggcagacgggaagagtacgacgtgctggacaagcggagaggcagggaccctgagatgggcggaaagccccagcggagaaagaacccccaggaaggactgtataacgaactccagaaagacaagatggccgaagcctacagcgagatcggcatgaagggcgagcggagaagaggcaagggccacgatggcctgtaccagggcctgagcaccgccaccaaggacacctatgacgccctgcacatgcaggccctgcctccaagaagggccaagcgatctggatctggagcaacaaacttctcactactcaaacaagcaggtgacgtggaggagaatcccgggcctactagtatggactggatttggcgcatccttttccttgtcggcgctgctaccggcgcgcattccttcgaacaggtgcagctggtccagagcggcgccgaagtgaagaagcccggcagctccgtgaaagtgagctgcaaggccagcggcggcaccttcagcaactactggatgcactgggtgaggcaggcccccggacagggcctggagtggatgggcgccacctacaggggccacagcgacacctactacaaccagaagttcaagggccgggtgaccatcaccgccgacaagagcaccagcaccgcctacatggaactgagcagcctcaggagcgaggacaccgctgtgtattactgcgccaggggcgccatctacgacggctacgacgtgctggacaactggggccagggcacactggtgaccgtgtccagcacgcgtatccagaaccctgatcctgccgtgtaccagctgcgggatagcaagagcagcgacaagagcgtgtgtctgttcaccgacttcgacagccagaccaacgtgtcccagagcaaggactccgacgtgtacatcaccgataagaccgtgctggacatgcggagcatggacttcaagagcaactccgccgtggcctggtccaacaagtccgatttcgcctgcgccaacgccttcaacaacagcattatccccgaggacacattcttcccaagccccgagagcagctgcggtacccagagttttgggttgttggaccctaaattgtgctatctgttggacggaatcctgttcatttacggagtgatcctgaccgcattgttcctgcgggttaagttttccagatccgcagacgcacccgcttaccaacaagggcagaaccaactctacaatgaacttaatttggggcggagggaagagtacgacgttctggacaaaaggaggggacgagatcccgagatgggcggaaagcctcagcgaaggaagaatccgcaagaggggctttataacgaactccagaaagataaaatggcagaagcctatagtgagattgggatgaagggagaaaggaggaggggtaaaggtcacgatgggttgtaccaaggattgagcacagccactaaagatacctatgatgcgctccacatgcaggccctgccgccaaga

SEQ ID NO: 2187 - DNA, 2859 bp, Artificial Sequence
  Synthetic Polynucloetide
atggccttaccagtgaccgccttgctcctgccgctggccttgctgctccacgccgccaggccggaagtgcagctggttgaatctggcggaggactggttcagcctggcggatctctgagactgtcttgtgccgccagcggcttcagcttcagcgacttttggatgagctgggtccgacaggcccctggcaaaggacttgaatgggtcgccacaatcagccaggccggcagcgagaaggactacgtggactctgtgaagggcagattcaccatcagccgggacaacgccaagaagtccctgtacctccagatgaacagcctgagagccgaggacaccgccgtgtactattgtgcctctggcgtgtacagcttcgactacagaggccagggcaccctggtcacagtctcttctggtaccggcggaggcggatctggcggcggaggtagcggtggcggaggatctgaattcgacatcgtgctgacacagagccctgccaccctgtctctgagccctggcgatagagccaccatcagctgtagagccagcgagagcgtgaccatcctgggcagccacctgatctactggtatcagcagaagcccggccagccccccagactgctgattcagctggcctccaatgtgcagaccggcgtgccagccagattttccggcagcggcagcagaaccgacttcaccctgaccatcagcagcgtggaacccgaggacttcgccgtgtactactgcctccagagccggaccatccccagaacattcggccagggcaccaagctggaaatcaagagactcgaggacctgaagaacgtgttcccacctgaggtggccgtgttcgagcctagcgaggccgagatcagccacacccagaaagccaccctcgtgtgcctggctaccggcttctaccccgaccatgtggaactgtcttggtgggtcaacggcaaagaggtgcacagcggcgtgtctaccgacccccagccactgaaagaacagcccgccctgaacgacagccggtactgcctgagcagcagactgagagtgtccgccaccttctggcagaacccccggaaccacttcagatgccaggtgcagttctacggcctgagcgagaacgacgagtggacccaggacagagccaagcccgtgacccagatcgtgtctgccgaagcctggggcagagccgattgcggatcccagagcttcggcctgctggaccccaagctgtgctacctgctggatggcatcctgttcatctacggcgtgatcctgaccgccctgttcctgagagtgaagttcagcagaagcgccgacgcccctgcctaccagcagggacagaaccaactgtacaacgagctgaacctgggcagacgggaagagtacgacgtgctggacaagcggagaggcagggaccctgagatgggcggaaagccccagcggagaaagaacccccaggaaggactgtataacgaactccagaaagacaagatggccgaagcctacagcgagatcggcatgaagggcgagcggagaagaggcaagggccacgatggcctgtaccagggcctgagcaccgccaccaaggacacctatgacgccctgcacatgcaggccctgcctccaagaagggccaagcgatctggatctggagcaacaaacttctcactactcaaacaagcaggtgacgtggaggagaatcccgggcctactagtatggactggatttggcgcatccttttccttgtcggcgctgctaccggcgcgcattccttcgaacaggtgcagctggtgcagtctggccccgaagtgaagaaacccggcgagtccgtgaagatcagctgcaaggccagcggctacaccttccggcactacagcatgaactgggtcaagcaggccccaggccagggcctgaagtggatgggcagaatcaacaccgagagcggcgtgcccatctacgccgacgacttcaagggccggttcagcttcaccgtggacaccagcgccagcaccgcctacctggaaatctccagcctgaccagcgaggataccgccgtgtatttctgctccaacgactacctgtacagcctggatttctggggccagggaaccaccctgacagtgtcctctacgcgtatccagaaccctgatcctgccgtgtaccagctgcgggatagcaagagcagcgacaagagcgtgtgtctgttcaccgacttcgacagccagaccaacgtgtcccagagcaaggactccgacgtgtacatcaccgataagaccgtgctggacatgcggagcatggacttcaagagcaactccgccgtggcctggtccaacaagtccgatttcgcctgcgccaacgccttcaacaacagcattatccccgaggacacattcttcccaagccccgagagcagctgcggtacccagagttttgggttgttggaccctaaattgtgctatctgttggacggaatcctgttcatttacggagtgatcctgaccgcattgttcctgcgggttaagttttccagatccgcagacgcacccgcttaccaacaagggcagaaccaactctacaatgaacttaatttggggcggagggaagagtacgacgttctggacaaaaggaggggacgagatcccgagatgggcggaaagcctcagcgaaggaagaatccgcaagaggggctttataacgaactccagaaagataaaatggcagaagcctatagtgagattgggatgaagggagaaaggaggaggggtaaaggtcacgatgggttgtaccaaggattgagcacagccactaaagatacctatgatgcgctccacatgcaggccctgccgccaaga

SEQ ID NO: 2188 - DNA, 2862 bp, Artificial Sequence
  Synthetic Polynucloetide
atggccttaccagtgaccgccttgctcctgccgctggccttgctgctccacgccgccaggccggaagtgcagctggttgaatctggcggaggactggttcagcctggcggatctctgagactgtcttgtgccgccagcggcttcagcttcagcgacttttggatgagctgggtccgacaggcccctggcaaaggacttgaatgggtcgccacaatcagccaggccggcagcgagaaggactacgtggactctgtgaagggcagattcaccatcagccgggacaacgccaagaagtccctgtacctccagatgaacagcctgagagccgaggacaccgccgtgtactattgtgcctctggcgtgtacagcttcgactacagaggccagggcaccctggtcacagtctcttctggtaccggcggaggcggatctggcggcggaggtagcggtggcggaggatctgaattccagtctgtgctgacacagcctcctagtgtgtctggcgctcctggacagagagtgaccatcagctgtacaggcagcagcagcaatatcggagccggctttgacgtgcactggtatcagcagctgcctggcacagcccctaaactgctgatctacggcaacagcaacagacccagcggcgtgcccgatagattttccggctctaagagcggcacaagcgccagcctggctattactggactccaggccgaggacgaggccgactactactgtcagagctacgacagcagcctgagcggctacgttttcggcaccggcaccaaagtgacagtgcttggtctcgaggacctgaagaacgtgttcccacctgaggtggccgtgttcgagcctagcgaggccgagatcagccacacccagaaagccaccctcgtgtgcctggctaccggcttctaccccgaccatgtggaactgtcttggtgggtcaacggcaaagaggtgcacagcggcgtgtctaccgacccccagccactgaaagaacagcccgccctgaacgacagccggtactgcctgagcagcagactgagagtgtccgccaccttctggcagaacccccggaaccacttcagatgccaggtgcagttctacggcctgagcgagaacgacgagtggacccaggacagagccaagcccgtgacccagatcgtgtctgccgaagcctggggcagagccgattgcggatcccagagcttcggcctgctggaccccaagctgtgctacctgctggatggcatcctgttcatctacggcgtgatcctgaccgccctgttcctgagagtgaagttcagcagaagcgccgacgcccctgcctaccagcagggacagaaccaactgtacaacgagctgaacctgggcagacgggaagagtacgacgtgctggacaagcggagaggcagggaccctgagatgggcggaaagccccagcggagaaagaacccccaggaaggactgtataacgaactccagaaagacaagatggccgaagcctacagcgagatcggcatgaagggcgagcggagaagaggcaagggccacgatggcctgtaccagggcctgagcaccgccaccaaggacacctatgacgccctgcacatgcaggccctgcctccaagaagggccaagcgatctggatctggagcaacaaacttctcactactcaaacaagcaggtgacgtggaggagaatcccgggcctactagtatggactggatttggcgcatccttttccttgtcggcgctgctaccggcgcgcattccttcgaacaagttcagctggttcagagcggagccgaagtgaagaaacctggggcctctgtgaaggtgtcctgcaaggcttccggctacacctttaccgattactacatgcactgggtccgacaggctcccggccaaagacttgaatggatgggctggatcaaccccaacagcggcggcacaaattacgcccagaagttccaggaccggatcaccgtgaccagagacaccagctccaacaccggctacatggaactgacccggctgagatccgatgacaccgccgtgtactactgcgctagaagcccttactccggcgtgctggataagtggggacagggcacactggtcaccgtgtcatctacgcgtatccagaaccctgatcctgccgtgtaccagctgcgggatagcaagagcagcgacaagagcgtgtgtctgttcaccgacttcgacagccagaccaacgtgtcccagagcaaggactccgacgtgtacatcaccgataagaccgtgctggacatgcggagcatggacttcaagagcaactccgccgtggcctggtccaacaagtccgatttcgcctgcgccaacgccttcaacaacagcattatccccgaggacacattcttcccaagccccgagagcagctgcggtacccagagttttgggttgttggaccctaaattgtgctatctgttggacggaatcctgttcatttacggagtgatcctgaccgcattgttcctgcgggttaagttttccagatccgcagacgcacccgcttaccaacaagggcagaaccaactctacaatgaacttaatttggggcggagggaagagtacgacgttctggacaaaaggaggggacgagatcccgagatgggcggaaagcctcagcgaaggaagaatccgcaagaggggctttataacgaactccagaaagataaaatggcagaagcctatagtgagattgggatgaagggagaaaggaggaggggtaaaggtcacgatgggttgtaccaaggattgagcacagccactaaagatacctatgatgcgctccacatgcaggccctgccgccaaga

SEQ ID NO: 2189 - DNA, 2853 bp, Artificial Sequence
  Synthetic Polynucloetide
atggccttaccagtgaccgccttgctcctgccgctggccttgctgctccacgccgccaggccggaagtgcagctggttgaatctggcggaggactggttcagcctggcggatctctgagactgtcttgtgccgccagcggcttcagcttcagcgacttttggatgagctgggtccgacaggcccctggcaaaggacttgaatgggtcgccacaatcagccaggccggcagcgagaaggactacgtggactctgtgaagggcagattcaccatcagccgggacaacgccaagaagtccctgtacctccagatgaacagcctgagagccgaggacaccgccgtgtactattgtgcctctggcgtgtacagcttcgactacagaggccagggcaccctggtcacagtctcttctggtaccggcggaggcggatctggcggcggaggtagcggtggcggaggatctgaattccaggctgttctgacacagcctccatctgcctctggcacacctggacagagagtgaccatctcctgtagcggcagcagcagcaacatcggcagctacaccgtgtcctggtatcagcagctccctggaacagcccctaagttcctgatctacagcaacaaccagcggcctagcggcgtgcccgatagattttctggcagcaagagcggcacaagcgccagcctggctatttctggactccagtctgaggacgaggccgactactattgtgccgcctgggacgatagcctgaacggctatgtgtttggcaccggcaccaaagtgacagtgcttggtctcgaggacctgaagaacgtgttcccacctgaggtggccgtgttcgagcctagcgaggccgagatcagccacacccagaaagccaccctcgtgtgcctggctaccggcttctaccccgaccatgtggaactgtcttggtgggtcaacggcaaagaggtgcacagcggcgtgtctaccgacccccagccactgaaagaacagcccgccctgaacgacagccggtactgcctgagcagcagactgagagtgtccgccaccttctggcagaacccccggaaccacttcagatgccaggtgcagttctacggcctgagcgagaacgacgagtggacccaggacagagccaagcccgtgacccagatcgtgtctgccgaagcctggggcagagccgattgcggatcccagagcttcggcctgctggaccccaagctgtgctacctgctggatggcatcctgttcatctacggcgtgatcctgaccgccctgttcctgagagtgaagttcagcagaagcgccgacgcccctgcctaccagcagggacagaaccaactgtacaacgagctgaacctgggcagacgggaagagtacgacgtgctggacaagcggagaggcagggaccctgagatgggcggaaagccccagcggagaaagaacccccaggaaggactgtataacgaactccagaaagacaagatggccgaagcctacagcgagatcggcatgaagggcgagcggagaagaggcaagggccacgatggcctgtaccagggcctgagcaccgccaccaaggacacctatgacgccctgcacatgcaggccctgcctccaagaagggccaagcgatctggatctggagcaacaaacttctcactactcaaacaagcaggtgacgtggaggagaatcccgggcctactagtatggactggatttggcgcatccttttccttgtcggcgctgctaccggcgcgcattccttcgaagttcaactggttcagagcggagccgaagtgaagaagcctggcgagagcctgaagattagctgcaaaggcagcggctacgacttcaccacctactggatcggctgggtccgacagatgcctggcaaaggactggaatggatgggcatcatctaccccggcgacagcgacaccagatacagccctagcgttagaggccgcgtgaccatcagcgccgacaagtctatcaacaccgcctacctccagtggtccagcctggaagcctctgacaccgccatgtactactgcgccagaatgtggaccttcagccaggatggatggggccagggaacactggtcacagtgtcatctacgcgtatccagaaccctgatcctgccgtgtaccagctgcgggatagcaagagcagcgacaagagcgtgtgtctgttcaccgacttcgacagccagaccaacgtgtcccagagcaaggactccgacgtgtacatcaccgataagaccgtgctggacatgcggagcatggacttcaagagcaactccgccgtggcctggtccaacaagtccgatttcgcctgcgccaacgccttcaacaacagcattatccccgaggacacattcttcccaagccccgagagcagctgcggtacccagagttttgggttgttggaccctaaattgtgctatctgttggacggaatcctgttcatttacggagtgatcctgaccgcattgttcctgcgggttaagttttccagatccgcagacgcacccgcttaccaacaagggcagaaccaactctacaatgaacttaatttggggcggagggaagagtacgacgttctggacaaaaggaggggacgagatcccgagatgggcggaaagcctcagcgaaggaagaatccgcaagaggggctttataacgaactccagaaagataaaatggcagaagcctatagtgagattgggatgaagggagaaaggaggaggggtaaaggtcacgatgggttgtaccaaggattgagcacagccactaaagatacctatgatgcgctccacatgcaggccctgccgccaaga

SEQ ID NO: 2190 - DNA, 2862 bp, Artificial Sequence
  Synthetic Polynucloetide
atggccttaccagtgaccgccttgctcctgccgctggccttgctgctccacgccgccaggccggaagtgcagctggttgaatctggcggaggactggttcagcctggcggatctctgagactgtcttgtgccgccagcggcttcagcttcagcgacttttggatgagctgggtccgacaggcccctggcaaaggacttgaatgggtcgccacaatcagccaggccggcagcgagaaggactacgtggactctgtgaagggcagattcaccatcagccgggacaacgccaagaagtccctgtacctccagatgaacagcctgagagccgaggacaccgccgtgtactattgtgcctctggcgtgtacagcttcgactacagaggccagggcaccctggtcacagtctcttctggtaccggcggaggcggatctggcggcggaggtagcggtggcggaggatctgaattcgacatcgtgatgacccagagccccgatagcctggccgtgtctctgggagagagagccaccatcaactgcaagagcagccagagcatcctgtacagcagcaaccagaagaactacctggcctggtatcagcagaagcccggccagagccctaagctgctgatctactgggccagcaccagagaaagcggcgtgcccgatagattcagcggcagcggctctggcaccgacttcaccctgaccatcagttctcttcaggccgaggacgtggccgtgtactactgccaccagtacatcagctcctacaccttcggccagggcaccaagctggaaatcaagctcgaggacctgaagaacgtgttcccacctgaggtggccgtgttcgagcctagcgaggccgagatcagccacacccagaaagccaccctcgtgtgcctggctaccggcttctaccccgaccatgtggaactgtcttggtgggtcaacggcaaagaggtgcacagcggcgtgtctaccgacccccagccactgaaagaacagcccgccctgaacgacagccggtactgcctgagcagcagactgagagtgtccgccaccttctggcagaacccccggaaccacttcagatgccaggtgcagttctacggcctgagcgagaacgacgagtggacccaggacagagccaagcccgtgacccagatcgtgtctgccgaagcctggggcagagccgattgcggatcccagagcttcggcctgctggaccccaagctgtgctacctgctggatggcatcctgttcatctacggcgtgatcctgaccgccctgttcctgagagtgaagttcagcagaagcgccgacgcccctgcctaccagcagggacagaaccaactgtacaacgagctgaacctgggcagacgggaagagtacgacgtgctggacaagcggagaggcagggaccctgagatgggcggaaagccccagcggagaaagaacccccaggaaggactgtataacgaactccagaaagacaagatggccgaagcctacagcgagatcggcatgaagggcgagcggagaagaggcaagggccacgatggcctgtaccagggcctgagcaccgccaccaaggacacctatgacgccctgcacatgcaggccctgcctccaagaagggccaagcgatctggatctggagcaacaaacttctcactactcaaacaagcaggtgacgtggaggagaatcccgggcctactagtatggactggatttggcgcatccttttccttgtcggcgctgctaccggcgcgcattccttcgaacaggtgcagctggtgcagtctggcgctgaagtgaagaaacctggggccagcgtgaaggtgtcctgcaaggccagcggctacacctttgccagccagtggatgcactggatgagacaggcccctggacagggcctggaatggatcggctggatcaaccccggcaacgtgaacaccaagtacaacgagaagttcaagggcagagccaccctgacagtggacaccagcaccaacaccgcctacatggaactgagcagcctgcggagcgaggacaccgccgtgtattattgcgccagaagcacctggtacagacccctggattattggggccagggaacccttgtgaccgtgtcctctacgcgtatccagaaccctgatcctgccgtgtaccagctgcgggatagcaagagcagcgacaagagcgtgtgtctgttcaccgacttcgacagccagaccaacgtgtcccagagcaaggactccgacgtgtacatcaccgataagaccgtgctggacatgcggagcatggacttcaagagcaactccgccgtggcctggtccaacaagtccgatttcgcctgcgccaacgccttcaacaacagcattatccccgaggacacattcttcccaagccccgagagcagctgcggtacccagagttttgggttgttggaccctaaattgtgctatctgttggacggaatcctgttcatttacggagtgatcctgaccgcattgttcctgcgggttaagttttccagatccgcagacgcacccgcttaccaacaagggcagaaccaactctacaatgaacttaatttggggcggagggaagagtacgacgttctggacaaaaggaggggacgagatcccgagatgggcggaaagcctcagcgaaggaagaatccgcaagaggggctttataacgaactccagaaagataaaatggcagaagcctatagtgagattgggatgaagggagaaaggaggaggggtaaaggtcacgatgggttgtaccaaggattgagcacagccactaaagatacctatgatgcgctccacatgcaggccctgccgccaaga

SEQ ID NO: 2191 - DNA, 2862 bp, Artificial Sequence
  Synthetic Polynucloetide
atggccttaccagtgaccgccttgctcctgccgctggccttgctgctccacgccgccaggccggaagtgcagctggttgaatctggcggaggactggttcagcctggcggatctctgagactgtcttgtgccgccagcggcttcagcttcagcgacttttggatgagctgggtccgacaggcccctggcaaaggacttgaatgggtcgccacaatcagccaggccggcagcgagaaggactacgtggactctgtgaagggcagattcaccatcagccgggacaacgccaagaagtccctgtacctccagatgaacagcctgagagccgaggacaccgccgtgtactattgtgcctctggcgtgtacagcttcgactacagaggccagggcaccctggtcacagtctcttctggtaccggcggaggcggatctggcggcggaggtagcggtggcggaggatctgaattcgaccacatcgtgctgacccagagccctagcagcctgtctgccagcctgggcgacagagtgaccatcagctgtagagccagccaggacatcagcacctacctgaactggtatcagcagaaacccgacggcaccgtgaagctgctgatcttctacaccagcagactgcacgccggggtgcccagcagattttctggcagcggctctggcacccaccacagcctgaccatctccaacctggaacaggaagatattgctacctacttctgtcagcaaggcaacagcctgcccttcaccttcggcagcggcaccaagctggaaatcaagagactcgaggacctgaagaacgtgttcccacctgaggtggccgtgttcgagcctagcgaggccgagatcagccacacccagaaagccaccctcgtgtgcctggctaccggcttctaccccgaccatgtggaactgtcttggtgggtcaacggcaaagaggtgcacagcggcgtgtctaccgacccccagccactgaaagaacagcccgccctgaacgacagccggtactgcctgagcagcagactgagagtgtccgccaccttctggcagaacccccggaaccacttcagatgccaggtgcagttctacggcctgagcgagaacgacgagtggacccaggacagagccaagcccgtgacccagatcgtgtctgccgaagcctggggcagagccgattgcggatcccagagcttcggcctgctggaccccaagctgtgctacctgctggatggcatcctgttcatctacggcgtgatcctgaccgccctgttcctgagagtgaagttcagcagaagcgccgacgcccctgcctaccagcagggacagaaccaactgtacaacgagctgaacctgggcagacgggaagagtacgacgtgctggacaagcggagaggcagggaccctgagatgggcggaaagccccagcggagaaagaacccccaggaaggactgtataacgaactccagaaagacaagatggccgaagcctacagcgagatcggcatgaagggcgagcggagaagaggcaagggccacgatggcctgtaccagggcctgagcaccgccaccaaggacacctatgacgccctgcacatgcaggccctgcctccaagaagggccaagcgatctggatctggagcaacaaacttctcactactcaaacaagcaggtgacgtggaggagaatcccgggcctactagtatggactggatttggcgcatccttttccttgtcggcgctgctaccggcgcgcattccttcgaacaggtgcagctgaaagagagcggccctgagctggaaaagcctggggccagcgtgaagattagctgcaaggccagcggctacagcttcaccgcctacagcatgaactgggtcaagcagaacaacggcatgagcctggaatggatcggcagcatcgacccctactacggcgacaccaaatacgcccagaagttcaagggcaaggccaccctgaccgtggataaggccagcagcaccgcctacctccagctgaagtctctgaccagcgaggacagcgccgtgtactactgcgccagacggatgattaccaccggcgactggtacttcgacgtgtggggagccggaaccaccgtgacagtgtctagcacgcgtatccagaaccctgatcctgccgtgtaccagctgcgggatagcaagagcagcgacaagagcgtgtgtctgttcaccgacttcgacagccagaccaacgtgtcccagagcaaggactccgacgtgtacatcaccgataagaccgtgctggacatgcggagcatggacttcaagagcaactccgccgtggcctggtccaacaagtccgatttcgcctgcgccaacgccttcaacaacagcattatccccgaggacacattcttcccaagccccgagagcagctgcggtacccagagttttgggttgttggaccctaaattgtgctatctgttggacggaatcctgttcatttacggagtgatcctgaccgcattgttcctgcgggttaagttttccagatccgcagacgcacccgcttaccaacaagggcagaaccaactctacaatgaacttaatttggggcggagggaagagtacgacgttctggacaaaaggaggggacgagatcccgagatgggcggaaagcctcagcgaaggaagaatccgcaagaggggctttataacgaactccagaaagataaaatggcagaagcctatagtgagattgggatgaagggagaaaggaggaggggtaaaggtcacgatgggttgtaccaaggattgagcacagccactaaagatacctatgatgcgctccacatgcaggccctgccgccaaga

SEQ ID NO: 2192 - DNA, 2862 bp, Artificial Sequence; identical to SEQ ID NO: 2191
  Synthetic Polynucloetide

SEQ ID NO: 2193 - DNA, 2862 bp, Artificial Sequence
  Synthetic Polynucloetide
atggccttaccagtgaccgccttgctcctgccgctggccttgctgctccacgccgccaggccggaagtgcagctggttgaatctggcggaggactggttcagcctggcggatctctgagactgtcttgtgccgccagcggcttcagcttcagcgacttttggatgagctgggtccgacaggcccctggcaaaggacttgaatgggtcgccacaatcagccaggccggcagcgagaaggactacgtggactctgtgaagggcagattcaccatcagccgggacaacgccaagaagtccctgtacctccagatgaacagcctgagagccgaggacaccgccgtgtactattgtgcctctggcgtgtacagcttcgactacagaggccagggcaccctggtcacagtctcttctggtaccggcggaggcggatctggcggcggaggtagcggtggcggaggatctgaattcgacgagatcgtgctgacacagagccctgccaccctgtctctgagccctggcgaaagagccaccctgagctgtagagccagccagagcgtgtccagctacctggcctggtatcagcagaagcccggccaggctccccggctgctgatctacgatgccagcaatagagccaccggcatccccgccagattttccggctctggcagcggcaccgacttcaccctgaccatcagctccctggaacccgaggacttcgccgtgtactactgccagcagcggagcaactggcccatcacattcggccagggcacccggctggaaatcaaactcgaggacctgaagaacgtgttcccacctgaggtggccgtgttcgagcctagcgaggccgagatcagccacacccagaaagccaccctcgtgtgcctggctaccggcttctaccccgaccatgtggaactgtcttggtgggtcaacggcaaagaggtgcacagcggcgtgtctaccgacccccagccactgaaagaacagcccgccctgaacgacagccggtactgcctgagcagcagactgagagtgtccgccaccttctggcagaacccccggaaccacttcagatgccaggtgcagttctacggcctgagcgagaacgacgagtggacccaggacagagccaagcccgtgacccagatcgtgtctgccgaagcctggggcagagccgattgcggatcccagagcttcggcctgctggaccccaagctgtgctacctgctggatggcatcctgttcatctacggcgtgatcctgaccgccctgttcctgagagtgaagttcagcagaagcgccgacgcccctgcctaccagcagggacagaaccaactgtacaacgagctgaacctgggcagacgggaagagtacgacgtgctggacaagcggagaggcagggaccctgagatgggcggaaagccccagcggagaaagaacccccaggaaggactgtataacgaactccagaaagacaagatggccgaagcctacagcgagatcggcatgaagggcgagcggagaagaggcaagggccacgatggcctgtaccagggcctgagcaccgccaccaaggacacctatgacgccctgcacatgcaggccctgcctccaagaagggccaagcgatctggatctggagcaacaaacttctcactactcaaacaagcaggtgacgtggaggagaatcccgggcctactagtatggactggatttggcgcatccttttccttgtcggcgctgctaccggcgcgcattccttcgaagaagtgcagctggtggaatcaggcggcggactggtgcagcctggcagaagcctgagactgagctgtgccgccagcggcttcaccttcaacgactacgccatgcactgggtgcgccaggcccctggaaaaggactggaatgggtgtccacaatcagctggaacagcggcagcatcggctacgccgatagcgtgaagggccggttcaccatcagccgggacaacgccaagaagtccctgtacctccagatgaacagcctgcgggccgaggacacagccctgtactattgcgccaaggacatccagtacggcaactactactacggcatggacgtgtggggccagggaaccaccgtgaccgtgtcatctacgcgtatccagaaccctgatcctgccgtgtaccagctgcgggatagcaagagcagcgacaagagcgtgtgtctgttcaccgacttcgacagccagaccaacgtgtcccagagcaaggactccgacgtgtacatcaccgataagaccgtgctggacatgcggagcatggacttcaagagcaactccgccgtggcctggtccaacaagtccgatttcgcctgcgccaacgccttcaacaacagcattatccccgaggacacattcttcccaagccccgagagcagctgcggtacccagagttttgggttgttggaccctaaattgtgctatctgttggacggaatcctgttcatttacggagtgatcctgaccgcattgttcctgcgggttaagttttccagatccgcagacgcacccgcttaccaacaagggcagaaccaactctacaatgaacttaatttggggcggagggaagagtacgacgttctggacaaaaggaggggacgagatcccgagatgggcggaaagcctcagcgaaggaagaatccgcaagaggggctttataacgaactccagaaagataaaatggcagaagcctatagtgagattgggatgaagggagaaaggaggaggggtaaaggtcacgatgggttgtaccaaggattgagcacagccactaaagatacctatgatgcgctccacatgcaggccctgccgccaaga

SEQ ID NO: 2194 - DNA, 2868 bp, Artificial Sequence
  Synthetic Polynucloetide
atggccttaccagtgaccgccttgctcctgccgctggccttgctgctccacgccgccaggccggaagtgcagctggttgaatctggcggaggactggttcagcctggcggatctctgagactgtcttgtgccgccagcggcttcagcttcagcgacttttggatgagctgggtccgacaggcccctggcaaaggacttgaatgggtcgccacaatcagccaggccggcagcgagaaggactacgtggactctgtgaagggcagattcaccatcagccgggacaacgccaagaagtccctgtacctccagatgaacagcctgagagccgaggacaccgccgtgtactattgtgcctctggcgtgtacagcttcgactacagaggccagggcaccctggtcacagtctcttctggtaccggcggaggcggatctggcggcggaggtagcggtggcggaggatctgaattcgacatcgtgatgacccagacccccctgagcctgcctgtgacacctggcgagcctgccagcatctcctgcagaagcagcaagagcctgctgcacagcaacggcatcacctacctgtactggtatctgcagaaacccggccagagcccccaactgctgatctaccagatgagcaacctggtgtccggcgtgcccgacagattttctggcagcggctccggcaccgacttcaccctgaagatcagccgggtggaagccgaggacgtgggcgtgtactactgcgcccagaacctggaactgccctacacctttggcggcggaacaaaggtggaaatcaagcggctcgaggacctgaagaacgtgttcccacctgaggtggccgtgttcgagcctagcgaggccgagatcagccacacccagaaagccaccctcgtgtgcctggctaccggcttctaccccgaccatgtggaactgtcttggtgggtcaacggcaaagaggtgcacagcggcgtgtctaccgacccccagccactgaaagaacagcccgccctgaacgacagccggtactgcctgagcagcagactgagagtgtccgccaccttctggcagaacccccggaaccacttcagatgccaggtgcagttctacggcctgagcgagaacgacgagtggacccaggacagagccaagcccgtgacccagatcgtgtctgccgaagcctggggcagagccgattgcggatcccagagcttcggcctgctggaccccaagctgtgctacctgctggatggcatcctgttcatctacggcgtgatcctgaccgccctgttcctgagagtgaagttcagcagaagcgccgacgcccctgcctaccagcagggacagaaccaactgtacaacgagctgaacctgggcagacgggaagagtacgacgtgctggacaagcggagaggcagggaccctgagatgggcggaaagccccagcggagaaagaacccccaggaaggactgtataacgaactccagaaagacaagatggccgaagcctacagcgagatcggcatgaagggcgagcggagaagaggcaagggccacgatggcctgtaccagggcctgagcaccgccaccaaggacacctatgacgccctgcacatgcaggccctgcctccaagaagggccaagcgatctggatctggagcaacaaacttctcactactcaaacaagcaggtgacgtggaggagaatcccgggcctactagtatggactggatttggcgcatccttttccttgtcggcgctgctaccggcgcgcattccttcgaacaggtgcaactggtgcagagcggagccgaagtgaaaaagcccggcagcagcgtgaaggtgtcctgcaaggccagcggctacgccttcagctactcctggatcaactgggtgcgccaggcccctggacagggcctggaatggatgggcagaatcttccccggcgacggcgacaccgactacaacggcaagttcaagggcagagtgaccatcaccgccgacaagagcaccagcaccgcctacatggaactgagcagcctgcggagcgaggataccgccgtgtactattgtgccagaaacgtgttcgacggctactggctggtgtactggggccagggaacacttgtgaccgtgtccagcacgcgtatccagaaccctgatcctgccgtgtaccagctgcgggatagcaagagcagcgacaagagcgtgtgtctgttcaccgacttcgacagccagaccaacgtgtcccagagcaaggactccgacgtgtacatcaccgataagaccgtgctggacatgcggagcatggacttcaagagcaactccgccgtggcctggtccaacaagtccgatttcgcctgcgccaacgccttcaacaacagcattatccccgaggacacattcttcccaagccccgagagcagctgcggtacccagagttttgggttgttggaccctaaattgtgctatctgttggacggaatcctgttcatttacggagtgatcctgaccgcattgttcctgcgggttaagttttccagatccgcagacgcacccgcttaccaacaagggcagaaccaactctacaatgaacttaatttggggcggagggaagagtacgacgttctggacaaaaggaggggacgagatcccgagatgggcggaaagcctcagcgaaggaagaatccgcaagaggggctttataacgaactccagaaagataaaatggcagaagcctatagtgagattgggatgaagggagaaaggaggaggggtaaaggtcacgatgggttgtaccaaggattgagcacagccactaaagatacctatgatgcgctccacatgcaggccctgccgccaaga

SEQ ID NO: 2195 - DNA, 2871 bp, Artificial Sequence
  Synthetic Polynucloetide
atggccttaccagtgaccgccttgctcctgccgctggccttgctgctccacgccgccaggccggaagtgcagctggttgaatctggcggaggactggttcagcctggcggatctctgagactgtcttgtgccgccagcggcttcagcttcagcgacttttggatgagctgggtccgacaggcccctggcaaaggacttgaatgggtcgccacaatcagccaggccggcagcgagaaggactacgtggactctgtgaagggcagattcaccatcagccgggacaacgccaagaagtccctgtacctccagatgaacagcctgagagccgaggacaccgccgtgtactattgtgcctctggcgtgtacagcttcgactacagaggccagggcaccctggtcacagtctcttctggtaccggcggaggcggatctggcggcggaggtagcggtggcggaggatctgaattcgacatccagatgacccagagccccagcagcctgtctgccagcgtgggcgacagagtgaccatcacctgtcggagcagccagagcatcgtgcactccgtgggcaacaccttcctggaatggtatcagcagaagcccggcaaggcccccaagctgctgatctacaaggtgtccaacagattcagcggcgtgcccagcaggtttagcggctctggcagcggcaccgacttcaccctgaccatctctagcctccagcccgaggacttcgccacctactactgttttcaaggcagccagttcccctacaccttcggccagggaacaaaggtggaaatcaagcggctcgaggacctgaagaacgtgttcccacctgaggtggccgtgttcgagcctagcgaggccgagatcagccacacccagaaagccaccctcgtgtgcctggctaccggcttctaccccgaccatgtggaactgtcttggtgggtcaacggcaaagaggtgcacagcggcgtgtctaccgacccccagccactgaaagaacagcccgccctgaacgacagccggtactgcctgagcagcagactgagagtgtccgccaccttctggcagaacccccggaaccacttcagatgccaggtgcagttctacggcctgagcgagaacgacgagtggacccaggacagagccaagcccgtgacccagatcgtgtctgccgaagcctggggcagagccgattgcggatcccagagcttcggcctgctggaccccaagctgtgctacctgctggatggcatcctgttcatctacggcgtgatcctgaccgccctgttcctgagagtgaagttcagcagaagcgccgacgcccctgcctaccagcagggacagaaccaactgtacaacgagctgaacctgggcagacgggaagagtacgacgtgctggacaagcggagaggcagggaccctgagatgggcggaaagccccagcggagaaagaacccccaggaaggactgtataacgaactccagaaagacaagatggccgaagcctacagcgagatcggcatgaagggcgagcggagaagaggcaagggccacgatggcctgtaccagggcctgagcaccgccaccaaggacacctatgacgccctgcacatgcaggccctgcctccaagaagggccaagcgatctggatctggagcaacaaacttctcactactcaaacaagcaggtgacgtggaggagaatcccgggcctactagtatggactggatttggcgcatccttttccttgtcggcgctgctaccggcgcgcattccttcgaagaagtgcaactggtggaaagcggaggcggcctggtgcagcctggcggatctctgagactgagctgtgccgccagcggctacgagttcagccggtcctggatgaactgggtgcgccaggcccctggcaagggactggaatgggtgggaagaatctaccccggcgacggcgacaccaactacagcggcaagttcaagggccggttcaccatcagcgccgacaccagcaagaacaccgcctacctccagatgaacagcctgcgggccgaggataccgccgtgtactactgtgccagagatggcagctcctgggactggtacttcgacgtgtggggacagggaacccttgtgaccgtgtccagcacgcgtatccagaaccctgatcctgccgtgtaccagctgcgggatagcaagagcagcgacaagagcgtgtgtctgttcaccgacttcgacagccagaccaacgtgtcccagagcaaggactccgacgtgtacatcaccgataagaccgtgctggacatgcggagcatggacttcaagagcaactccgccgtggcctggtccaacaagtccgatttcgcctgcgccaacgccttcaacaacagcattatccccgaggacacattcttcccaagccccgagagcagctgcggtacccagagttttgggttgttggaccctaaattgtgctatctgttggacggaatcctgttcatttacggagtgatcctgaccgcattgttcctgcgggttaagttttccagatccgcagacgcacccgcttaccaacaagggcagaaccaactctacaatgaacttaatttggggcggagggaagagtacgacgttctggacaaaaggaggggacgagatcccgagatgggcggaaagcctcagcgaaggaagaatccgcaagaggggctttataacgaactccagaaagataaaatggcagaagcctatagtgagattgggatgaagggagaaaggaggaggggtaaaggtcacgatgggttgtaccaaggattgagcacagccactaaagatacctatgatgcgctccacatgcaggccctgccgccaaga

SEQ ID NO: 2196 - DNA, 2865 bp, Artificial Sequence
  Synthetic Polynucloetide
atggccttaccagtgaccgccttgctcctgccgctggccttgctgctccacgccgccaggccggaagtgcagctggttgaatctggcggaggactggttcagcctggcggatctctgagactgtcttgtgccgccagcggcttcagcttcagcgacttttggatgagctgggtccgacaggcccctggcaaaggacttgaatgggtcgccacaatcagccaggccggcagcgagaaggactacgtggactctgtgaagggcagattcaccatcagccgggacaacgccaagaagtccctgtacctccagatgaacagcctgagagccgaggacaccgccgtgtactattgtgcctctggcgtgtacagcttcgactacagaggccagggcaccctggtcacagtctcttctggtaccggcggaggcggatctggcggcggaggtagcggtggcggaggatctgaattcgacatccagatgacccagagccccagcagcctgtctgccagcgtgggcgacagagtgaccatcacctgtagagccagccagaccatctggtcctacctgaactggtatcagcagaggcccggcaaggcccccaacctgctgatctatgccgccagctctctccagagcggcgtgcccagcagattttccggcagaggcagcggcaccgacttcaccctgaccatcagttccttgcaggccgaggacttcgccacctactactgccagcagagctacagcatcccccagattttcggccagggcaccaagctggaaatcaagctcgaggacctgaagaacgtgttcccacctgaggtggccgtgttcgagcctagcgaggccgagatcagccacacccagaaagccaccctcgtgtgcctggctaccggcttctaccccgaccatgtggaactgtcttggtgggtcaacggcaaagaggtgcacagcggcgtgtctaccgacccccagccactgaaagaacagcccgccctgaacgacagccggtactgcctgagcagcagactgagagtgtccgccaccttctggcagaacccccggaaccacttcagatgccaggtgcagttctacggcctgagcgagaacgacgagtggacccaggacagagccaagcccgtgacccagatcgtgtctgccgaagcctggggcagagccgattgcggatcccagagcttcggcctgctggaccccaagctgtgctacctgctggatggcatcctgttcatctacggcgtgatcctgaccgccctgttcctgagagtgaagttcagcagaagcgccgacgcccctgcctaccagcagggacagaaccaactgtacaacgagctgaacctgggcagacgggaagagtacgacgtgctggacaagcggagaggcagggaccctgagatgggcggaaagccccagcggagaaagaacccccaggaaggactgtataacgaactccagaaagacaagatggccgaagcctacagcgagatcggcatgaagggcgagcggagaagaggcaagggccacgatggcctgtaccagggcctgagcaccgccaccaaggacacctatgacgccctgcacatgcaggccctgcctccaagaagggccaagcgatctggatctggagcaacaaacttctcactactcaaacaagcaggtgacgtggaggagaatcccgggcctactagtatggactggatttggcgcatccttttccttgtcggcgctgctaccggcgcgcattccttcgaacaggtgcagctccagcagtctggacccggcctcgtgaagcctagccagacactgagcctgacctgcgccatcagcggcgatagcgtgtccagcaatagcgccgcctggaactggatcagacagtccccctctcggggcctggaatggctgggccggacctactaccgcagcaagtggtacaacgactacgccgtgtccgtgaagtcccggatcaccatcaaccccgacaccagcaagaaccagttctccttgcaactgaacagcgtgacccccgaggacaccgccgtgtactactgcgccagagaagtgaccggcgacctggaagatgccttcgacatctggggccagggaacaatggtcacagtgtccagcacgcgtatccagaaccctgatcctgccgtgtaccagctgcgggatagcaagagcagcgacaagagcgtgtgtctgttcaccgacttcgacagccagaccaacgtgtcccagagcaaggactccgacgtgtacatcaccgataagaccgtgctggacatgcggagcatggacttcaagagcaactccgccgtggcctggtccaacaagtccgatttcgcctgcgccaacgccttcaacaacagcattatccccgaggacacattcttcccaagccccgagagcagctgcggtacccagagttttgggttgttggaccctaaattgtgctatctgttggacggaatcctgttcatttacggagtgatcctgaccgcattgttcctgcgggttaagttttccagatccgcagacgcacccgcttaccaacaagggcagaaccaactctacaatgaacttaatttggggcggagggaagagtacgacgttctggacaaaaggaggggacgagatcccgagatgggcggaaagcctcagcgaaggaagaatccgcaagaggggctttataacgaactccagaaagataaaatggcagaagcctatagtgagattgggatgaagggagaaaggaggaggggtaaaggtcacgatgggttgtaccaaggattgagcacagccactaaagatacctatgatgcgctccacatgcaggccctgccgccaaga

SEQ ID NO: 2197 - DNA, 2844 bp, Artificial Sequence
  Synthetic Polynucloetide
atggccttaccagtgaccgccttgctcctgccgctggccttgctgctccacgccgccaggccggaagtgcagctggttgaatctggcggaggactggttcagcctggcggatctctgagactgtcttgtgccgccagcggcttcagcttcagcgacttttggatgagctgggtccgacaggcccctggcaaaggacttgaatgggtcgccacaatcagccaggccggcagcgagaaggactacgtggactctgtgaagggcagattcaccatcagccgggacaacgccaagaagtccctgtacctccagatgaacagcctgagagccgaggacaccgccgtgtactattgtgcctctggcgtgtacagcttcgactacagaggccagggcaccctggtcacagtctcttctggtaccggcggaggcggatctggcggcggaggtagcggtggcggaggatctgaattcgacatccagatgacccagagccccgccaccatcgagaacacaagcctgtctgccagcgtgggcgacagagtgaccatcacctgtagagccagccagggcatcagctcttggctgacctggtatcagcagaagcccgagaaggcccccaagagcctgatctacgccgccagctctctgcagtctggcgtgcccagcagattttccggcagcggctctggcaccgacttcaccctgacaatcagcagcctgcagcccgaggacttcgccacctactactgccagcagtacgacagctaccccatcaccttcggccagggcacccggctggaaatcaagctcgaggacctgaagaacgtgttcccacctgaggtggccgtgttcgagcctagcgaggccgagatcagccacacccagaaagccaccctcgtgtgcctggctaccggcttctaccccgaccatgtggaactgtcttggtgggtcaacggcaaagaggtgcacagcggcgtgtctaccgacccccagccactgaaagaacagcccgccctgaacgacagccggtactgcctgagcagcagactgagagtgtccgccaccttctggcagaacccccggaaccacttcagatgccaggtgcagttctacggcctgagcgagaacgacgagtggacccaggacagagccaagcccgtgacccagatcgtgtctgccgaagcctggggcagagccgattgcggatcccagagcttcggcctgctggaccccaagctgtgctacctgctggatggcatcctgttcatctacggcgtgatcctgaccgccctgttcctgagagtgaagttcagcagaagcgccgacgcccctgcctaccagcagggacagaaccaactgtacaacgagctgaacctgggcagacgggaagagtacgacgtgctggacaagcggagaggcagggaccctgagatgggcggaaagccccagcggagaaagaacccccaggaaggactgtataacgaactccagaaagacaagatggccgaagcctacagcgagatcggcatgaagggcgagcggagaagaggcaagggccacgatggcctgtaccagggcctgagcaccgccaccaaggacacctatgacgccctgcacatgcaggccctgcctccaagaagggccaagcgatctggatctggagcaacaaacttctcactactcaaacaagcaggtgacgtggaggagaatcccgggcctactagtatggactggatttggcgcatccttttccttgtcggcgctgctaccggcgcgcattccttcgaacaggtgcaactgcagcagtggggagccggactgctgaagcctagcgagacactgagcctgacctgcgccgtgtacggcggcagcttcagcgcctactattggagctggatcagacagccccctggcaagggcctggaatggatcggcgacatcaatcacggcggaggcaccaactacaaccccagcctgaagtcccgcgtgaccatctccgtggacaccagcaagaaccagttctccctgaagctgaacagcgtgacagccgccgacacagccgtgtactactgtgccagcctgaccgcctattggggccagggatctcttgtgaccgtgtccagcacgcgtatccagaaccctgatcctgccgtgtaccagctgcgggatagcaagagcagcgacaagagcgtgtgtctgttcaccgacttcgacagccagaccaacgtgtcccagagcaaggactccgacgtgtacatcaccgataagaccgtgctggacatgcggagcatggacttcaagagcaactccgccgtggcctggtccaacaagtccgatttcgcctgcgccaacgccttcaacaacagcattatccccgaggacacattcttcccaagccccgagagcagctgcggtacccagagttttgggttgttggaccctaaattgtgctatctgttggacggaatcctgttcatttacggagtgatcctgaccgcattgttcctgcgggttaagttttccagatccgcagacgcacccgcttaccaacaagggcagaaccaactctacaatgaacttaatttggggcggagggaagagtacgacgttctggacaaaaggaggggacgagatcccgagatgggcggaaagcctcagcgaaggaagaatccgcaagaggggctttataacgaactccagaaagataaaatggcagaagcctatagtgagattgggatgaagggagaaaggaggaggggtaaaggtcacgatgggttgtaccaaggattgagcacagccactaaagatacctatgatgcgctccacatgcaggccctgccgccaaga

SEQ ID NO: 2198 - DNA, 2859 bp, Artificial Sequence
  Synthetic Polynucloetide
atggccttaccagtgaccgccttgctcctgccgctggccttgctgctccacgccgccaggccggaagtgcagctggttgaatctggcggaggactggttcagcctggcggatctctgagactgtcttgtgccgccagcggcttcagcttcagcgacttttggatgagctgggtccgacaggcccctggcaaaggacttgaatgggtcgccacaatcagccaggccggcagcgagaaggactacgtggactctgtgaagggcagattcaccatcagccgggacaacgccaagaagtccctgtacctccagatgaacagcctgagagccgaggacaccgccgtgtactattgtgcctctggcgtgtacagcttcgactacagaggccagggcaccctggtcacagtctcttctggtaccggcggaggcggatctggcggcggaggtagcggtggcggaggatctgaattcgacgagatcgtgctgacccagagccctgatagcctggccgtgtctctgggcgagagagccaccatcaactgcaaggccagccagagcgtggacttcgacggcgacagctacctgaactggtatcagcagaagcccggccagccccccaaggtgctgatctatgccgccagcacactgcagagcggcgtgcccagcagattttctggcagcggctccggcaccgacttcaccctgaccatcaacagcctggaagccgaggacgccgccacctactactgccagcagagcaacgaggacccctggacctttggcggcggaacaaaggtggaaatcaagctcgaggacctgaagaacgtgttcccacctgaggtggccgtgttcgagcctagcgaggccgagatcagccacacccagaaagccaccctcgtgtgcctggctaccggcttctaccccgaccatgtggaactgtcttggtgggtcaacggcaaagaggtgcacagcggcgtgtctaccgacccccagccactgaaagaacagcccgccctgaacgacagccggtactgcctgagcagcagactgagagtgtccgccaccttctggcagaacccccggaaccacttcagatgccaggtgcagttctacggcctgagcgagaacgacgagtggacccaggacagagccaagcccgtgacccagatcgtgtctgccgaagcctggggcagagccgattgcggatcccagagcttcggcctgctggaccccaagctgtgctacctgctggatggcatcctgttcatctacggcgtgatcctgaccgccctgttcctgagagtgaagttcagcagaagcgccgacgcccctgcctaccagcagggacagaaccaactgtacaacgagctgaacctgggcagacgggaagagtacgacgtgctggacaagcggagaggcagggaccctgagatgggcggaaagccccagcggagaaagaacccccaggaaggactgtataacgaactccagaaagacaagatggccgaagcctacagcgagatcggcatgaagggcgagcggagaagaggcaagggccacgatggcctgtaccagggcctgagcaccgccaccaaggacacctatgacgccctgcacatgcaggccctgcctccaagaagggccaagcgatctggatctggagcaacaaacttctcactactcaaacaagcaggtgacgtggaggagaatcccgggcctactagtatggactggatttggcgcatccttttccttgtcggcgctgctaccggcgcgcattccttcgaacaggtgcaactggtgcagtccggcgctgaagtgaagaaacctggggccagcgtgaaggtgtcctgcaaggtgtccggctacacctttaccgactactacattacctgggtgcgccaggcccctggacaggccctggaatggatgggctggatctaccccggcagcggcaacaccaagtacagccagaagttccagggcagattcgtgttcagcgtggacaccagcgccagcaccgcctacctgcaactgtctagcctgaaggccgaagataccgccgtgtactactgcgccaactacggcaactattggttcgcctattggggccagggaacccttgtgaccgtgtcctctacgcgtatccagaaccctgatcctgccgtgtaccagctgcgggatagcaagagcagcgacaagagcgtgtgtctgttcaccgacttcgacagccagaccaacgtgtcccagagcaaggactccgacgtgtacatcaccgataagaccgtgctggacatgcggagcatggacttcaagagcaactccgccgtggcctggtccaacaagtccgatttcgcctgcgccaacgccttcaacaacagcattatccccgaggacacattcttcccaagccccgagagcagctgcggtacccagagttttgggttgttggaccctaaattgtgctatctgttggacggaatcctgttcatttacggagtgatcctgaccgcattgttcctgcgggttaagttttccagatccgcagacgcacccgcttaccaacaagggcagaaccaactctacaatgaacttaatttggggcggagggaagagtacgacgttctggacaaaaggaggggacgagatcccgagatgggcggaaagcctcagcgaaggaagaatccgcaagaggggctttataacgaactccagaaagataaaatggcagaagcctatagtgagattgggatgaagggagaaaggaggaggggtaaaggtcacgatgggttgtaccaaggattgagcacagccactaaagatacctatgatgcgctccacatgcaggccctgccgccaaga

SEQ ID NO: 2199 - DNA, 2850 bp, Artificial Sequence
  Synthetic Polynucloetide
atggccttaccagtgaccgccttgctcctgccgctggccttgctgctccacgccgccaggccggaagtgcagctggttgaatctggcggaggactggttcagcctggcggatctctgagactgtcttgtgccgccagcggcttcagcttcagcgacttttggatgagctgggtccgacaggcccctggcaaaggacttgaatgggtcgccacaatcagccaggccggcagcgagaaggactacgtggactctgtgaagggcagattcaccatcagccgggacaacgccaagaagtccctgtacctccagatgaacagcctgagagccgaggacaccgccgtgtactattgtgcctctggcgtgtacagcttcgactacagaggccagggcaccctggtcacagtctcttctggtaccggcggaggcggatctggcggcggaggtagcggtggcggaggatctgaattcgacatccagatgacccagagccccagcagcctgtctgccagcgtgggcgacagagtgaccatcacctgtagagccagccagggcatcagctcttggctggcctggtatcagcagaagcccgagaaggcccccaagagcctgatctacgccgcctctagtctccagagcggcgtgcccagcagattttctggcagcggctccggcaccgacttcaccctgacaatcagctccctccagcccgaggacttcgccacctactactgccagcagtacaacagctaccctcccacctttggcggaggcaccaaggtggaaatcaagctcgaggacctgaagaacgtgttcccacctgaggtggccgtgttcgagcctagcgaggccgagatcagccacacccagaaagccaccctcgtgtgcctggctaccggcttctaccccgaccatgtggaactgtcttggtgggtcaacggcaaagaggtgcacagcggcgtgtctaccgacccccagccactgaaagaacagcccgccctgaacgacagccggtactgcctgagcagcagactgagagtgtccgccaccttctggcagaacccccggaaccacttcagatgccaggtgcagttctacggcctgagcgagaacgacgagtggacccaggacagagccaagcccgtgacccagatcgtgtctgccgaagcctggggcagagccgattgcggatcccagagcttcggcctgctggaccccaagctgtgctacctgctggatggcatcctgttcatctacggcgtgatcctgaccgccctgttcctgagagtgaagttcagcagaagcgccgacgcccctgcctaccagcagggacagaaccaactgtacaacgagctgaacctgggcagacgggaagagtacgacgtgctggacaagcggagaggcagggaccctgagatgggcggaaagccccagcggagaaagaacccccaggaaggactgtataacgaactccagaaagacaagatggccgaagcctacagcgagatcggcatgaagggcgagcggagaagaggcaagggccacgatggcctgtaccagggcctgagcaccgccaccaaggacacctatgacgccctgcacatgcaggccctgcctccaagaagggccaagcgatctggatctggagcaacaaacttctcactactcaaacaagcaggtgacgtggaggagaatcccgggcctactagtatggactggatttggcgcatccttttccttgtcggcgctgctaccggcgcgcattccttcgaagaagtgcaactggtgcagtctggcggagggctggtgcatcctgggggaagcctgagactgagctgtgccggctctggcttcgccttcagcagcagcaccatgcactggatcagacaggcccctggcaagggcctggaatggatcagcctgatcggaagcggagggggcatctactacggcgacagcgtgaagggccggttcaccatcagccgggacaacgccaagaacagcctgtacctccagatgaactccctgcgggccgaggacatggccgtgtactattgtgtgcggggctacttcgactgggtggactacttcgattactggggccagggcaccctcgtgaccgtgtcatctacgcgtatccagaaccctgatcctgccgtgtaccagctgcgggatagcaagagcagcgacaagagcgtgtgtctgttcaccgacttcgacagccagaccaacgtgtcccagagcaaggactccgacgtgtacatcaccgataagaccgtgctggacatgcggagcatggacttcaagagcaactccgccgtggcctggtccaacaagtccgatttcgcctgcgccaacgccttcaacaacagcattatccccgaggacacattcttcccaagccccgagagcagctgcggtacccagagttttgggttgttggaccctaaattgtgctatctgttggacggaatcctgttcatttacggagtgatcctgaccgcattgttcctgcgggttaagttttccagatccgcagacgcacccgcttaccaacaagggcagaaccaactctacaatgaacttaatttggggcggagggaagagtacgacgttctggacaaaaggaggggacgagatcccgagatgggcggaaagcctcagcgaaggaagaatccgcaagaggggctttataacgaactccagaaagataaaatggcagaagcctatagtgagattgggatgaagggagaaaggaggaggggtaaaggtcacgatgggttgtaccaaggattgagcacagccactaaagatacctatgatgcgctccacatgcaggccctgccgccaaga

SEQ ID NO: 2200 - DNA, 2880 bp, Artificial Sequence
  Synthetic Polynucloetide
atggccttaccagtgaccgccttgctcctgccgctggccttgctgctccacgccgccaggccggaagtgcagctggttgaatctggcggaggactggttcagcctggcggatctctgagactgtcttgtgccgccagcggcttcagcttcagcgacttttggatgagctgggtccgacaggcccctggcaaaggacttgaatgggtcgccacaatcagccaggccggcagcgagaaggactacgtggactctgtgaagggcagattcaccatcagccgggacaacgccaagaagtccctgtacctccagatgaacagcctgagagccgaggacaccgccgtgtactattgtgcctctggcgtgtacagcttcgactacagaggccagggcaccctggtcacagtctcttctggtaccggcggaggcggatctggcggcggaggtagcggtggcggaggatctgaattcgacgacatcgtgatgacacagtcaccagatagcctcaccgtctccctgggggagcggaccaccattaattgtaaatccagccaaagcgtgctggactcaagcaagaacaagaatagcctcgcctggtatcagcagaagcccggtcagcctccaaagctgctgctttcttgggcctccaccagagagtccgggattcctgataggtttagtggttcaggctccggcacagattttactctgaccattgattctctccagccagaggattctgcaacttattactgccagcaaagcgcccactttcctataacttttggccagggaacccgacttgaaatcaagctcgaggacctgaagaacgtgttcccacctgaggtggccgtgttcgagcctagcgaggccgagatcagccacacccagaaagccaccctcgtgtgcctggctaccggcttctaccccgaccatgtggaactgtcttggtgggtcaacggcaaagaggtgcacagcggcgtgtctaccgacccccagccactgaaagaacagcccgccctgaacgacagccggtactgcctgagcagcagactgagagtgtccgccaccttctggcagaacccccggaaccacttcagatgccaggtgcagttctacggcctgagcgagaacgacgagtggacccaggacagagccaagcccgtgacccagatcgtgtctgccgaagcctggggcagagccgattgcggatcccagagcttcggcctgctggaccccaagctgtgctacctgctggatggcatcctgttcatctacggcgtgatcctgaccgccctgttcctgagagtgaagttcagcagaagcgccgacgcccctgcctaccagcagggacagaaccaactgtacaacgagctgaacctgggcagacgggaagagtacgacgtgctggacaagcggagaggcagggaccctgagatgggcggaaagccccagcggagaaagaacccccaggaaggactgtataacgaactccagaaagacaagatggccgaagcctacagcgagatcggcatgaagggcgagcggagaagaggcaagggccacgatggcctgtaccagggcctgagcaccgccaccaaggacacctatgacgccctgcacatgcaggccctgcctccaagaagggccaagcgatctggatctggagcaacaaacttctcactactcaaacaagcaggtgacgtggaggagaatcccgggcctactagtatggactggatttggcgcatccttttccttgtcggcgctgctaccggcgcgcattccttcgaacaggtgcagctggtgcagagcggtgccgaagtgaagaaaccaggtgcatccgttaaagtttcatgtaaggctagtggatataccttcaccaattacggaatgaactgggtgaaacaggcccctggccagggactgaagtggatggggtggattaacacctacaccggggagccgacttatgcagacgactttaaggggcgggtcacgatgacctccgacacctccaccagtaccgcctacctggagctgcacaaccttaggtcagacgataccgccgtgtattactgtgcccgatggtcttggtccgacggatactatgtctacttcgactattggggccaggggaccacagttaccgtgtcctctacgcgtatccagaaccctgatcctgccgtgtaccagctgcgggatagcaagagcagcgacaagagcgtgtgtctgttcaccgacttcgacagccagaccaacgtgtcccagagcaaggactccgacgtgtacatcaccgataagaccgtgctggacatgcggagcatggacttcaagagcaactccgccgtggcctggtccaacaagtccgatttcgcctgcgccaacgccttcaacaacagcattatccccgaggacacattcttcccaagccccgagagcagctgcggtacccagagttttgggttgttggaccctaaattgtgctatctgttggacggaatcctgttcatttacggagtgatcctgaccgcattgttcctgcgggttaagttttccagatccgcagacgcacccgcttaccaacaagggcagaaccaactctacaatgaacttaatttggggcggagggaagagtacgacgttctggacaaaaggaggggacgagatcccgagatgggcggaaagcctcagcgaaggaagaatccgcaagaggggctttataacgaactccagaaagataaaatggcagaagcctatagtgagattgggatgaagggagaaaggaggaggggtaaaggtcacgatgggttgtaccaaggattgagcacagccactaaagatacctatgatgcgctccacatgcaggccctgccgccaaga

SEQ ID NO: 2201 - DNA, 2868 bp, Artificial Sequence
  Synthetic Polynucloetide
atggccttaccagtgaccgccttgctcctgccgctggccttgctgctccacgccgccaggccggaagtgcagctggttgaatctggcggaggactggttcagcctggcggatctctgagactgtcttgtgccgccagcggcttcagcttcagcgacttttggatgagctgggtccgacaggcccctggcaaaggacttgaatgggtcgccacaatcagccaggccggcagcgagaaggactacgtggactctgtgaagggcagattcaccatcagccgggacaacgccaagaagtccctgtacctccagatgaacagcctgagagccgaggacaccgccgtgtactattgtgcctctggcgtgtacagcttcgactacagaggccagggcaccctggtcacagtctcttctggtaccggcggaggcggatctggcggcggaggtagcggtggcggaggatctgaattcgacgagatcgtgctgacacagagccctggaagcctggccgtgtctcctggcgagcgcgtgacaatgagctgcaagagcagccagagcgtgttcttcagcagctcccagaagaactacctggcctggtatcagcagatccccggccagagccccagactgctgatctactgggccagcaccagagaaagcggcgtgcccgatagattcaccggcagcggctctggcaccgacttcaccctgacaatcagcagcgtgcagcccgaggacctggctatctactactgccaccagtacctgagcagccggaccttcggccagggcaccaagctggaaatcaagagactcgaggacctgaagaacgtgttcccacctgaggtggccgtgttcgagcctagcgaggccgagatcagccacacccagaaagccaccctcgtgtgcctggctaccggcttctaccccgaccatgtggaactgtcttggtgggtcaacggcaaagaggtgcacagcggcgtgtctaccgacccccagccactgaaagaacagcccgccctgaacgacagccggtactgcctgagcagcagactgagagtgtccgccaccttctggcagaacccccggaaccacttcagatgccaggtgcagttctacggcctgagcgagaacgacgagtggacccaggacagagccaagcccgtgacccagatcgtgtctgccgaagcctggggcagagccgattgcggatcccagagcttcggcctgctggaccccaagctgtgctacctgctggatggcatcctgttcatctacggcgtgatcctgaccgccctgttcctgagagtgaagttcagcagaagcgccgacgcccctgcctaccagcagggacagaaccaactgtacaacgagctgaacctgggcagacgggaagagtacgacgtgctggacaagcggagaggcagggaccctgagatgggcggaaagccccagcggagaaagaacccccaggaaggactgtataacgaactccagaaagacaagatggccgaagcctacagcgagatcggcatgaagggcgagcggagaagaggcaagggccacgatggcctgtaccagggcctgagcaccgccaccaaggacacctatgacgccctgcacatgcaggccctgcctccaagaagggccaagcgatctggatctggagcaacaaacttctcactactcaaacaagcaggtgacgtggaggagaatcccgggcctactagtatggactggatttggcgcatccttttccttgtcggcgctgctaccggcgcgcattccttcgaacaggtgcaactgcagcagcctggcgctgaggtcgtgaagccaggcgcttccgtgaagatgtcctgcaaggccagcggctacaccttcaccagctactacatccactggatcaagcagacccctggacagggcctggaatgggtgggagtgatctaccccggcaacgacgacatcagctacaaccagaagttccagggcaaggccaccctgaccgccgacaagtctagcaccaccgcctacatgcaactgtccagcctgaccagcgaggacagcgccgtgtactactgcgccagagaagtgcggctgcggtacttcgatgtgtggggccagggaaccaccgtgaccgtgtcatctacgcgtatccagaaccctgatcctgccgtgtaccagctgcgggatagcaagagcagcgacaagagcgtgtgtctgttcaccgacttcgacagccagaccaacgtgtcccagagcaaggactccgacgtgtacatcaccgataagaccgtgctggacatgcggagcatggacttcaagagcaactccgccgtggcctggtccaacaagtccgatttcgcctgcgccaacgccttcaacaacagcattatccccgaggacacattcttcccaagccccgagagcagctgcggtacccagagttttgggttgttggaccctaaattgtgctatctgttggacggaatcctgttcatttacggagtgatcctgaccgcattgttcctgcgggttaagttttccagatccgcagacgcacccgcttaccaacaagggcagaaccaactctacaatgaacttaatttggggcggagggaagagtacgacgttctggacaaaaggaggggacgagatcccgagatgggcggaaagcctcagcgaaggaagaatccgcaagaggggctttataacgaactccagaaagataaaatggcagaagcctatagtgagattgggatgaagggagaaaggaggaggggtaaaggtcacgatgggttgtaccaaggattgagcacagccactaaagatacctatgatgcgctccacatgcaggccctgccgccaaga

SEQ ID NO: 2202 - DNA, 2880 bp, Artificial Sequence
  Synthetic Polynucloetide
atggccttaccagtgaccgccttgctcctgccgctggccttgctgctccacgccgccaggccggaagtgcagctggttgaatctggcggaggactggttcagcctggcggatctctgagactgtcttgtgccgccagcggcttcagcttcagcgacttttggatgagctgggtccgacaggcccctggcaaaggacttgaatgggtcgccacaatcagccaggccggcagcgagaaggactacgtggactctgtgaagggcagattcaccatcagccgggacaacgccaagaagtccctgtacctccagatgaacagcctgagagccgaggacaccgccgtgtactattgtgcctctggcgtgtacagcttcgactacagaggccagggcaccctggtcacagtctcttctggtaccggcggaggcggatctggcggcggaggtagcggtggcggaggatctgaattcgatgtgctgctgacccagagccctctgagcctgcctgtgacactgggacagcctgccagcatctcctgtcggagcagccagaccatcgtgcacagcaacggcaacacctacctggaatggttccagcagcggccaggccagagccccagactgctgatctaccaggtgtccaacagattcagcggcgtgcccgacagattctccggcagcggctctggcaccgacttcaccctgaagatcagccgggtggaagccgaggacgtgggcgtgtactactgttttcaaggcagccacgtgccccggacctttggcggaggaacaaaggtggaaatcaagagagccctcgaggacctgaagaacgtgttcccacctgaggtggccgtgttcgagcctagcgaggccgagatcagccacacccagaaagccaccctcgtgtgcctggctaccggcttctaccccgaccatgtggaactgtcttggtgggtcaacggcaaagaggtgcacagcggcgtgtctaccgacccccagccactgaaagaacagcccgccctgaacgacagccggtactgcctgagcagcagactgagagtgtccgccaccttctggcagaacccccggaaccacttcagatgccaggtgcagttctacggcctgagcgagaacgacgagtggacccaggacagagccaagcccgtgacccagatcgtgtctgccgaagcctggggcagagccgattgcggatcccagagcttcggcctgctggaccccaagctgtgctacctgctggatggcatcctgttcatctacggcgtgatcctgaccgccctgttcctgagagtgaagttcagcagaagcgccgacgcccctgcctaccagcagggacagaaccaactgtacaacgagctgaacctgggcagacgggaagagtacgacgtgctggacaagcggagaggcagggaccctgagatgggcggaaagccccagcggagaaagaacccccaggaaggactgtataacgaactccagaaagacaagatggccgaagcctacagcgagatcggcatgaagggcgagcggagaagaggcaagggccacgatggcctgtaccagggcctgagcaccgccaccaaggacacctatgacgccctgcacatgcaggccctgcctccaagaagggccaagcgatctggatctggagcaacaaacttctcactactcaaacaagcaggtgacgtggaggagaatcccgggcctactagtatggactggatttggcgcatccttttccttgtcggcgctgctaccggcgcgcattccttcgaacagatccaactggtgcagagcggcagcgagctgaagaaacctggggccagcgtgaaggtgtcctgcaaggccagcggctacacctttaccaactacggcatgaactgggtgcgccaggcccctggacagggcctgaaatggatgggctggatcaacaccaacaccggcgagcctaagtacgccgaagagttcaagggcagattcgccctgagcctggacaccagcgtgtccacagcctacctccagatcaacagcctgaaggccgaggataccgccgtgtacttctgcgccagaggctacggcaactacgccagaggggcttggctggcctattggggccagggaacactcgtgaccgtgtcctctacgcgtatccagaaccctgatcctgccgtgtaccagctgcgggatagcaagagcagcgacaagagcgtgtgtctgttcaccgacttcgacagccagaccaacgtgtcccagagcaaggactccgacgtgtacatcaccgataagaccgtgctggacatgcggagcatggacttcaagagcaactccgccgtggcctggtccaacaagtccgatttcgcctgcgccaacgccttcaacaacagcattatccccgaggacacattcttcccaagccccgagagcagctgcggtacccagagttttgggttgttggaccctaaattgtgctatctgttggacggaatcctgttcatttacggagtgatcctgaccgcattgttcctgcgggttaagttttccagatccgcagacgcacccgcttaccaacaagggcagaaccaactctacaatgaacttaatttggggcggagggaagagtacgacgttctggacaaaaggaggggacgagatcccgagatgggcggaaagcctcagcgaaggaagaatccgcaagaggggctttataacgaactccagaaagataaaatggcagaagcctatagtgagattgggatgaagggagaaaggaggaggggtaaaggtcacgatgggttgtaccaaggattgagcacagccactaaagatacctatgatgcgctccacatgcaggccctgccgccaaga

SEQ ID NO: 2203 - DNA, 2835 bp, Artificial Sequence
  Synthetic Polynucloetide
atggccttaccagtgaccgccttgctcctgccgctggccttgctgctccacgccgccaggccggaagtgcagctggttgaatctggcggaggactggttcagcctggcggatctctgagactgtcttgtgccgccagcggcttcagcttcagcgacttttggatgagctgggtccgacaggcccctggcaaaggacttgaatgggtcgccacaatcagccaggccggcagcgagaaggactacgtggactctgtgaagggcagattcaccatcagccgggacaacgccaagaagtccctgtacctccagatgaacagcctgagagccgaggacaccgccgtgtactattgtgcctctggcgtgtacagcttcgactacagaggccagggcaccctggtcacagtctcttctggtaccggcggaggcggatctggcggcggaggtagcggtggcggaggatctgaattcgacgagatcgtgctgacacagagccctgccacactctctctgagccctggcgaaagagccaccctgagctgtagcgccagcagcagcatcaactacatctactggctccagcagaagcccggccaggcccccagaatcctgatctacctgaccagcaacctggcctccggcgtgccagccagattttctggcagcggctccggcaccgacttcaccctgacaatcagcagcctggaacccgaggacttcgccgtgtactactgcctccagtggtccagcaaccccctgacctttggcggaggcaccaaggtggaaatcaagctcgaggacctgaagaacgtgttcccacctgaggtggccgtgttcgagcctagcgaggccgagatcagccacacccagaaagccaccctcgtgtgcctggctaccggcttctaccccgaccatgtggaactgtcttggtgggtcaacggcaaagaggtgcacagcggcgtgtctaccgacccccagccactgaaagaacagcccgccctgaacgacagccggtactgcctgagcagcagactgagagtgtccgccaccttctggcagaacccccggaaccacttcagatgccaggtgcagttctacggcctgagcgagaacgacgagtggacccaggacagagccaagcccgtgacccagatcgtgtctgccgaagcctggggcagagccgattgcggatcccagagcttcggcctgctggaccccaagctgtgctacctgctggatggcatcctgttcatctacggcgtgatcctgaccgccctgttcctgagagtgaagttcagcagaagcgccgacgcccctgcctaccagcagggacagaaccaactgtacaacgagctgaacctgggcagacgggaagagtacgacgtgctggacaagcggagaggcagggaccctgagatgggcggaaagccccagcggagaaagaacccccaggaaggactgtataacgaactccagaaagacaagatggccgaagcctacagcgagatcggcatgaagggcgagcggagaagaggcaagggccacgatggcctgtaccagggcctgagcaccgccaccaaggacacctatgacgccctgcacatgcaggccctgcctccaagaagggccaagcgatctggatctggagcaacaaacttctcactactcaaacaagcaggtgacgtggaggagaatcccgggcctactagtatggactggatttggcgcatccttttccttgtcggcgctgctaccggcgcgcattccttcgaagaagtgcaactggtggaaagcgggggaggacttgtgaagcctggcggctctctgagactgagctgtgccgcctctggcttcaccttcagcagctacgacatgagctgggtgcgccaggctcctggcaagggactggaatgggtgtccaccatcagcagcggcggcagctacacctactacctggacagcatcaagggccggttcaccatctccagagacaacgccaagaacagcctgtacctccagatgaactccctgcgggccgaggacacagccgtgtattattgcgccagacagggcctggattactggggcagaggcacccttgtgaccgtgtcctctacgcgtatccagaaccctgatcctgccgtgtaccagctgcgggatagcaagagcagcgacaagagcgtgtgtctgttcaccgacttcgacagccagaccaacgtgtcccagagcaaggactccgacgtgtacatcaccgataagaccgtgctggacatgcggagcatggacttcaagagcaactccgccgtggcctggtccaacaagtccgatttcgcctgcgccaacgccttcaacaacagcattatccccgaggacacattcttcccaagccccgagagcagctgcggtacccagagttttgggttgttggaccctaaattgtgctatctgttggacggaatcctgttcatttacggagtgatcctgaccgcattgttcctgcgggttaagttttccagatccgcagacgcacccgcttaccaacaagggcagaaccaactctacaatgaacttaatttggggcggagggaagagtacgacgttctggacaaaaggaggggacgagatcccgagatgggcggaaagcctcagcgaaggaagaatccgcaagaggggctttataacgaactccagaaagataaaatggcagaagcctatagtgagattgggatgaagggagaaaggaggaggggtaaaggtcacgatgggttgtaccaaggattgagcacagccactaaagatacctatgatgcgctccacatgcaggccctgccgccaaga

SEQ ID NO: 2204 - DNA, 2862 bp, Artificial Sequence
  Synthetic Polynucloetide
atggccttaccagtgaccgccttgctcctgccgctggccttgctgctccacgccgccaggccggaagtgcagctggttgaatctggcggaggactggttcagcctggcggatctctgagactgtcttgtgccgccagcggcttcagcttcagcgacttttggatgagctgggtccgacaggcccctggcaaaggacttgaatgggtcgccacaatcagccaggccggcagcgagaaggactacgtggactctgtgaagggcagattcaccatcagccgggacaacgccaagaagtccctgtacctccagatgaacagcctgagagccgaggacaccgccgtgtactattgtgcctctggcgtgtacagcttcgactacagaggccagggcaccctggtcacagtctcttctggtaccggcggaggcggatctggcggcggaggtagcggtggcggaggatctgaattcgacatcgtgatgacccagagccccgatagcctggccgtgtctctgggagagagagccaccatcaactgccgggccagcaagagcgtgtccaccagcggctacagcttcatgcactggtatcagcagaagcccggccagccccccaagctgctgatctacctggcctccaacctggaaagcggcgtgcccgatagattcagcggcagcggctctggcaccgacttcaccctgaccatcagttctcttcaggccgaggacgtggccgtgtactactgccagcacagcagagaggtgccctggacattcggccagggcacaaaggtggaaatcaagcggctcgaggacctgaagaacgtgttcccacctgaggtggccgtgttcgagcctagcgaggccgagatcagccacacccagaaagccaccctcgtgtgcctggctaccggcttctaccccgaccatgtggaactgtcttggtgggtcaacggcaaagaggtgcacagcggcgtgtctaccgacccccagccactgaaagaacagcccgccctgaacgacagccggtactgcctgagcagcagactgagagtgtccgccaccttctggcagaacccccggaaccacttcagatgccaggtgcagttctacggcctgagcgagaacgacgagtggacccaggacagagccaagcccgtgacccagatcgtgtctgccgaagcctggggcagagccgattgcggatcccagagcttcggcctgctggaccccaagctgtgctacctgctggatggcatcctgttcatctacggcgtgatcctgaccgccctgttcctgagagtgaagttcagcagaagcgccgacgcccctgcctaccagcagggacagaaccaactgtacaacgagctgaacctgggcagacgggaagagtacgacgtgctggacaagcggagaggcagggaccctgagatgggcggaaagccccagcggagaaagaacccccaggaaggactgtataacgaactccagaaagacaagatggccgaagcctacagcgagatcggcatgaagggcgagcggagaagaggcaagggccacgatggcctgtaccagggcctgagcaccgccaccaaggacacctatgacgccctgcacatgcaggccctgcctccaagaagggccaagcgatctggatctggagcaacaaacttctcactactcaaacaagcaggtgacgtggaggagaatcccgggcctactagtatggactggatttggcgcatccttttccttgtcggcgctgctaccggcgcgcattccttcgaacaggtgcagctggtgcagtctggggccgaagtgaagaaacctggggccagcgtgaaggtgtcctgcaaggccagcggatacacctttaccaactacggcatgaactgggtgcgccaggcccctggacagggcctggaatggatgggctggatcaacacctacaccggcgagcccacatacgccgacgccttcaagggcagattcgccttcagcctggacaccagcacctccaccgcctacctccagatcaacagcctgcggagcgacgacaccgccgtgtattattgcgccagagattacggcgactacgggatggactattggggccagggaaccaccgtgaccgtgtcctctacgcgtatccagaaccctgatcctgccgtgtaccagctgcgggatagcaagagcagcgacaagagcgtgtgtctgttcaccgacttcgacagccagaccaacgtgtcccagagcaaggactccgacgtgtacatcaccgataagaccgtgctggacatgcggagcatggacttcaagagcaactccgccgtggcctggtccaacaagtccgatttcgcctgcgccaacgccttcaacaacagcattatccccgaggacacattcttcccaagccccgagagcagctgcggtacccagagttttgggttgttggaccctaaattgtgctatctgttggacggaatcctgttcatttacggagtgatcctgaccgcattgttcctgcgggttaagttttccagatccgcagacgcacccgcttaccaacaagggcagaaccaactctacaatgaacttaatttggggcggagggaagagtacgacgttctggacaaaaggaggggacgagatcccgagatgggcggaaagcctcagcgaaggaagaatccgcaagaggggctttataacgaactccagaaagataaaatggcagaagcctatagtgagattgggatgaagggagaaaggaggaggggtaaaggtcacgatgggttgtaccaaggattgagcacagccactaaagatacctatgatgcgctccacatgcaggccctgccgccaaga

SEQ ID NO: 2205 - DNA, 2850 bp, Artificial Sequence
  Synthetic Polynucloetide
atggccttaccagtgaccgccttgctcctgccgctggccttgctgctccacgccgccaggccggaagtgcagctggttgaatctggcggaggactggttcagcctggcggatctctgagactgtcttgtgccgccagcggcttcagcttcagcgacttttggatgagctgggtccgacaggcccctggcaaaggacttgaatgggtcgccacaatcagccaggccggcagcgagaaggactacgtggactctgtgaagggcagattcaccatcagccgggacaacgccaagaagtccctgtacctccagatgaacagcctgagagccgaggacaccgccgtgtactattgtgcctctggcgtgtacagcttcgactacagaggccagggcaccctggtcacagtctcttctggtaccggcggaggcggatctggcggcggaggtagcggtggcggaggatctgaattcgacatcgtgatgacccagacccccctgaccctgagcgtgacaatcggacagcctgccagcatctcctgcaagagcagccagagcctgctggacagcgacggcaagacctacctgaactggctgctgcagaggccaggccagagccccgagagactgatctacctggtgtccaagctggactccggcgtgcccgatagattcacaggcagcggctccggcaccgacttcaccctgaagatcagccgggtggaagccgaggacctgggcgtgtactgttgttggcagggcacccacttcccttacaccttcggcggagggaccaaggtggaaatcaagggcctcgaggacctgaagaacgtgttcccacctgaggtggccgtgttcgagcctagcgaggccgagatcagccacacccagaaagccaccctcgtgtgcctggctaccggcttctaccccgaccatgtggaactgtcttggtgggtcaacggcaaagaggtgcacagcggcgtgtctaccgacccccagccactgaaagaacagcccgccctgaacgacagccggtactgcctgagcagcagactgagagtgtccgccaccttctggcagaacccccggaaccacttcagatgccaggtgcagttctacggcctgagcgagaacgacgagtggacccaggacagagccaagcccgtgacccagatcgtgtctgccgaagcctggggcagagccgattgcggatcccagagcttcggcctgctggaccccaagctgtgctacctgctggatggcatcctgttcatctacggcgtgatcctgaccgccctgttcctgagagtgaagttcagcagaagcgccgacgcccctgcctaccagcagggacagaaccaactgtacaacgagctgaacctgggcagacgggaagagtacgacgtgctggacaagcggagaggcagggaccctgagatgggcggaaagccccagcggagaaagaacccccaggaaggactgtataacgaactccagaaagacaagatggccgaagcctacagcgagatcggcatgaagggcgagcggagaagaggcaagggccacgatggcctgtaccagggcctgagcaccgccaccaaggacacctatgacgccctgcacatgcaggccctgcctccaagaagggccaagcgatctggatctggagcaacaaacttctcactactcaaacaagcaggtgacgtggaggagaatcccgggcctactagtatggactggatttggcgcatccttttccttgtcggcgctgctaccggcgcgcattccttcgaacaggtgcaactgcagcagcctggcgctgaacttgtgcggccaggcgcctctgtgaagctgagctgtaaagccagcggctacaccttcaccagctactggatgaactgggtcaagcagcgcccaggccagggcctggaatggatcggaatgatcgaccccagcgacagcgagacacactacaaccacatcttcaaggacaaggccaccctgaccgtggacaagtccagcagcacagcctacctgcaactgtccagcctgaccagcgaggacagcgccgtgtactactgcgcccggaacctgtatctgtggggccagggaacaagcgtgaccgtgtctagcacgcgtatccagaaccctgatcctgccgtgtaccagctgcgggatagcaagagcagcgacaagagcgtgtgtctgttcaccgacttcgacagccagaccaacgtgtcccagagcaaggactccgacgtgtacatcaccgataagaccgtgctggacatgcggagcatggacttcaagagcaactccgccgtggcctggtccaacaagtccgatttcgcctgcgccaacgccttcaacaacagcattatccccgaggacacattcttcccaagccccgagagcagctgcggtacccagagttttgggttgttggaccctaaattgtgctatctgttggacggaatcctgttcatttacggagtgatcctgaccgcattgttcctgcgggttaagttttccagatccgcagacgcacccgcttaccaacaagggcagaaccaactctacaatgaacttaatttggggcggagggaagagtacgacgttctggacaaaaggaggggacgagatcccgagatgggcggaaagcctcagcgaaggaagaatccgcaagaggggctttataacgaactccagaaagataaaatggcagaagcctatagtgagattgggatgaagggagaaaggaggaggggtaaaggtcacgatgggttgtaccaaggattgagcacagccactaaagatacctatgatgcgctccacatgcaggccctgccgccaaga

SEQ ID NO: 2206 - DNA, 2874 bp, Artificial Sequence
  Synthetic Polynucloetide
atggccttaccagtgaccgccttgctcctgccgctggccttgctgctccacgccgccaggccggaagtgcagctggttgaatctggcggaggactggttcagcctggcggatctctgagactgtcttgtgccgccagcggcttcagcttcagcgacttttggatgagctgggtccgacaggcccctggcaaaggacttgaatgggtcgccacaatcagccaggccggcagcgagaaggactacgtggactctgtgaagggcagattcaccatcagccgggacaacgccaagaagtccctgtacctccagatgaacagcctgagagccgaggacaccgccgtgtactattgtgcctctggcgtgtacagcttcgactacagaggccagggcaccctggtcacagtctcttctggtaccggcggaggcggatctggcggcggaggtagcggtggcggaggatctgaattcgacatcgtgatgacccagagccccgatagcctggccgtgtctctgggagagagagccaccatcaactgcgagagcagccagagcctgctgaacagcggcaaccagaagaactacctgacctggtatcagcagaagcccggccagccccccaagcccctgatctattgggccagcaccagagaaagcggcgtgcccgatagattcagcggcagcggaagcggcaccgacttcaccctgaccatcagttctcttcaggccgaggacgtggccgtgtactactgccagaacgactacagctacccctacaccttcggccagggcaccaagctggaaatcaagagactcgaggacctgaagaacgtgttcccacctgaggtggccgtgttcgagcctagcgaggccgagatcagccacacccagaaagccaccctcgtgtgcctggctaccggcttctaccccgaccatgtggaactgtcttggtgggtcaacggcaaagaggtgcacagcggcgtgtctaccgacccccagccactgaaagaacagcccgccctgaacgacagccggtactgcctgagcagcagactgagagtgtccgccaccttctggcagaacccccggaaccacttcagatgccaggtgcagttctacggcctgagcgagaacgacgagtggacccaggacagagccaagcccgtgacccagatcgtgtctgccgaagcctggggcagagccgattgcggatcccagagcttcggcctgctggaccccaagctgtgctacctgctggatggcatcctgttcatctacggcgtgatcctgaccgccctgttcctgagagtgaagttcagcagaagcgccgacgcccctgcctaccagcagggacagaaccaactgtacaacgagctgaacctgggcagacgggaagagtacgacgtgctggacaagcggagaggcagggaccctgagatgggcggaaagccccagcggagaaagaacccccaggaaggactgtataacgaactccagaaagacaagatggccgaagcctacagcgagatcggcatgaagggcgagcggagaagaggcaagggccacgatggcctgtaccagggcctgagcaccgccaccaaggacacctatgacgccctgcacatgcaggccctgcctccaagaagggccaagcgatctggatctggagcaacaaacttctcactactcaaacaagcaggtgacgtggaggagaatcccgggcctactagtatggactggatttggcgcatccttttccttgtcggcgctgctaccggcgcgcattccttcgaagaagtgcagctggtgcagtctggggccgaagtgaagaagcctggcgagagcctgaagatcagctgcaagggcagcggctacagcttcaccgactactacatgaagtgggccagacagatgcccggcaagggcctggaatggatgggcgacatcatccccagcaacggggccaccttctacaaccagaaattcaagggccaagtgaccatctccgccgacaagagcatcagcaccacctacctccagtggtccagcctgaaggccagcgacaccgccatgtactattgcgccagaagccatctgctgcgggccagttggttcgcctattggggccagggaacaatggtcacagtgtccagcacgcgtatccagaaccctgatcctgccgtgtaccagctgcgggatagcaagagcagcgacaagagcgtgtgtctgttcaccgacttcgacagccagaccaacgtgtcccagagcaaggactccgacgtgtacatcaccgataagaccgtgctggacatgcggagcatggacttcaagagcaactccgccgtggcctggtccaacaagtccgatttcgcctgcgccaacgccttcaacaacagcattatccccgaggacacattcttcccaagccccgagagcagctgcggtacccagagttttgggttgttggaccctaaattgtgctatctgttggacggaatcctgttcatttacggagtgatcctgaccgcattgttcctgcgggttaagttttccagatccgcagacgcacccgcttaccaacaagggcagaaccaactctacaatgaacttaatttggggcggagggaagagtacgacgttctggacaaaaggaggggacgagatcccgagatgggcggaaagcctcagcgaaggaagaatccgcaagaggggctttataacgaactccagaaagataaaatggcagaagcctatagtgagattgggatgaagggagaaaggaggaggggtaaaggtcacgatgggttgtaccaaggattgagcacagccactaaagatacctatgatgcgctccacatgcaggccctgccgccaaga

SEQ ID NO: 2207 - DNA, 2859 bp, Artificial Sequence
  Synthetic Polynucloetide
atggccttaccagtgaccgccttgctcctgccgctggccttgctgctccacgccgccaggccggaagtgcagctggttgaatctggcggaggactggttcagcctggcggatctctgagactgtcttgtgccgccagcggcttcagcttcagcgacttttggatgagctgggtccgacaggcccctggcaaaggacttgaatgggtcgccacaatcagccaggccggcagcgagaaggactacgtggactctgtgaagggcagattcaccatcagccgggacaacgccaagaagtccctgtacctccagatgaacagcctgagagccgaggacaccgccgtgtactattgtgcctctggcgtgtacagcttcgactacagaggccagggcaccctggtcacagtctcttctggtaccggcggaggcggatctggcggcggaggtagcggtggcggaggatctgaattcgacatccagatgacccagtctaccagttccctgagtgcatccctcggagacagggtgacgatcagttgcagcgcaagccaagggatcaataactatctgaactggtatcagcagaaaccggacggaacagtcgaactcctgatttattacaccagcacccttcagagtggcgtcccttcccggttcagtggctccggaagcgggaccgattactccctgaccatttctaatctggagccagaggacataggaacgtattattgccagcagtatagtaaactgccacgaacttttggaggggggacgaaactggagatcaaactcgaggacctgaagaacgtgttcccacctgaggtggccgtgttcgagcctagcgaggccgagatcagccacacccagaaagccaccctcgtgtgcctggctaccggcttctaccccgaccatgtggaactgtcttggtgggtcaacggcaaagaggtgcacagcggcgtgtctaccgacccccagccactgaaagaacagcccgccctgaacgacagccggtactgcctgagcagcagactgagagtgtccgccaccttctggcagaacccccggaaccacttcagatgccaggtgcagttctacggcctgagcgagaacgacgagtggacccaggacagagccaagcccgtgacccagatcgtgtctgccgaagcctggggcagagccgattgcggatcccagagcttcggcctgctggaccccaagctgtgctacctgctggatggcatcctgttcatctacggcgtgatcctgaccgccctgttcctgagagtgaagttcagcagaagcgccgacgcccctgcctaccagcagggacagaaccaactgtacaacgagctgaacctgggcagacgggaagagtacgacgtgctggacaagcggagaggcagggaccctgagatgggcggaaagccccagcggagaaagaacccccaggaaggactgtataacgaactccagaaagacaagatggccgaagcctacagcgagatcggcatgaagggcgagcggagaagaggcaagggccacgatggcctgtaccagggcctgagcaccgccaccaaggacacctatgacgccctgcacatgcaggccctgcctccaagaagggccaagcgatctggatctggagcaacaaacttctcactactcaaacaagcaggtgacgtggaggagaatcccgggcctactagtatggactggatttggcgcatccttttccttgtcggcgctgctaccggcgcgcattccttcgaacaggtgcaactccagcagtccggaagcgagcttatgatgccaggggcatcagtgaagatcagctgcaaggctactggctacaccttctctaattactggatagagtgggttaaacaaaggccagggcacggcctggaatggatcggcgagatcctgcctgggacaggccgaaccatttataacgagaagttcaaaggcaaggctactttcaccgcagatataagctctaatacagtgcaaatgcagctctcttccctgacaagtgaggatagtgccgtgtattattgcgcacgaagagattactatggaaatttttattacgctatggattattggggtcaaggaacaagtgtgaccgttagcagcacgcgtatccagaaccctgatcctgccgtgtaccagctgcgggatagcaagagcagcgacaagagcgtgtgtctgttcaccgacttcgacagccagaccaacgtgtcccagagcaaggactccgacgtgtacatcaccgataagaccgtgctggacatgcggagcatggacttcaagagcaactccgccgtggcctggtccaacaagtccgatttcgcctgcgccaacgccttcaacaacagcattatccccgaggacacattcttcccaagccccgagagcagctgcggtacccagagttttgggttgttggaccctaaattgtgctatctgttggacggaatcctgttcatttacggagtgatcctgaccgcattgttcctgcgggttaagttttccagatccgcagacgcacccgcttaccaacaagggcagaaccaactctacaatgaacttaatttggggcggagggaagagtacgacgttctggacaaaaggaggggacgagatcccgagatgggcggaaagcctcagcgaaggaagaatccgcaagaggggctttataacgaactccagaaagataaaatggcagaagcctatagtgagattgggatgaagggagaaaggaggaggggtaaaggtcacgatgggttgtaccaaggattgagcacagccactaaagatacctatgatgcgctccacatgcaggccctgccgccaaga

SEQ ID NO: 2208 - DNA, 2844 bp, Artificial Sequence
  Synthetic Polynucloetide
atggccttaccagtgaccgccttgctcctgccgctggccttgctgctccacgccgccaggccggaagtgcagctggttgaatctggcggaggactggttcagcctggcggatctctgagactgtcttgtgccgccagcggcttcagcttcagcgacttttggatgagctgggtccgacaggcccctggcaaaggacttgaatgggtcgccacaatcagccaggccggcagcgagaaggactacgtggactctgtgaagggcagattcaccatcagccgggacaacgccaagaagtccctgtacctccagatgaacagcctgagagccgaggacaccgccgtgtactattgtgcctctggcgtgtacagcttcgactacagaggccagggcaccctggtcacagtctcttctggtaccggcggaggcggatctggcggcggaggtagcggtggcggaggatctgaattcgacatccagatgacccagagccctgccagcctgtccgtgtctgtgggcgagacagtgaccatcacctgtcgggccagcgagaacatctacagcaacctggcctggtatcagcagaagcagggcaagagcccccaactgctggtgtacgccgccaccaatctggccgatggcgtgcccagcagattttccggctctggcagcggcacccagtacagcctgaagatcaacagcctccagagcgaggacttcggcagctactactgccagcacttctggggcacctggacctttggaggaggcaccaccctggaaatcaagctcgaggacctgaagaacgtgttcccacctgaggtggccgtgttcgagcctagcgaggccgagatcagccacacccagaaagccaccctcgtgtgcctggctaccggcttctaccccgaccatgtggaactgtcttggtgggtcaacggcaaagaggtgcacagcggcgtgtctaccgacccccagccactgaaagaacagcccgccctgaacgacagccggtactgcctgagcagcagactgagagtgtccgccaccttctggcagaacccccggaaccacttcagatgccaggtgcagttctacggcctgagcgagaacgacgagtggacccaggacagagccaagcccgtgacccagatcgtgtctgccgaagcctggggcagagccgattgcggatcccagagcttcggcctgctggaccccaagctgtgctacctgctggatggcatcctgttcatctacggcgtgatcctgaccgccctgttcctgagagtgaagttcagcagaagcgccgacgcccctgcctaccagcagggacagaaccaactgtacaacgagctgaacctgggcagacgggaagagtacgacgtgctggacaagcggagaggcagggaccctgagatgggcggaaagccccagcggagaaagaacccccaggaaggactgtataacgaactccagaaagacaagatggccgaagcctacagcgagatcggcatgaagggcgagcggagaagaggcaagggccacgatggcctgtaccagggcctgagcaccgccaccaaggacacctatgacgccctgcacatgcaggccctgcctccaagaagggccaagcgatctggatctggagcaacaaacttctcactactcaaacaagcaggtgacgtggaggagaatcccgggcctactagtatggactggatttggcgcatccttttccttgtcggcgctgctaccggcgcgcattccttcgaagaagtgcaactccagcagagcggccctgagcttgtgaagcctggcgcttccgtgaagatgagctgcaaggccagcggctacaccttcaccgactactacatgaagtggatgaagcagagccacggcaagtccctggaatggatcggcgacatcaaccccaacaacggcggcaccacctacaaccagaagttcaagggcaaggccaccctgaccgtggacaagagcagcagcaccgcctacatgcaactgaacagcctgaccagcgaggacagcgccgtgtactactgcgccagagactacggctacggctatttcgactactggggccagggcacaaccctgacagtgtcctctacgcgtatccagaaccctgatcctgccgtgtaccagctgcgggatagcaagagcagcgacaagagcgtgtgtctgttcaccgacttcgacagccagaccaacgtgtcccagagcaaggactccgacgtgtacatcaccgataagaccgtgctggacatgcggagcatggacttcaagagcaactccgccgtggcctggtccaacaagtccgatttcgcctgcgccaacgccttcaacaacagcattatccccgaggacacattcttcccaagccccgagagcagctgcggtacccagagttttgggttgttggaccctaaattgtgctatctgttggacggaatcctgttcatttacggagtgatcctgaccgcattgttcctgcgggttaagttttccagatccgcagacgcacccgcttaccaacaagggcagaaccaactctacaatgaacttaatttggggcggagggaagagtacgacgttctggacaaaaggaggggacgagatcccgagatgggcggaaagcctcagcgaaggaagaatccgcaagaggggctttataacgaactccagaaagataaaatggcagaagcctatagtgagattgggatgaagggagaaaggaggaggggtaaaggtcacgatgggttgtaccaaggattgagcacagccactaaagatacctatgatgcgctccacatgcaggccctgccgccaaga

SEQ ID NO: 2209 - DNA, 2853 bp, Artificial Sequence
  Synthetic Polynucloetide
atggccttaccagtgaccgccttgctcctgccgctggccttgctgctccacgccgccaggccggaagtgcagctggttgaatctggcggaggactggttcagcctggcggatctctgagactgtcttgtgccgccagcggcttcagcttcagcgacttttggatgagctgggtccgacaggcccctggcaaaggacttgaatgggtcgccacaatcagccaggccggcagcgagaaggactacgtggactctgtgaagggcagattcaccatcagccgggacaacgccaagaagtccctgtacctccagatgaacagcctgagagccgaggacaccgccgtgtactattgtgcctctggcgtgtacagcttcgactacagaggccagggcaccctggtcacagtctcttctggtaccggcggaggcggatctggcggcggaggtagcggtggcggaggatctgaattcgagatcgtgctgacacagagccctggcaccctgagcctgtctccaggcgaaagagccacactgagctgtcgggcctctcagagcgtgggaggctacctggcttggtatcagcagaagccaggccaggcccccagactgctgatctacgacgccagcaatcgggccacaggcatccccgccagattttctggcagcggctccggcaccgacttcaccctgacaatcagcagcctggaacccgaggacttcgccgtgtactactgccagcagcggaacaactggccccccatgtacacattcggccagggcaccaagctggaaatcaagagactcgaggacctgaagaacgtgttcccacctgaggtggccgtgttcgagcctagcgaggccgagatcagccacacccagaaagccaccctcgtgtgcctggctaccggcttctaccccgaccatgtggaactgtcttggtgggtcaacggcaaagaggtgcacagcggcgtgtctaccgacccccagccactgaaagaacagcccgccctgaacgacagccggtactgcctgagcagcagactgagagtgtccgccaccttctggcagaacccccggaaccacttcagatgccaggtgcagttctacggcctgagcgagaacgacgagtggacccaggacagagccaagcccgtgacccagatcgtgtctgccgaagcctggggcagagccgattgcggatcccagagcttcggcctgctggaccccaagctgtgctacctgctggatggcatcctgttcatctacggcgtgatcctgaccgccctgttcctgagagtgaagttcagcagaagcgccgacgcccctgcctaccagcagggacagaaccaactgtacaacgagctgaacctgggcagacgggaagagtacgacgtgctggacaagcggagaggcagggaccctgagatgggcggaaagccccagcggagaaagaacccccaggaaggactgtataacgaactccagaaagacaagatggccgaagcctacagcgagatcggcatgaagggcgagcggagaagaggcaagggccacgatggcctgtaccagggcctgagcaccgccaccaaggacacctatgacgccctgcacatgcaggccctgcctccaagaagggccaagcgatctggatctggagcaacaaacttctcactactcaaacaagcaggtgacgtggaggagaatcccgggcctactagtatggactggatttggcgcatccttttccttgtcggcgctgctaccggcgcgcattccttcgaacaggtgcaactggtgcagagcggagccgaagtgaagaaacccggcagcagcgtgaaggtgtcctgcaaggcttccggcggcaccttcagcagctacgccatttcttgggtgcgccaggctcctggacagggcctggaatggatgggcggcatcatccctatcctgggcaccgccaactacgcccagaaattccagggcagagtgaccatcaccgccgacgagagcaccagcaccgcctacatggaactgagcagcctgcggagcgaggacacagccgtgtattattgcgccagatggggcggaggggccttcgacatttggggccagggaacaatggtcaccgtgtccagcacgcgtatccagaaccctgatcctgccgtgtaccagctgcgggatagcaagagcagcgacaagagcgtgtgtctgttcaccgacttcgacagccagaccaacgtgtcccagagcaaggactccgacgtgtacatcaccgataagaccgtgctggacatgcggagcatggacttcaagagcaactccgccgtggcctggtccaacaagtccgatttcgcctgcgccaacgccttcaacaacagcattatccccgaggacacattcttcccaagccccgagagcagctgcggtacccagagttttgggttgttggaccctaaattgtgctatctgttggacggaatcctgttcatttacggagtgatcctgaccgcattgttcctgcgggttaagttttccagatccgcagacgcacccgcttaccaacaagggcagaaccaactctacaatgaacttaatttggggcggagggaagagtacgacgttctggacaaaaggaggggacgagatcccgagatgggcggaaagcctcagcgaaggaagaatccgcaagaggggctttataacgaactccagaaagataaaatggcagaagcctatagtgagattgggatgaagggagaaaggaggaggggtaaaggtcacgatgggttgtaccaaggattgagcacagccactaaagatacctatgatgcgctccacatgcaggccctgccgccaaga

SEQ ID NO: 2210 - DNA, 2838 bp, Artificial Sequence
  Synthetic Polynucloetide
atggccttaccagtgaccgccttgctcctgccgctggccttgctgctccacgccgccaggccggaagtgcagctggttgaatctggcggaggactggttcagcctggcggatctctgagactgtcttgtgccgccagcggcttcagcttcagcgacttttggatgagctgggtccgacaggcccctggcaaaggacttgaatgggtcgccacaatcagccaggccggcagcgagaaggactacgtggactctgtgaagggcagattcaccatcagccgggacaacgccaagaagtccctgtacctccagatgaacagcctgagagccgaggacaccgccgtgtactattgtgcctctggcgtgtacagcttcgactacagaggccagggcaccctggtcacagtctcttctggtaccggcggaggcggatctggcggcggaggtagcggtggcggaggatctgaattccagatcgtgctgacacagagccctgccctgatgagcgccagccctggcgagaaagtgaccatgacctgtagcgccagcagcagcgtgcgctacatgtactggtatcagcagaagcccagaagcagccccaagccctggattcacctgaccagcaatctggcctctggcgtgcccgctagattttccggctctggcagcggcaccagctacagcctgaccatcagcagcatggaagccgaggacgccgccacctactactgccagcagtggtccagccaccccttcacatttggctccggcaccaagctggaaatcaagctcgaggacctgaagaacgtgttcccacctgaggtggccgtgttcgagcctagcgaggccgagatcagccacacccagaaagccaccctcgtgtgcctggctaccggcttctaccccgaccatgtggaactgtcttggtgggtcaacggcaaagaggtgcacagcggcgtgtctaccgacccccagccactgaaagaacagcccgccctgaacgacagccggtactgcctgagcagcagactgagagtgtccgccaccttctggcagaacccccggaaccacttcagatgccaggtgcagttctacggcctgagcgagaacgacgagtggacccaggacagagccaagcccgtgacccagatcgtgtctgccgaagcctggggcagagccgattgcggatcccagagcttcggcctgctggaccccaagctgtgctacctgctggatggcatcctgttcatctacggcgtgatcctgaccgccctgttcctgagagtgaagttcagcagaagcgccgacgcccctgcctaccagcagggacagaaccaactgtacaacgagctgaacctgggcagacgggaagagtacgacgtgctggacaagcggagaggcagggaccctgagatgggcggaaagccccagcggagaaagaacccccaggaaggactgtataacgaactccagaaagacaagatggccgaagcctacagcgagatcggcatgaagggcgagcggagaagaggcaagggccacgatggcctgtaccagggcctgagcaccgccaccaaggacacctatgacgccctgcacatgcaggccctgcctccaagaagggccaagcgatctggatctggagcaacaaacttctcactactcaaacaagcaggtgacgtggaggagaatcccgggcctactagtatggactggatttggcgcatccttttccttgtcggcgctgctaccggcgcgcattccttcgaagatgtgcaactccaggaaagcggccctggccttgtgaagcctagccagagcctgtccctgacctgtaccgtgaccggcttcagcatcaccagcgactactcttggaactggatcagacagttccctggcaacaaactggaatggatgggctacatcagctactccggccacacctcctacaaccccagcctggaaagccggatctccatcaccagagacaccagcaagaaccagttcttcttgcaactgaacagcgtgaccaccgaggataccgccacatattactgtaccagaggcaactgggacgtggtgtactggggccagggcacacttgtgaccgtgtctgctacgcgtatccagaaccctgatcctgccgtgtaccagctgcgggatagcaagagcagcgacaagagcgtgtgtctgttcaccgacttcgacagccagaccaacgtgtcccagagcaaggactccgacgtgtacatcaccgataagaccgtgctggacatgcggagcatggacttcaagagcaactccgccgtggcctggtccaacaagtccgatttcgcctgcgccaacgccttcaacaacagcattatccccgaggacacattcttcccaagccccgagagcagctgcggtacccagagttttgggttgttggaccctaaattgtgctatctgttggacggaatcctgttcatttacggagtgatcctgaccgcattgttcctgcgggttaagttttccagatccgcagacgcacccgcttaccaacaagggcagaaccaactctacaatgaacttaatttggggcggagggaagagtacgacgttctggacaaaaggaggggacgagatcccgagatgggcggaaagcctcagcgaaggaagaatccgcaagaggggctttataacgaactccagaaagataaaatggcagaagcctatagtgagattgggatgaagggagaaaggaggaggggtaaaggtcacgatgggttgtaccaaggattgagcacagccactaaagatacctatgatgcgctccacatgcaggccctgccgccaaga

SEQ ID NO: 2211 - DNA, 2868 bp, Artificial Sequence
  Synthetic Polynucloetide
atggccttaccagtgaccgccttgctcctgccgctggccttgctgctccacgccgccaggccggaagtgcagctggttgaatctggcggaggactggttcagcctggcggatctctgagactgtcttgtgccgccagcggcttcagcttcagcgacttttggatgagctgggtccgacaggcccctggcaaaggacttgaatgggtcgccacaatcagccaggccggcagcgagaaggactacgtggactctgtgaagggcagattcaccatcagccgggacaacgccaagaagtccctgtacctccagatgaacagcctgagagccgaggacaccgccgtgtactattgtgcctctggcgtgtacagcttcgactacagaggccagggcaccctggtcacagtctcttctggtaccggcggaggcggatctggcggcggaggtagcggtggcggaggatctgaattcgacgtcgtgatgacccagagccctctgagcctgcctgtgacactgggacagcctgccagcatctcctgtcggagcagccagagcatcgtgcacagcgacggcaacacctacctggaatggtatcagcagcggccaggccagagccccagacggctgatctacaaggtgtccaacagattcagcggcgtgcccgacagattctccggcagcggctctggcaccgacttcaccctgaagatcagcagagtggaagccgaggacgtgggcgtgtactactgttttcaaggcagccacgccccctggacctttggcggaggaacaaaggtggaaatcaagctcgaggacctgaagaacgtgttcccacctgaggtggccgtgttcgagcctagcgaggccgagatcagccacacccagaaagccaccctcgtgtgcctggctaccggcttctaccccgaccatgtggaactgtcttggtgggtcaacggcaaagaggtgcacagcggcgtgtctaccgacccccagccactgaaagaacagcccgccctgaacgacagccggtactgcctgagcagcagactgagagtgtccgccaccttctggcagaacccccggaaccacttcagatgccaggtgcagttctacggcctgagcgagaacgacgagtggacccaggacagagccaagcccgtgacccagatcgtgtctgccgaagcctggggcagagccgattgcggatcccagagcttcggcctgctggaccccaagctgtgctacctgctggatggcatcctgttcatctacggcgtgatcctgaccgccctgttcctgagagtgaagttcagcagaagcgccgacgcccctgcctaccagcagggacagaaccaactgtacaacgagctgaacctgggcagacgggaagagtacgacgtgctggacaagcggagaggcagggaccctgagatgggcggaaagccccagcggagaaagaacccccaggaaggactgtataacgaactccagaaagacaagatggccgaagcctacagcgagatcggcatgaagggcgagcggagaagaggcaagggccacgatggcctgtaccagggcctgagcaccgccaccaaggacacctatgacgccctgcacatgcaggccctgcctccaagaagggccaagcgatctggatctggagcaacaaacttctcactactcaaacaagcaggtgacgtggaggagaatcccgggcctactagtatggactggatttggcgcatccttttccttgtcggcgctgctaccggcgcgcattccttcgaagaagtgcaactggtggaatcaggcggcggactggtgcagcctggcggatctctgagactgagctgtgccgccagcggcttcaccttcagcagctacggaatgcactgggtgcgccaggcccctggcaaaggactggaatgggtggcctacatcaccaccagaagcagcaccatctactacgccgacagcgtgaagggccggttcaccatctccagagacaacgccaagaacagcctgtacctccagatgaactccctgcgggccgaggacaccgccgtgtactattgcaccagagagcccctgaccggctactacgctatggactattggggccagggcaccagcgtgaccgtgtctagtacgcgtatccagaaccctgatcctgccgtgtaccagctgcgggatagcaagagcagcgacaagagcgtgtgtctgttcaccgacttcgacagccagaccaacgtgtcccagagcaaggactccgacgtgtacatcaccgataagaccgtgctggacatgcggagcatggacttcaagagcaactccgccgtggcctggtccaacaagtccgatttcgcctgcgccaacgccttcaacaacagcattatccccgaggacacattcttcccaagccccgagagcagctgcggtacccagagttttgggttgttggaccctaaattgtgctatctgttggacggaatcctgttcatttacggagtgatcctgaccgcattgttcctgcgggttaagttttccagatccgcagacgcacccgcttaccaacaagggcagaaccaactctacaatgaacttaatttggggcggagggaagagtacgacgttctggacaaaaggaggggacgagatcccgagatgggcggaaagcctcagcgaaggaagaatccgcaagaggggctttataacgaactccagaaagataaaatggcagaagcctatagtgagattgggatgaagggagaaaggaggaggggtaaaggtcacgatgggttgtaccaaggattgagcacagccactaaagatacctatgatgcgctccacatgcaggccctgccgccaaga

SEQ ID NO: 2212 - DNA, 2844 bp, Artificial Sequence
  Synthetic Polynucloetide
atggccttaccagtgaccgccttgctcctgccgctggccttgctgctccacgccgccaggccggaagtgcagctggttgaatctggcggaggactggttcagcctggcggatctctgagactgtcttgtgccgccagcggcttcagcttcagcgacttttggatgagctgggtccgacaggcccctggcaaaggacttgaatgggtcgccacaatcagccaggccggcagcgagaaggactacgtggactctgtgaagggcagattcaccatcagccgggacaacgccaagaagtccctgtacctccagatgaacagcctgagagccgaggacaccgccgtgtactattgtgcctctggcgtgtacagcttcgactacagaggccagggcaccctggtcacagtctcttctggtaccggcggaggcggatctggcggcggaggtagcggtggcggaggatctgaattcgacatccagatgacccagagccccagcagcctgtctgccagcgtgggcgacagagtgaccatcacctgtagagccagccagagcatcagcctgtggctgaactggtatcagcagaagcccggcaaggcccccaagctgctgatctacgccgccagcacactccagagcggcgtgccaagcagattttccggcagcggctccggcaccgacttcaccctgacaatcagctccctccagcccgaggacttcgccacctactactgccagcagtactacaccagcccctacaccttcggccagggcaccaaggtggaaatcaagagactcgaggacctgaagaacgtgttcccacctgaggtggccgtgttcgagcctagcgaggccgagatcagccacacccagaaagccaccctcgtgtgcctggctaccggcttctaccccgaccatgtggaactgtcttggtgggtcaacggcaaagaggtgcacagcggcgtgtctaccgacccccagccactgaaagaacagcccgccctgaacgacagccggtactgcctgagcagcagactgagagtgtccgccaccttctggcagaacccccggaaccacttcagatgccaggtgcagttctacggcctgagcgagaacgacgagtggacccaggacagagccaagcccgtgacccagatcgtgtctgccgaagcctggggcagagccgattgcggatcccagagcttcggcctgctggaccccaagctgtgctacctgctggatggcatcctgttcatctacggcgtgatcctgaccgccctgttcctgagagtgaagttcagcagaagcgccgacgcccctgcctaccagcagggacagaaccaactgtacaacgagctgaacctgggcagacgggaagagtacgacgtgctggacaagcggagaggcagggaccctgagatgggcggaaagccccagcggagaaagaacccccaggaaggactgtataacgaactccagaaagacaagatggccgaagcctacagcgagatcggcatgaagggcgagcggagaagaggcaagggccacgatggcctgtaccagggcctgagcaccgccaccaaggacacctatgacgccctgcacatgcaggccctgcctccaagaagggccaagcgatctggatctggagcaacaaacttctcactactcaaacaagcaggtgacgtggaggagaatcccgggcctactagtatggactggatttggcgcatccttttccttgtcggcgctgctaccggcgcgcattccttcgaacaggtgcaactgctggaatctggcggcggactggtgcagcctggcggatctctgagactgagctgtgccgccagcggcttcaccttcagcagctacgccatgagctgggtgcgccaggcccctggaaaaggactggaatgggtgtccgtgatccggtccagcggcagcagcacctattacgccgatagcgtgaagggccggttcaccatcagccgggacaacagcaagaacaccctgtacctccagatgaacagcctgcgggccgaggacaccgccgtgtactattgtgctaggggaggcggctacttcgactactggggccagggaacactcgtgaccgtgtcctctacgcgtatccagaaccctgatcctgccgtgtaccagctgcgggatagcaagagcagcgacaagagcgtgtgtctgttcaccgacttcgacagccagaccaacgtgtcccagagcaaggactccgacgtgtacatcaccgataagaccgtgctggacatgcggagcatggacttcaagagcaactccgccgtggcctggtccaacaagtccgatttcgcctgcgccaacgccttcaacaacagcattatccccgaggacacattcttcccaagccccgagagcagctgcggtacccagagttttgggttgttggaccctaaattgtgctatctgttggacggaatcctgttcatttacggagtgatcctgaccgcattgttcctgcgggttaagttttccagatccgcagacgcacccgcttaccaacaagggcagaaccaactctacaatgaacttaatttggggcggagggaagagtacgacgttctggacaaaaggaggggacgagatcccgagatgggcggaaagcctcagcgaaggaagaatccgcaagaggggctttataacgaactccagaaagataaaatggcagaagcctatagtgagattgggatgaagggagaaaggaggaggggtaaaggtcacgatgggttgtaccaaggattgagcacagccactaaagatacctatgatgcgctccacatgcaggccctgccgccaaga

SEQ ID NO: 2213 - DNA, 2853 bp, Artificial Sequence
  Synthetic Polynucloetide
atggccttaccagtgaccgccttgctcctgccgctggccttgctgctccacgccgccaggccggaagtgcagctggttgaatctggcggaggactggttcagcctggcggatctctgagactgtcttgtgccgccagcggcttcagcttcagcgacttttggatgagctgggtccgacaggcccctggcaaaggacttgaatgggtcgccacaatcagccaggccggcagcgagaaggactacgtggactctgtgaagggcagattcaccatcagccgggacaacgccaagaagtccctgtacctccagatgaacagcctgagagccgaggacaccgccgtgtactattgtgcctctggcgtgtacagcttcgactacagaggccagggcaccctggtcacagtctcttctggtaccggcggaggcggatctggcggcggaggtagcggtggcggaggatctgaattcgacatccagatgacccagagccccagcagcctgtctgccagcgtgggcgacagagtgaccatcacctgtagagccagccagagcatcagcagctacctgaactggtatcagcagaagcccggcaaggcccccaaactgctgatctacgccgtgtccacactccagagcggcgtgcccagcagattttctggcagcggctccggcaccgacttcaccctgacaatcagctccctccagcccgaggacttcgccacctactactgtcagcagagcggcaccttccctcccaccacatttggacagggcaccaaggtggaaatcaagagactcgaggacctgaagaacgtgttcccacctgaggtggccgtgttcgagcctagcgaggccgagatcagccacacccagaaagccaccctcgtgtgcctggctaccggcttctaccccgaccatgtggaactgtcttggtgggtcaacggcaaagaggtgcacagcggcgtgtctaccgacccccagccactgaaagaacagcccgccctgaacgacagccggtactgcctgagcagcagactgagagtgtccgccaccttctggcagaacccccggaaccacttcagatgccaggtgcagttctacggcctgagcgagaacgacgagtggacccaggacagagccaagcccgtgacccagatcgtgtctgccgaagcctggggcagagccgattgcggatcccagagcttcggcctgctggaccccaagctgtgctacctgctggatggcatcctgttcatctacggcgtgatcctgaccgccctgttcctgagagtgaagttcagcagaagcgccgacgcccctgcctaccagcagggacagaaccaactgtacaacgagctgaacctgggcagacgggaagagtacgacgtgctggacaagcggagaggcagggaccctgagatgggcggaaagccccagcggagaaagaacccccaggaaggactgtataacgaactccagaaagacaagatggccgaagcctacagcgagatcggcatgaagggcgagcggagaagaggcaagggccacgatggcctgtaccagggcctgagcaccgccaccaaggacacctatgacgccctgcacatgcaggccctgcctccaagaagggccaagcgatctggatctggagcaacaaacttctcactactcaaacaagcaggtgacgtggaggagaatcccgggcctactagtatggactggatttggcgcatccttttccttgtcggcgctgctaccggcgcgcattccttcgaacaggtgcaactgctggaatctggcggcggactggtgcagcctggcggatctctgagactgagctgtgccgccagcggcttcaccttcagcagccacggaatgcactgggtgcgccaggcccctggaaagggactggaatgggtgtccgtgatctccggcagcggcagcaataccggctacgccgatagcgtgaagggccggttcaccatcagccgggacaacagcaagaacaccctgtacctccagatgaacagcctgcgggccgaggacaccgccgtgtactattgtgccagacagtggggcagctacgccttcgattcttggggccagggcaccctcgtgaccgtgtcatctacgcgtatccagaaccctgatcctgccgtgtaccagctgcgggatagcaagagcagcgacaagagcgtgtgtctgttcaccgacttcgacagccagaccaacgtgtcccagagcaaggactccgacgtgtacatcaccgataagaccgtgctggacatgcggagcatggacttcaagagcaactccgccgtggcctggtccaacaagtccgatttcgcctgcgccaacgccttcaacaacagcattatccccgaggacacattcttcccaagccccgagagcagctgcggtacccagagttttgggttgttggaccctaaattgtgctatctgttggacggaatcctgttcatttacggagtgatcctgaccgcattgttcctgcgggttaagttttccagatccgcagacgcacccgcttaccaacaagggcagaaccaactctacaatgaacttaatttggggcggagggaagagtacgacgttctggacaaaaggaggggacgagatcccgagatgggcggaaagcctcagcgaaggaagaatccgcaagaggggctttataacgaactccagaaagataaaatggcagaagcctatagtgagattgggatgaagggagaaaggaggaggggtaaaggtcacgatgggttgtaccaaggattgagcacagccactaaagatacctatgatgcgctccacatgcaggccctgccgccaaga

SEQ ID NO: 2214 - DNA, 2883 bp, Artificial Sequence
  Synthetic Polynucloetide
atggccttaccagtgaccgccttgctcctgccgctggccttgctgctccacgccgccaggccggaagtgcagctggttgaatctggcggaggactggttcagcctggcggatctctgagactgtcttgtgccgccagcggcttcagcttcagcgacttttggatgagctgggtccgacaggcccctggcaaaggacttgaatgggtcgccacaatcagccaggccggcagcgagaaggactacgtggactctgtgaagggcagattcaccatcagccgggacaacgccaagaagtccctgtacctccagatgaacagcctgagagccgaggacaccgccgtgtactattgtgcctctggcgtgtacagcttcgactacagaggccagggcaccctggtcacagtctcttctggtaccggcggaggcggatctggcggcggaggtagcggtggcggaggatctgaattcgacatcgtgatgagccagagccctagcagcctggccgtgtccgtgggcgagaaagtgaccatgagctgcaagagcagccagtccctgctgcacagcagcaaccagaagaactacctggcctggtatcagcagaagcccggccagtcccccaaggtgctgatctactgggccagcaccagagaaagcggcgtgcccgatagattcaccggcagcggctctggcaccgacttcaccctgaccatcaccagcgtgaagtccgaggacctggctgtgtactactgccagcagtattacagctacccctggaccttcggcggaggcacccggctggaaatcaaaagactcgaggacctgaagaacgtgttcccacctgaggtggccgtgttcgagcctagcgaggccgagatcagccacacccagaaagccaccctcgtgtgcctggctaccggcttctaccccgaccatgtggaactgtcttggtgggtcaacggcaaagaggtgcacagcggcgtgtctaccgacccccagccactgaaagaacagcccgccctgaacgacagccggtactgcctgagcagcagactgagagtgtccgccaccttctggcagaacccccggaaccacttcagatgccaggtgcagttctacggcctgagcgagaacgacgagtggacccaggacagagccaagcccgtgacccagatcgtgtctgccgaagcctggggcagagccgattgcggatcccagagcttcggcctgctggaccccaagctgtgctacctgctggatggcatcctgttcatctacggcgtgatcctgaccgccctgttcctgagagtgaagttcagcagaagcgccgacgcccctgcctaccagcagggacagaaccaactgtacaacgagctgaacctgggcagacgggaagagtacgacgtgctggacaagcggagaggcagggaccctgagatgggcggaaagccccagcggagaaagaacccccaggaaggactgtataacgaactccagaaagacaagatggccgaagcctacagcgagatcggcatgaagggcgagcggagaagaggcaagggccacgatggcctgtaccagggcctgagcaccgccaccaaggacacctatgacgccctgcacatgcaggccctgcctccaagaagggccaagcgatctggatctggagcaacaaacttctcactactcaaacaagcaggtgacgtggaggagaatcccgggcctactagtatggactggatttggcgcatccttttccttgtcggcgctgctaccggcgcgcattccttcgaagaagtgcaactccagcagagcgtggccgagcttgtgaagcctggcgcttccgtgaagatgtcctgcaaggtgtccggctacaccctgacagaccacaccatccactggatgaagcagcggcctgagcagggcctggaatggatcggctacatctaccccagggacggcatcaccggctacaacgagaagttcaagggcaaggccacactgaccgccgacaccagcagcagcacagcctacatgcaactgaacagcctgaccagcgaggacagcgccgtgtacttctgtgccagatggggctacagctacagaaactacgcctactactacgactactggggccagggcacaaccctgaccgtgtctagtacgcgtatccagaaccctgatcctgccgtgtaccagctgcgggatagcaagagcagcgacaagagcgtgtgtctgttcaccgacttcgacagccagaccaacgtgtcccagagcaaggactccgacgtgtacatcaccgataagaccgtgctggacatgcggagcatggacttcaagagcaactccgccgtggcctggtccaacaagtccgatttcgcctgcgccaacgccttcaacaacagcattatccccgaggacacattcttcccaagccccgagagcagctgcggtacccagagttttgggttgttggaccctaaattgtgctatctgttggacggaatcctgttcatttacggagtgatcctgaccgcattgttcctgcgggttaagttttccagatccgcagacgcacccgcttaccaacaagggcagaaccaactctacaatgaacttaatttggggcggagggaagagtacgacgttctggacaaaaggaggggacgagatcccgagatgggcggaaagcctcagcgaaggaagaatccgcaagaggggctttataacgaactccagaaagataaaatggcagaagcctatagtgagattgggatgaagggagaaaggaggaggggtaaaggtcacgatgggttgtaccaaggattgagcacagccactaaagatacctatgatgcgctccacatgcaggccctgccgccaaga

SEQ ID NO: 2215 - DNA, 2874 bp, Artificial Sequence
  Synthetic Polynucloetide
atggccttaccagtgaccgccttgctcctgccgctggccttgctgctccacgccgccaggccggaagtgcagctggttgaatctggcggaggactggttcagcctggcggatctctgagactgtcttgtgccgccagcggcttcagcttcagcgacttttggatgagctgggtccgacaggcccctggcaaaggacttgaatgggtcgccacaatcagccaggccggcagcgagaaggactacgtggactctgtgaagggcagattcaccatcagccgggacaacgccaagaagtccctgtacctccagatgaacagcctgagagccgaggacaccgccgtgtactattgtgcctctggcgtgtacagcttcgactacagaggccagggcaccctggtcacagtctcttctggtaccggcggaggcggatctggcggcggaggtagcggtggcggaggatctgaattcgagatcgtgctgacacagagccctggcaccctgagcctgtctccaggcgaaagagccacactgagctgtcgggccagccagagcgtgtccagctcttacctggcctggtatcagcagaagcccggccaggctccccggctgctgatctacggaacaagcagcagagccaccggcatccccgacagattttctggcagcggctccggcaccgacttcaccctgacaatcagcagactggaacccgaggacttcgccgtgtactactgccagcagtacggcagcagccccttcacctttggcggaggcaccaaggtggaaatcaagagactcgaggacctgaagaacgtgttcccacctgaggtggccgtgttcgagcctagcgaggccgagatcagccacacccagaaagccaccctcgtgtgcctggctaccggcttctaccccgaccatgtggaactgtcttggtgggtcaacggcaaagaggtgcacagcggcgtgtctaccgacccccagccactgaaagaacagcccgccctgaacgacagccggtactgcctgagcagcagactgagagtgtccgccaccttctggcagaacccccggaaccacttcagatgccaggtgcagttctacggcctgagcgagaacgacgagtggacccaggacagagccaagcccgtgacccagatcgtgtctgccgaagcctggggcagagccgattgcggatcccagagcttcggcctgctggaccccaagctgtgctacctgctggatggcatcctgttcatctacggcgtgatcctgaccgccctgttcctgagagtgaagttcagcagaagcgccgacgcccctgcctaccagcagggacagaaccaactgtacaacgagctgaacctgggcagacgggaagagtacgacgtgctggacaagcggagaggcagggaccctgagatgggcggaaagccccagcggagaaagaacccccaggaaggactgtataacgaactccagaaagacaagatggccgaagcctacagcgagatcggcatgaagggcgagcggagaagaggcaagggccacgatggcctgtaccagggcctgagcaccgccaccaaggacacctatgacgccctgcacatgcaggccctgcctccaagaagggccaagcgatctggatctggagcaacaaacttctcactactcaaacaagcaggtgacgtggaggagaatcccgggcctactagtatggactggatttggcgcatccttttccttgtcggcgctgctaccggcgcgcattccttcgaacaggtgcaactccaggaatctggccccggactggctaagcccagcgagacactgagcctgacctgtaccgtgtccggcgacagcatcaccagctactactggtcctggatcagacagccccctggcaagggcctggaatggatcggctacatctactacagcggcagcaccaactacaaccccagcctgaagtccagagtgaccatcagcgtggacaccagcaagaaccagttctccctgaagctgagcagcgtgacagccgccgacaccgccgtgtattattgcgccagagatcagcggagaatcgccgctgccggcacccacttttacggcatggatgtgtggggccagggcaccaccgtgaccgtgtcatctacgcgtatccagaaccctgatcctgccgtgtaccagctgcgggatagcaagagcagcgacaagagcgtgtgtctgttcaccgacttcgacagccagaccaacgtgtcccagagcaaggactccgacgtgtacatcaccgataagaccgtgctggacatgcggagcatggacttcaagagcaactccgccgtggcctggtccaacaagtccgatttcgcctgcgccaacgccttcaacaacagcattatccccgaggacacattcttcccaagccccgagagcagctgcggtacccagagttttgggttgttggaccctaaattgtgctatctgttggacggaatcctgttcatttacggagtgatcctgaccgcattgttcctgcgggttaagttttccagatccgcagacgcacccgcttaccaacaagggcagaaccaactctacaatgaacttaatttggggcggagggaagagtacgacgttctggacaaaaggaggggacgagatcccgagatgggcggaaagcctcagcgaaggaagaatccgcaagaggggctttataacgaactccagaaagataaaatggcagaagcctatagtgagattgggatgaagggagaaaggaggaggggtaaaggtcacgatgggttgtaccaaggattgagcacagccactaaagatacctatgatgcgctccacatgcaggccctgccgccaaga

SEQ ID NO: 2216 - DNA, 2850 bp, Artificial Sequence
  Synthetic Polynucloetide
atggccttaccagtgaccgccttgctcctgccgctggccttgctgctccacgccgccaggccggaagtgcagctggttgaatctggcggaggactggttcagcctggcggatctctgagactgtcttgtgccgccagcggcttcagcttcagcgacttttggatgagctgggtccgacaggcccctggcaaaggacttgaatgggtcgccacaatcagccaggccggcagcgagaaggactacgtggactctgtgaagggcagattcaccatcagccgggacaacgccaagaagtccctgtacctccagatgaacagcctgagagccgaggacaccgccgtgtactattgtgcctctggcgtgtacagcttcgactacagaggccagggcaccctggtcacagtctcttctggtaccggcggaggcggatctggcggcggaggtagcggtggcggaggatctgaattcgacatcctgctgacccagagccccgtgatcctgtccgtgtctcctggcgagagagtgtccttcagctgtcgggccagccagagcatcggcaccaacatccactggtatcagcagcggaccaacggcagccccagactgctgattaagtacgccagcgagtccatcagcggcatccccagcagattttccggcagcggctccggcaccgacttcaccctgagcatcaacagcgtggaaagcgaggacattgccgactactactgccagcagaacaacaactggcccaccaccttcggagccggcaccaagctggaactgaagctcgaggacctgaagaacgtgttcccacctgaggtggccgtgttcgagcctagcgaggccgagatcagccacacccagaaagccaccctcgtgtgcctggctaccggcttctaccccgaccatgtggaactgtcttggtgggtcaacggcaaagaggtgcacagcggcgtgtctaccgacccccagccactgaaagaacagcccgccctgaacgacagccggtactgcctgagcagcagactgagagtgtccgccaccttctggcagaacccccggaaccacttcagatgccaggtgcagttctacggcctgagcgagaacgacgagtggacccaggacagagccaagcccgtgacccagatcgtgtctgccgaagcctggggcagagccgattgcggatcccagagcttcggcctgctggaccccaagctgtgctacctgctggatggcatcctgttcatctacggcgtgatcctgaccgccctgttcctgagagtgaagttcagcagaagcgccgacgcccctgcctaccagcagggacagaaccaactgtacaacgagctgaacctgggcagacgggaagagtacgacgtgctggacaagcggagaggcagggaccctgagatgggcggaaagccccagcggagaaagaacccccaggaaggactgtataacgaactccagaaagacaagatggccgaagcctacagcgagatcggcatgaagggcgagcggagaagaggcaagggccacgatggcctgtaccagggcctgagcaccgccaccaaggacacctatgacgccctgcacatgcaggccctgcctccaagaagggccaagcgatctggatctggagcaacaaacttctcactactcaaacaagcaggtgacgtggaggagaatcccgggcctactagtatggactggatttggcgcatccttttccttgtcggcgctgctaccggcgcgcattccttcgaacaggtgcagctgaagcagagcggacctggcctggtgcagcctagccagagcctgtccatcacctgtaccgtgtccggcttcagcctgaccaactacggcgtgcactgggtgcgccagagccctggaaaaggactggaatggctgggagtgatttggagcggcggcaacaccgactacaacacccccttcaccagcagactgtctatcaacaaggacaacagcaagagccaggtgttcttcaagatgaacagcctccagagcaacgacaccgccatctactactgtgctagagccctgacctactatgactacgagttcgcctactggggccagggcacactcgtgacagtgtctgctacgcgtatccagaaccctgatcctgccgtgtaccagctgcgggatagcaagagcagcgacaagagcgtgtgtctgttcaccgacttcgacagccagaccaacgtgtcccagagcaaggactccgacgtgtacatcaccgataagaccgtgctggacatgcggagcatggacttcaagagcaactccgccgtggcctggtccaacaagtccgatttcgcctgcgccaacgccttcaacaacagcattatccccgaggacacattcttcccaagccccgagagcagctgcggtacccagagttttgggttgttggaccctaaattgtgctatctgttggacggaatcctgttcatttacggagtgatcctgaccgcattgttcctgcgggttaagttttccagatccgcagacgcacccgcttaccaacaagggcagaaccaactctacaatgaacttaatttggggcggagggaagagtacgacgttctggacaaaaggaggggacgagatcccgagatgggcggaaagcctcagcgaaggaagaatccgcaagaggggctttataacgaactccagaaagataaaatggcagaagcctatagtgagattgggatgaagggagaaaggaggaggggtaaaggtcacgatgggttgtaccaaggattgagcacagccactaaagatacctatgatgcgctccacatgcaggccctgccgccaaga

SEQ ID NO: 2217 - DNA, 2829 bp, Artificial Sequence
  Synthetic Polynucloetide
atggccttaccagtgaccgccttgctcctgccgctggccttgctgctccacgccgccaggccggaagtgcagctggttgaatctggcggaggactggttcagcctggcggatctctgagactgtcttgtgccgccagcggcttcagcttcagcgacttttggatgagctgggtccgacaggcccctggcaaaggacttgaatgggtcgccacaatcagccaggccggcagcgagaaggactacgtggactctgtgaagggcagattcaccatcagccgggacaacgccaagaagtccctgtacctccagatgaacagcctgagagccgaggacaccgccgtgtactattgtgcctctggcgtgtacagcttcgactacagaggccagggcaccctggtcacagtctcttctggtaccggcggaggcggatctggcggcggaggtagcggtggcggaggatctgaattcatgacccagagccccaagttcctgctggtgtctgccggcgacagagtgaccctgacatgcaaggccagccagagcgtgaacaacgacgtgtactggtatcagcaggaacccggccagtcccccaagctgctgatctactgggccagcaccagagaaagcggcgtgcccgatagattcaccggcagcggctctggcaccgacttcaccctgacaatcagcagcgtgcaggccgaggacctggccgtgtactactgcaagcagagctacaacctgtacaccttcggcggaggcaccaagctggaaatcaagagactcgaggacctgaagaacgtgttcccacctgaggtggccgtgttcgagcctagcgaggccgagatcagccacacccagaaagccaccctcgtgtgcctggctaccggcttctaccccgaccatgtggaactgtcttggtgggtcaacggcaaagaggtgcacagcggcgtgtctaccgacccccagccactgaaagaacagcccgccctgaacgacagccggtactgcctgagcagcagactgagagtgtccgccaccttctggcagaacccccggaaccacttcagatgccaggtgcagttctacggcctgagcgagaacgacgagtggacccaggacagagccaagcccgtgacccagatcgtgtctgccgaagcctggggcagagccgattgcggatcccagagcttcggcctgctggaccccaagctgtgctacctgctggatggcatcctgttcatctacggcgtgatcctgaccgccctgttcctgagagtgaagttcagcagaagcgccgacgcccctgcctaccagcagggacagaaccaactgtacaacgagctgaacctgggcagacgggaagagtacgacgtgctggacaagcggagaggcagggaccctgagatgggcggaaagccccagcggagaaagaacccccaggaaggactgtataacgaactccagaaagacaagatggccgaagcctacagcgagatcggcatgaagggcgagcggagaagaggcaagggccacgatggcctgtaccagggcctgagcaccgccaccaaggacacctatgacgccctgcacatgcaggccctgcctccaagaagggccaagcgatctggatctggagcaacaaacttctcactactcaaacaagcaggtgacgtggaggagaatcccgggcctactagtatggactggatttggcgcatccttttccttgtcggcgctgctaccggcgcgcattccttcgaagaatctggaagaggactggtgcagcctggcggcagcagaaagctgtcttgtgccgccagcggcttcaccttcagcaccagcggaatgcactgggtgcgccaggcccctgagaagggactggaatgggtggcctacatcagctccggcagcaccaccatctaccacgccgataccgtgaagggccggttcaccatcagccgggacaaccccaagaataccctgttcctccagatgaccagcctgcggagcgaggacaccgccatgtactattgctgcgccagaagcggccagttcggcaactacttcgactactggggccagggcaccaccctgaccgtgtcatctacgcgtatccagaaccctgatcctgccgtgtaccagctgcgggatagcaagagcagcgacaagagcgtgtgtctgttcaccgacttcgacagccagaccaacgtgtcccagagcaaggactccgacgtgtacatcaccgataagaccgtgctggacatgcggagcatggacttcaagagcaactccgccgtggcctggtccaacaagtccgatttcgcctgcgccaacgccttcaacaacagcattatccccgaggacacattcttcccaagccccgagagcagctgcggtacccagagttttgggttgttggaccctaaattgtgctatctgttggacggaatcctgttcatttacggagtgatcctgaccgcattgttcctgcgggttaagttttccagatccgcagacgcacccgcttaccaacaagggcagaaccaactctacaatgaacttaatttggggcggagggaagagtacgacgttctggacaaaaggaggggacgagatcccgagatgggcggaaagcctcagcgaaggaagaatccgcaagaggggctttataacgaactccagaaagataaaatggcagaagcctatagtgagattgggatgaagggagaaaggaggaggggtaaaggtcacgatgggttgtaccaaggattgagcacagccactaaagatacctatgatgcgctccacatgcaggccctgccgccaaga

SEQ ID NO: 2218 - DNA, 2844 bp, Artificial Sequence
  Synthetic Polynucloetide
atggccttaccagtgaccgccttgctcctgccgctggccttgctgctccacgccgccaggccggaagtgcagctggttgaatctggcggaggactggttcagcctggcggatctctgagactgtcttgtgccgccagcggcttcagcttcagcgacttttggatgagctgggtccgacaggcccctggcaaaggacttgaatgggtcgccacaatcagccaggccggcagcgagaaggactacgtggactctgtgaagggcagattcaccatcagccgggacaacgccaagaagtccctgtacctccagatgaacagcctgagagccgaggacaccgccgtgtactattgtgcctctggcgtgtacagcttcgactacagaggccagggcaccctggtcacagtctcttctggtaccggcggaggcggatctggcggcggaggtagcggtggcggaggatctgaattccagagcccatctagcctggctgtgtctgccggcgagaaagtgaccatgagctgcaagagcagccagagcctgctgaacagccggacccggaagaactacctggcctggtatcagcagaagcccggccagagccccaagctgctgatctactgggccagcaccagagaaagcggcgtgcccgatagattcaccggctctggcagcggcaccgacttcaccctgacaatcagcagcgtgcaggccgaggacctggccgtgtactactgcaagcagagcaacctgtacaccttcggcggaggcaccaagctggaaatcaagctcgaggacctgaagaacgtgttcccacctgaggtggccgtgttcgagcctagcgaggccgagatcagccacacccagaaagccaccctcgtgtgcctggctaccggcttctaccccgaccatgtggaactgtcttggtgggtcaacggcaaagaggtgcacagcggcgtgtctaccgacccccagccactgaaagaacagcccgccctgaacgacagccggtactgcctgagcagcagactgagagtgtccgccaccttctggcagaacccccggaaccacttcagatgccaggtgcagttctacggcctgagcgagaacgacgagtggacccaggacagagccaagcccgtgacccagatcgtgtctgccgaagcctggggcagagccgattgcggatcccagagcttcggcctgctggaccccaagctgtgctacctgctggatggcatcctgttcatctacggcgtgatcctgaccgccctgttcctgagagtgaagttcagcagaagcgccgacgcccctgcctaccagcagggacagaaccaactgtacaacgagctgaacctgggcagacgggaagagtacgacgtgctggacaagcggagaggcagggaccctgagatgggcggaaagccccagcggagaaagaacccccaggaaggactgtataacgaactccagaaagacaagatggccgaagcctacagcgagatcggcatgaagggcgagcggagaagaggcaagggccacgatggcctgtaccagggcctgagcaccgccaccaaggacacctatgacgccctgcacatgcaggccctgcctccaagaagggccaagcgatctggatctggagcaacaaacttctcactactcaaacaagcaggtgacgtggaggagaatcccgggcctactagtatggactggatttggcgcatccttttccttgtcggcgctgctaccggcgcgcattccttcgaacaggtgcagctggaagagtctggacccgagcttgtgaagcctggggccagcgtgaagctgtcctgtaaagccagcggctacaccttcaccgagtacatcatccactgggtcaagcagcggagcggccagggcctggaatggatcggctggttttaccctggctccggcagcatcaagtacaacgagaagttcaaggacaaggccaccctgaccgccgacaagtccagcagcaccgtgtacatggaactgagcggcctgaccagcgaggacagcgccgtgtatttctgcgccagacacgacggctacagctacttcgactattggggccagggcaccacactgaccgtgtcctctacgcgtatccagaaccctgatcctgccgtgtaccagctgcgggatagcaagagcagcgacaagagcgtgtgtctgttcaccgacttcgacagccagaccaacgtgtcccagagcaaggactccgacgtgtacatcaccgataagaccgtgctggacatgcggagcatggacttcaagagcaactccgccgtggcctggtccaacaagtccgatttcgcctgcgccaacgccttcaacaacagcattatccccgaggacacattcttcccaagccccgagagcagctgcggtacccagagttttgggttgttggaccctaaattgtgctatctgttggacggaatcctgttcatttacggagtgatcctgaccgcattgttcctgcgggttaagttttccagatccgcagacgcacccgcttaccaacaagggcagaaccaactctacaatgaacttaatttggggcggagggaagagtacgacgttctggacaaaaggaggggacgagatcccgagatgggcggaaagcctcagcgaaggaagaatccgcaagaggggctttataacgaactccagaaagataaaatggcagaagcctatagtgagattgggatgaagggagaaaggaggaggggtaaaggtcacgatgggttgtaccaaggattgagcacagccactaaagatacctatgatgcgctccacatgcaggccctgccgccaaga

SEQ ID NO: 2219 - DNA, 2853 bp, Artificial Sequence
  Synthetic Polynucloetide
atggccttaccagtgaccgccttgctcctgccgctggccttgctgctccacgccgccaggccggaagtgcagctggttgaatctggcggaggactggttcagcctggcggatctctgagactgtcttgtgccgccagcggcttcagcttcagcgacttttggatgagctgggtccgacaggcccctggcaaaggacttgaatgggtcgccacaatcagccaggccggcagcgagaaggactacgtggactctgtgaagggcagattcaccatcagccgggacaacgccaagaagtccctgtacctccagatgaacagcctgagagccgaggacaccgccgtgtactattgtgcctctggcgtgtacagcttcgactacagaggccagggcaccctggtcacagtctcttctggtaccggcggaggcggatctggcggcggaggtagcggtggcggaggatctgaattcgacatccagatgacccagagccccagcagcctgtctgcctctctgggcgagagagtgtccctgacctgtcgggccacacaggaactgagcggctacctgtcttggctgcagcagaagcccgacggcaccatcaagcggctgatctacgccgccagcaccctggatagcggcgtgcccaagagattcagcggcaacagaagcggcagcgactacagcctgaccatcagctccctggaaagcgaggacttcgccgactactactgcctgcagtacgccatctacccctacaccttcggcggaggcaccaagctggaaatcaagctcgaggacctgaagaacgtgttcccacctgaggtggccgtgttcgagcctagcgaggccgagatcagccacacccagaaagccaccctcgtgtgcctggctaccggcttctaccccgaccatgtggaactgtcttggtgggtcaacggcaaagaggtgcacagcggcgtgtctaccgacccccagccactgaaagaacagcccgccctgaacgacagccggtactgcctgagcagcagactgagagtgtccgccaccttctggcagaacccccggaaccacttcagatgccaggtgcagttctacggcctgagcgagaacgacgagtggacccaggacagagccaagcccgtgacccagatcgtgtctgccgaagcctggggcagagccgattgcggatcccagagcttcggcctgctggaccccaagctgtgctacctgctggatggcatcctgttcatctacggcgtgatcctgaccgccctgttcctgagagtgaagttcagcagaagcgccgacgcccctgcctaccagcagggacagaaccaactgtacaacgagctgaacctgggcagacgggaagagtacgacgtgctggacaagcggagaggcagggaccctgagatgggcggaaagccccagcggagaaagaacccccaggaaggactgtataacgaactccagaaagacaagatggccgaagcctacagcgagatcggcatgaagggcgagcggagaagaggcaagggccacgatggcctgtaccagggcctgagcaccgccaccaaggacacctatgacgccctgcacatgcaggccctgcctccaagaagggccaagcgatctggatctggagcaacaaacttctcactactcaaacaagcaggtgacgtggaggagaatcccgggcctactagtatggactggatttggcgcatccttttccttgtcggcgctgctaccggcgcgcattccttcgaagaggtgcaactgcagcagtctggccccgagcttgtgaagcctggcgcctccgtgaagatgagctgcaaggccagcggctacacctttaccagctacttcatccactgggtcaagcagaaacccggccagggcctggaatggatcggcttcatcaacccttacaacgacggcagcaagtacaacgagaagttcaagggcaaggccaccctgaccagcgacaagagcagcagcaccgcctacatggaactgtccagcctgacatccgaggacagcgccgtgtactactgcaccagggacgacggctactacggctacgccatggactactggggccagggaacaagcgtcaccgtgtcctctacgcgtatccagaaccctgatcctgccgtgtaccagctgcgggatagcaagagcagcgacaagagcgtgtgtctgttcaccgacttcgacagccagaccaacgtgtcccagagcaaggactccgacgtgtacatcaccgataagaccgtgctggacatgcggagcatggacttcaagagcaactccgccgtggcctggtccaacaagtccgatttcgcctgcgccaacgccttcaacaacagcattatccccgaggacacattcttcccaagccccgagagcagctgcggtacccagagttttgggttgttggaccctaaattgtgctatctgttggacggaatcctgttcatttacggagtgatcctgaccgcattgttcctgcgggttaagttttccagatccgcagacgcacccgcttaccaacaagggcagaaccaactctacaatgaacttaatttggggcggagggaagagtacgacgttctggacaaaaggaggggacgagatcccgagatgggcggaaagcctcagcgaaggaagaatccgcaagaggggctttataacgaactccagaaagataaaatggcagaagcctatagtgagattgggatgaagggagaaaggaggaggggtaaaggtcacgatgggttgtaccaaggattgagcacagccactaaagatacctatgatgcgctccacatgcaggccctgccgccaaga

SEQ ID NO: 2220 - DNA, 2868 bp, Artificial Sequence
  Synthetic Polynucloetide
atggccttaccagtgaccgccttgctcctgccgctggccttgctgctccacgccgccaggccggaagtgcagctggttgaatctggcggaggactggttcagcctggcggatctctgagactgtcttgtgccgccagcggcttcagcttcagcgacttttggatgagctgggtccgacaggcccctggcaaaggacttgaatgggtcgccacaatcagccaggccggcagcgagaaggactacgtggactctgtgaagggcagattcaccatcagccgggacaacgccaagaagtccctgtacctccagatgaacagcctgagagccgaggacaccgccgtgtactattgtgcctctggcgtgtacagcttcgactacagaggccagggcaccctggtcacagtctcttctggtaccggcggaggcggatctggcggcggaggtagcggtggcggaggatctgaattcgacaccatcgtgctgacacagagccctgcttccctggccgtgtccctgggacagagagccaccatctcttgcagagccagcgagagcgtggacagctacggcaacagcttcatgcactggtatcagcagaagcccggccagccccccaagctgctgatctacctggcctccaacctggaaagcggcgtgcccgccagattttctggcagcggcagcagaaccgacttcaccctgaccatcgaccccgtggaagccgatgatgccgccacctactactgccagcagaacaactacgacccctggaccttcggcggaggcaccaagctggaaatcaagctcgaggacctgaagaacgtgttcccacctgaggtggccgtgttcgagcctagcgaggccgagatcagccacacccagaaagccaccctcgtgtgcctggctaccggcttctaccccgaccatgtggaactgtcttggtgggtcaacggcaaagaggtgcacagcggcgtgtctaccgacccccagccactgaaagaacagcccgccctgaacgacagccggtactgcctgagcagcagactgagagtgtccgccaccttctggcagaacccccggaaccacttcagatgccaggtgcagttctacggcctgagcgagaacgacgagtggacccaggacagagccaagcccgtgacccagatcgtgtctgccgaagcctggggcagagccgattgcggatcccagagcttcggcctgctggaccccaagctgtgctacctgctggatggcatcctgttcatctacggcgtgatcctgaccgccctgttcctgagagtgaagttcagcagaagcgccgacgcccctgcctaccagcagggacagaaccaactgtacaacgagctgaacctgggcagacgggaagagtacgacgtgctggacaagcggagaggcagggaccctgagatgggcggaaagccccagcggagaaagaacccccaggaaggactgtataacgaactccagaaagacaagatggccgaagcctacagcgagatcggcatgaagggcgagcggagaagaggcaagggccacgatggcctgtaccagggcctgagcaccgccaccaaggacacctatgacgccctgcacatgcaggccctgcctccaagaagggccaagcgatctggatctggagcaacaaacttctcactactcaaacaagcaggtgacgtggaggagaatcccgggcctactagtatggactggatttggcgcatccttttccttgtcggcgctgctaccggcgcgcattccttcgaagaagtgcaactccagcagagcggccctgagcttgtgaagcctggcgcttccgtgaagatgagctgcaaggccagcggctacaccttcaccagctacgtgatgcactgggtcaagcagaaacctggacagggcctggaatggatcggctacatcaacccctacaacgacggcaccaagtacaacgagaagttcaagggcaaggccaccctgacaagcgacaccagcagcagcaccgcctacatggaactgaacagcctgaccagcgaggacagcgccgtgtacttctgcgccagacccatctacttcgacaacgactacttcgattactggggccagggcaccaccctgaaggtgtcctctacgcgtatccagaaccctgatcctgccgtgtaccagctgcgggatagcaagagcagcgacaagagcgtgtgtctgttcaccgacttcgacagccagaccaacgtgtcccagagcaaggactccgacgtgtacatcaccgataagaccgtgctggacatgcggagcatggacttcaagagcaactccgccgtggcctggtccaacaagtccgatttcgcctgcgccaacgccttcaacaacagcattatccccgaggacacattcttcccaagccccgagagcagctgcggtacccagagttttgggttgttggaccctaaattgtgctatctgttggacggaatcctgttcatttacggagtgatcctgaccgcattgttcctgcgggttaagttttccagatccgcagacgcacccgcttaccaacaagggcagaaccaactctacaatgaacttaatttggggcggagggaagagtacgacgttctggacaaaaggaggggacgagatcccgagatgggcggaaagcctcagcgaaggaagaatccgcaagaggggctttataacgaactccagaaagataaaatggcagaagcctatagtgagattgggatgaagggagaaaggaggaggggtaaaggtcacgatgggttgtaccaaggattgagcacagccactaaagatacctatgatgcgctccacatgcaggccctgccgccaaga

SEQ ID NO: 2221 - DNA, 2853 bp, Artificial Sequence
  Synthetic Polynucloetide
atggccttaccagtgaccgccttgctcctgccgctggccttgctgctccacgccgccaggccggaagtgcagctggttgaatctggcggaggactggttcagcctggcggatctctgagactgtcttgtgccgccagcggcttcagcttcagcgacttttggatgagctgggtccgacaggcccctggcaaaggacttgaatgggtcgccacaatcagccaggccggcagcgagaaggactacgtggactctgtgaagggcagattcaccatcagccgggacaacgccaagaagtccctgtacctccagatgaacagcctgagagccgaggacaccgccgtgtactattgtgcctctggcgtgtacagcttcgactacagaggccagggcaccctggtcacagtctcttctggtaccggcggaggcggatctggcggcggaggtagcggtggcggaggatctgaattcgacatccagatgacccagagccccagcagcctgtctgccagcgtgggcgacagagtgaccatcacatgcaaggccagccaggacgtgggaatcgccgtggcctggtatcagcagaaacccggcaaggtgcccaagctgctgatctactgggccagcaccagacacaccggcgtgcccgatagattttccggcagcggctccggcaccgacttcaccctgacaatcagctccctccagcccgaggacgtggcaacctactactgccagcagtacagcagctacccctacaccttcggccagggcaccaaggtggaaatcaagagactcgaggacctgaagaacgtgttcccacctgaggtggccgtgttcgagcctagcgaggccgagatcagccacacccagaaagccaccctcgtgtgcctggctaccggcttctaccccgaccatgtggaactgtcttggtgggtcaacggcaaagaggtgcacagcggcgtgtctaccgacccccagccactgaaagaacagcccgccctgaacgacagccggtactgcctgagcagcagactgagagtgtccgccaccttctggcagaacccccggaaccacttcagatgccaggtgcagttctacggcctgagcgagaacgacgagtggacccaggacagagccaagcccgtgacccagatcgtgtctgccgaagcctggggcagagccgattgcggatcccagagcttcggcctgctggaccccaagctgtgctacctgctggatggcatcctgttcatctacggcgtgatcctgaccgccctgttcctgagagtgaagttcagcagaagcgccgacgcccctgcctaccagcagggacagaaccaactgtacaacgagctgaacctgggcagacgggaagagtacgacgtgctggacaagcggagaggcagggaccctgagatgggcggaaagccccagcggagaaagaacccccaggaaggactgtataacgaactccagaaagacaagatggccgaagcctacagcgagatcggcatgaagggcgagcggagaagaggcaagggccacgatggcctgtaccagggcctgagcaccgccaccaaggacacctatgacgccctgcacatgcaggccctgcctccaagaagggccaagcgatctggatctggagcaacaaacttctcactactcaaacaagcaggtgacgtggaggagaatcccgggcctactagtatggactggatttggcgcatccttttccttgtcggcgctgctaccggcgcgcattccttcgaagaagtgcaactggtggaatcaggcggcggactggtgcagcctggcggatctctgagactgagctgtgccgccagcggcttcgacttcagccggtactggatgagctgggtgcgccaggcccctggcaaaggactggaatggatcggcgagatcaaccccgacagcagcaccatcaactacgcccccagcctgaaggacaagttcatcatcagccgggacaacgccaagaacagcctgtacctccagatgaactccctgcgggccgaggacaccgccgtgtactattgcgccagacccgacggcaactactggtacttcgacgtgtggggccagggaaccctcgtgaccgtgtcatctacgcgtatccagaaccctgatcctgccgtgtaccagctgcgggatagcaagagcagcgacaagagcgtgtgtctgttcaccgacttcgacagccagaccaacgtgtcccagagcaaggactccgacgtgtacatcaccgataagaccgtgctggacatgcggagcatggacttcaagagcaactccgccgtggcctggtccaacaagtccgatttcgcctgcgccaacgccttcaacaacagcattatccccgaggacacattcttcccaagccccgagagcagctgcggtacccagagttttgggttgttggaccctaaattgtgctatctgttggacggaatcctgttcatttacggagtgatcctgaccgcattgttcctgcgggttaagttttccagatccgcagacgcacccgcttaccaacaagggcagaaccaactctacaatgaacttaatttggggcggagggaagagtacgacgttctggacaaaaggaggggacgagatcccgagatgggcggaaagcctcagcgaaggaagaatccgcaagaggggctttataacgaactccagaaagataaaatggcagaagcctatagtgagattgggatgaagggagaaaggaggaggggtaaaggtcacgatgggttgtaccaaggattgagcacagccactaaagatacctatgatgcgctccacatgcaggccctgccgccaaga

SEQ ID NO: 2222 - DNA, 2853 bp, Artificial Sequence
  Synthetic Polynucloetide
atggccttaccagtgaccgccttgctcctgccgctggccttgctgctccacgccgccaggccggaagtgcagctggttgaatctggcggaggactggttcagcctggcggatctctgagactgtcttgtgccgccagcggcttcagcttcagcgacttttggatgagctgggtccgacaggcccctggcaaaggacttgaatgggtcgccacaatcagccaggccggcagcgagaaggactacgtggactctgtgaagggcagattcaccatcagccgggacaacgccaagaagtccctgtacctccagatgaacagcctgagagccgaggacaccgccgtgtactattgtgcctctggcgtgtacagcttcgactacagaggccagggcaccctggtcacagtctcttctggtaccggcggaggcggatctggcggcggaggtagcggtggcggaggatctgaattcgacatcgtgatgacccagagccagaagagcatgagcaccagcgtgggcgacagagtgagcatcacctgcaaggccagccaggacgtgatcaccggcgtggcctggtaccagcagaagcccggccagagccccaagctgctgatctacagcgccagctacagatacaccggcgtgcccgacagattcaccggcagcggcagcggcaccgacttcaccttcaccatcagcaacgtgcaggccgaggacctggccgtgtactactgccagcagcactacagcacccccctgaccttcggcgccggcaccaagctggagctgaagctcgaggacctgaagaacgtgttcccacctgaggtggccgtgttcgagcctagcgaggccgagatcagccacacccagaaagccaccctcgtgtgcctggctaccggcttctaccccgaccatgtggaactgtcttggtgggtcaacggcaaagaggtgcacagcggcgtgtctaccgacccccagccactgaaagaacagcccgccctgaacgacagccggtactgcctgagcagcagactgagagtgtccgccaccttctggcagaacccccggaaccacttcagatgccaggtgcagttctacggcctgagcgagaacgacgagtggacccaggacagagccaagcccgtgacccagatcgtgtctgccgaagcctggggcagagccgattgcggatcccagagcttcggcctgctggaccccaagctgtgctacctgctggatggcatcctgttcatctacggcgtgatcctgaccgccctgttcctgagagtgaagttcagcagaagcgccgacgcccctgcctaccagcagggacagaaccaactgtacaacgagctgaacctgggcagacgggaagagtacgacgtgctggacaagcggagaggcagggaccctgagatgggcggaaagccccagcggagaaagaacccccaggaaggactgtataacgaactccagaaagacaagatggccgaagcctacagcgagatcggcatgaagggcgagcggagaagaggcaagggccacgatggcctgtaccagggcctgagcaccgccaccaaggacacctatgacgccctgcacatgcaggccctgcctccaagaagggccaagcgatctggatctggagcaacaaacttctcactactcaaacaagcaggtgacgtggaggagaatcccgggcctactagtatggactggatttggcgcatccttttccttgtcggcgctgctaccggcgcgcattccttcgaacaggtgcagctgcagcagcccggcgccgagctggtgagacccggcgccagcgtgaagctgagctgcaaggccagcggctacagcttcaccacctactggatgaactgggtgaagcagagacccggccagggcctggagtggatcggcatgatccaccccagcgacagcgagaccagactgaaccagaagttcaaggacaaggccaccctgaccgtggacaagagcagcagcaccgcctacatgcagctgagcagccccaccagcgaggacagcgccgtgtactactgcgccagaagcaccatgatcgccaccagagccatggactactggggccagggcaccagcgtgaccgtgagcagcacgcgtatccagaaccctgatcctgccgtgtaccagctgcgggatagcaagagcagcgacaagagcgtgtgtctgttcaccgacttcgacagccagaccaacgtgtcccagagcaaggactccgacgtgtacatcaccgataagaccgtgctggacatgcggagcatggacttcaagagcaactccgccgtggcctggtccaacaagtccgatttcgcctgcgccaacgccttcaacaacagcattatccccgaggacacattcttcccaagccccgagagcagctgcggtacccagagttttgggttgttggaccctaaattgtgctatctgttggacggaatcctgttcatttacggagtgatcctgaccgcattgttcctgcgggttaagttttccagatccgcagacgcacccgcttaccaacaagggcagaaccaactctacaatgaacttaatttggggcggagggaagagtacgacgttctggacaaaaggaggggacgagatcccgagatgggcggaaagcctcagcgaaggaagaatccgcaagaggggctttataacgaactccagaaagataaaatggcagaagcctatagtgagattgggatgaagggagaaaggaggaggggtaaaggtcacgatgggttgtaccaaggattgagcacagccactaaagatacctatgatgcgctccacatgcaggccctgccgccaaga

SEQ ID NO: 2223 - DNA, 2871 bp, Artificial Sequence
  Synthetic Polynucloetide
atggccttaccagtgaccgccttgctcctgccgctggccttgctgctccacgccgccaggccggaagtgcagctggttgaatctggcggaggactggttcagcctggcggatctctgagactgtcttgtgccgccagcggcttcagcttcagcgacttttggatgagctgggtccgacaggcccctggcaaaggacttgaatgggtcgccacaatcagccaggccggcagcgagaaggactacgtggactctgtgaagggcagattcaccatcagccgggacaacgccaagaagtccctgtacctccagatgaacagcctgagagccgaggacaccgccgtgtactattgtgcctctggcgtgtacagcttcgactacagaggccagggcaccctggtcacagtctcttctggtaccggcggaggcggatctggcggcggaggtagcggtggcggaggatctgaattccagagcgtgctgacacagcctccatccgtgtctggcgctccaggccagagagtgaccatctcctgtaccggcagcggcagcaacatcggagccccctacgacgtgtcctggtatcagcaactgcctggcaccgcccccaagctgctgatctaccacaacaacaagcggcccagcggcgtgcccgatagattcagcggctctaagagcggcaccagcgccagcctggctatcactggactccaggccgaggacgaggccgactactactgtgccacagtggaagccggcctgagcggctctgtgtttggcggcggaacaaagctgaccgtgctgggagctctcgaggacctgaagaacgtgttcccacctgaggtggccgtgttcgagcctagcgaggccgagatcagccacacccagaaagccaccctcgtgtgcctggctaccggcttctaccccgaccatgtggaactgtcttggtgggtcaacggcaaagaggtgcacagcggcgtgtctaccgacccccagccactgaaagaacagcccgccctgaacgacagccggtactgcctgagcagcagactgagagtgtccgccaccttctggcagaacccccggaaccacttcagatgccaggtgcagttctacggcctgagcgagaacgacgagtggacccaggacagagccaagcccgtgacccagatcgtgtctgccgaagcctggggcagagccgattgcggatcccagagcttcggcctgctggaccccaagctgtgctacctgctggatggcatcctgttcatctacggcgtgatcctgaccgccctgttcctgagagtgaagttcagcagaagcgccgacgcccctgcctaccagcagggacagaaccaactgtacaacgagctgaacctgggcagacgggaagagtacgacgtgctggacaagcggagaggcagggaccctgagatgggcggaaagccccagcggagaaagaacccccaggaaggactgtataacgaactccagaaagacaagatggccgaagcctacagcgagatcggcatgaagggcgagcggagaagaggcaagggccacgatggcctgtaccagggcctgagcaccgccaccaaggacacctatgacgccctgcacatgcaggccctgcctccaagaagggccaagcgatctggatctggagcaacaaacttctcactactcaaacaagcaggtgacgtggaggagaatcccgggcctactagtatggactggatttggcgcatccttttccttgtcggcgctgctaccggcgcgcattccttcgaacaggtgcaactggtgcagagcggagccgaagtgaagaaacctggggccagcgtgaaggtgtcctgcaaggtgtccggctacaccctgaccgagctgagcattcactgggtgcgccaggcccctggcaagggactggaatggatgggcggcttcgaccccgaagagaacgagatcgtgtacgcccagcggttccagggcagagtgacaatgaccgaggacaccagcaccgacaccgcctacatggaactgagcagcctgcggagcgaggataccgccgtgtactactgcgccatcgtgggcagcttcagccctctgacactgggcctgtggggccagggaactatggtcaccgtgtccagcacgcgtatccagaaccctgatcctgccgtgtaccagctgcgggatagcaagagcagcgacaagagcgtgtgtctgttcaccgacttcgacagccagaccaacgtgtcccagagcaaggactccgacgtgtacatcaccgataagaccgtgctggacatgcggagcatggacttcaagagcaactccgccgtggcctggtccaacaagtccgatttcgcctgcgccaacgccttcaacaacagcattatccccgaggacacattcttcccaagccccgagagcagctgcggtacccagagttttgggttgttggaccctaaattgtgctatctgttggacggaatcctgttcatttacggagtgatcctgaccgcattgttcctgcgggttaagttttccagatccgcagacgcacccgcttaccaacaagggcagaaccaactctacaatgaacttaatttggggcggagggaagagtacgacgttctggacaaaaggaggggacgagatcccgagatgggcggaaagcctcagcgaaggaagaatccgcaagaggggctttataacgaactccagaaagataaaatggcagaagcctatagtgagattgggatgaagggagaaaggaggaggggtaaaggtcacgatgggttgtaccaaggattgagcacagccactaaagatacctatgatgcgctccacatgcaggccctgccgccaaga

SEQ ID NO: 2224 - DNA, 2871 bp, Artificial Sequence
  Synthetic Polynucloetide
atggccttaccagtgaccgccttgctcctgccgctggccttgctgctccacgccgccaggccggaagtgcagctggttgaatctggcggaggactggttcagcctggcggatctctgagactgtcttgtgccgccagcggcttcagcttcagcgacttttggatgagctgggtccgacaggcccctggcaaaggacttgaatgggtcgccacaatcagccaggccggcagcgagaaggactacgtggactctgtgaagggcagattcaccatcagccgggacaacgccaagaagtccctgtacctccagatgaacagcctgagagccgaggacaccgccgtgtactattgtgcctctggcgtgtacagcttcgactacagaggccagggcaccctggtcacagtctcttctggtaccggcggaggcggatctggcggcggaggtagcggtggcggaggatctgaattccagagcgtgctgacacagcctccatccgtgtctggcgctccaggccagagagtgaccatctcctgtaccggcagcggcagcaacatcggagccccctacgacgtgtcctggtatcagcaactgcctggcaccgcccccaagctgctgatctaccacaacaacaagcggcccagcggcgtgcccgatagattcagcggctctaagagcggcaccagcgccagcctggctatcactggactccaggccgaggacgaggccgactactactgccagagctacgacagcagcagcatcagcaccatcttcggcggaggcaccaagctgacagtgctgggagctctcgaggacctgaagaacgtgttcccacctgaggtggccgtgttcgagcctagcgaggccgagatcagccacacccagaaagccaccctcgtgtgcctggctaccggcttctaccccgaccatgtggaactgtcttggtgggtcaacggcaaagaggtgcacagcggcgtgtctaccgacccccagccactgaaagaacagcccgccctgaacgacagccggtactgcctgagcagcagactgagagtgtccgccaccttctggcagaacccccggaaccacttcagatgccaggtgcagttctacggcctgagcgagaacgacgagtggacccaggacagagccaagcccgtgacccagatcgtgtctgccgaagcctggggcagagccgattgcggatcccagagcttcggcctgctggaccccaagctgtgctacctgctggatggcatcctgttcatctacggcgtgatcctgaccgccctgttcctgagagtgaagttcagcagaagcgccgacgcccctgcctaccagcagggacagaaccaactgtacaacgagctgaacctgggcagacgggaagagtacgacgtgctggacaagcggagaggcagggaccctgagatgggcggaaagccccagcggagaaagaacccccaggaaggactgtataacgaactccagaaagacaagatggccgaagcctacagcgagatcggcatgaagggcgagcggagaagaggcaagggccacgatggcctgtaccagggcctgagcaccgccaccaaggacacctatgacgccctgcacatgcaggccctgcctccaagaagggccaagcgatctggatctggagcaacaaacttctcactactcaaacaagcaggtgacgtggaggagaatcccgggcctactagtatggactggatttggcgcatccttttccttgtcggcgctgctaccggcgcgcattccttcgaacaggtgcaactggtgcagagcggagccgaagtgaagaaacctggggccagcgtgaaggtgtcctgcaaggtgtccggctacaccctgaccgagctgagcattcactgggtgcgccaggcccctggcaagggactggaatggatgggcggcttcgaccccgaagagaacgagatcgtgtacgcccagcggttccagggcagagtgacaatgaccgaggacaccagcaccgacaccgcctacatggaactgagcagcctgcggagcgaggataccgccgtgtactactgtgccatcgtgggcagcttcagcggaatcgcctacagaccttggggccagggcacaatggtcaccgtgtctagcacgcgtatccagaaccctgatcctgccgtgtaccagctgcgggatagcaagagcagcgacaagagcgtgtgtctgttcaccgacttcgacagccagaccaacgtgtcccagagcaaggactccgacgtgtacatcaccgataagaccgtgctggacatgcggagcatggacttcaagagcaactccgccgtggcctggtccaacaagtccgatttcgcctgcgccaacgccttcaacaacagcattatccccgaggacacattcttcccaagccccgagagcagctgcggtacccagagttttgggttgttggaccctaaattgtgctatctgttggacggaatcctgttcatttacggagtgatcctgaccgcattgttcctgcgggttaagttttccagatccgcagacgcacccgcttaccaacaagggcagaaccaactctacaatgaacttaatttggggcggagggaagagtacgacgttctggacaaaaggaggggacgagatcccgagatgggcggaaagcctcagcgaaggaagaatccgcaagaggggctttataacgaactccagaaagataaaatggcagaagcctatagtgagattgggatgaagggagaaaggaggaggggtaaaggtcacgatgggttgtaccaaggattgagcacagccactaaagatacctatgatgcgctccacatgcaggccctgccgccaaga

SEQ ID NO: 2225 - DNA, 2835 bp, Artificial Sequence
  Synthetic Polynucloetide
atggccttaccagtgaccgccttgctcctgccgctggccttgctgctccacgccgccaggccggaagtgcagctggttgaatctggcggaggactggttcagcctggcggatctctgagactgtcttgtgccgccagcggcttcagcttcagcgacttttggatgagctgggtccgacaggcccctggcaaaggacttgaatgggtcgccacaatcagccaggccggcagcgagaaggactacgtggactctgtgaagggcagattcaccatcagccgggacaacgccaagaagtccctgtacctccagatgaacagcctgagagccgaggacaccgccgtgtactattgtgcctctggcgtgtacagcttcgactacagaggccagggcaccctggtcacagtctcttctggtaccggcggaggcggatctggcggcggaggtagcggtggcggaggatctgaattcgacatccagatgacccagagccccagcagcctgtctgccagcgtgggcgacagagtgaccatcacctgtagagccagccagggcatcagaaacaacctggcctggtatcagcagaagcccggcaaggcccccaagcggctgatctacgccgccagcaatctccagagcggcgtgcccagcagattcacaggctctggcagcggcaccgagttcaccctgatcgtgtctagcctccagcccgaggacttcgccacctactactgcctccagcaccacagctaccccctgacatctggcggaggcaccaaggtggaactcgaggacctgaagaacgtgttcccacctgaggtggccgtgttcgagcctagcgaggccgagatcagccacacccagaaagccaccctcgtgtgcctggctaccggcttctaccccgaccatgtggaactgtcttggtgggtcaacggcaaagaggtgcacagcggcgtgtctaccgacccccagccactgaaagaacagcccgccctgaacgacagccggtactgcctgagcagcagactgagagtgtccgccaccttctggcagaacccccggaaccacttcagatgccaggtgcagttctacggcctgagcgagaacgacgagtggacccaggacagagccaagcccgtgacccagatcgtgtctgccgaagcctggggcagagccgattgcggatcccagagcttcggcctgctggaccccaagctgtgctacctgctggatggcatcctgttcatctacggcgtgatcctgaccgccctgttcctgagagtgaagttcagcagaagcgccgacgcccctgcctaccagcagggacagaaccaactgtacaacgagctgaacctgggcagacgggaagagtacgacgtgctggacaagcggagaggcagggaccctgagatgggcggaaagccccagcggagaaagaacccccaggaaggactgtataacgaactccagaaagacaagatggccgaagcctacagcgagatcggcatgaagggcgagcggagaagaggcaagggccacgatggcctgtaccagggcctgagcaccgccaccaaggacacctatgacgccctgcacatgcaggccctgcctccaagaagggccaagcgatctggatctggagcaacaaacttctcactactcaaacaagcaggtgacgtggaggagaatcccgggcctactagtatggactggatttggcgcatccttttccttgtcggcgctgctaccggcgcgcattccttcgaagaggtgcaggtgctggaaagtggcggaggactggtgcagcctggcggctctctgagactgtcttgtgccgccagcggcttcaccttcagcagctacgccatgagctgggtgcgccaggcccctggaaaaggactggaatgggtgtccgccatcagcggctctggcgggtctaccaactacgccgatagcgtgaagggccggttcaccatcagccgggacaacagcaagaacaccctgtacctccagatgaacagcctgcgggccgaggacaccgccgtgtattattgtgccggcagcagcgggtggagcgagtattggggacagggcaccctcgtgaccgtgtcctctacgcgtatccagaaccctgatcctgccgtgtaccagctgcgggatagcaagagcagcgacaagagcgtgtgtctgttcaccgacttcgacagccagaccaacgtgtcccagagcaaggactccgacgtgtacatcaccgataagaccgtgctggacatgcggagcatggacttcaagagcaactccgccgtggcctggtccaacaagtccgatttcgcctgcgccaacgccttcaacaacagcattatccccgaggacacattcttcccaagccccgagagcagctgcggtacccagagttttgggttgttggaccctaaattgtgctatctgttggacggaatcctgttcatttacggagtgatcctgaccgcattgttcctgcgggttaagttttccagatccgcagacgcacccgcttaccaacaagggcagaaccaactctacaatgaacttaatttggggcggagggaagagtacgacgttctggacaaaaggaggggacgagatcccgagatgggcggaaagcctcagcgaaggaagaatccgcaagaggggctttataacgaactccagaaagataaaatggcagaagcctatagtgagattgggatgaagggagaaaggaggaggggtaaaggtcacgatgggttgtaccaaggattgagcacagccactaaagatacctatgatgcgctccacatgcaggccctgccgccaaga

SEQ ID NO: 2226 - DNA, 2853 bp, Artificial Sequence
  Synthetic Polynucloetide
atggccttaccagtgaccgccttgctcctgccgctggccttgctgctccacgccgccaggccggaagtgcagctggttgaatctggcggaggactggttcagcctggcggatctctgagactgtcttgtgccgccagcggcttcagcttcagcgacttttggatgagctgggtccgacaggcccctggcaaaggacttgaatgggtcgccacaatcagccaggccggcagcgagaaggactacgtggactctgtgaagggcagattcaccatcagccgggacaacgccaagaagtccctgtacctccagatgaacagcctgagagccgaggacaccgccgtgtactattgtgcctctggcgtgtacagcttcgactacagaggccagggcaccctggtcacagtctcttctggtaccggcggaggcggatctggcggcggaggtagcggtggcggaggatctgaattcgacgagatccagctggtgcagagcggagccgaagtgaagaagcctggcgagagcctgcggatcagctgcaagggcagcggcttcaacatcgaggactactacatccactgggtgcgccagatgcccggcaagggcctggaatggatgggcagaatcgaccccgagaacgacgagactaagtacggccccatcttccagggccacgtgaccatcagcgccgacaccagcatcaacaccgtgtacctccagtggtccagcctgaaggccagcgacaccgccatgtactactgcgcctttagaggcggcgtgtactggggccagggcaccacagtgacagtgtctagcctcgaggacctgaagaacgtgttcccacctgaggtggccgtgttcgagcctagcgaggccgagatcagccacacccagaaagccaccctcgtgtgcctggctaccggcttctaccccgaccatgtggaactgtcttggtgggtcaacggcaaagaggtgcacagcggcgtgtctaccgacccccagccactgaaagaacagcccgccctgaacgacagccggtactgcctgagcagcagactgagagtgtccgccaccttctggcagaacccccggaaccacttcagatgccaggtgcagttctacggcctgagcgagaacgacgagtggacccaggacagagccaagcccgtgacccagatcgtgtctgccgaagcctggggcagagccgattgcggatcccagagcttcggcctgctggaccccaagctgtgctacctgctggatggcatcctgttcatctacggcgtgatcctgaccgccctgttcctgagagtgaagttcagcagaagcgccgacgcccctgcctaccagcagggacagaaccaactgtacaacgagctgaacctgggcagacgggaagagtacgacgtgctggacaagcggagaggcagggaccctgagatgggcggaaagccccagcggagaaagaacccccaggaaggactgtataacgaactccagaaagacaagatggccgaagcctacagcgagatcggcatgaagggcgagcggagaagaggcaagggccacgatggcctgtaccagggcctgagcaccgccaccaaggacacctatgacgccctgcacatgcaggccctgcctccaagaagggccaagcgatctggatctggagcaacaaacttctcactactcaaacaagcaggtgacgtggaggagaatcccgggcctactagtatggactggatttggcgcatccttttccttgtcggcgctgctaccggcgcgcattccttcgaagatgtcgtgatgacccagagccccgacagcctggctgtgtctctgggagagagagccaccatcaactgcaagtccagccagtccctgctggacagcgacggcaagacctacctgaactggctccagcagaagcccggccagccccccaagagactgatctccctggtgtccaagctggactccggcgtgcccgatagattttccggctctggcagcggcaccgacttcaccctgacaatcagctcccttcaggccgaggacgtggccgtgtactattgctggcagggcacacacttccccggcacctttggcggaggcaccaaggtggaaatcaagacgcgtatccagaaccctgatcctgccgtgtaccagctgcgggatagcaagagcagcgacaagagcgtgtgtctgttcaccgacttcgacagccagaccaacgtgtcccagagcaaggactccgacgtgtacatcaccgataagaccgtgctggacatgcggagcatggacttcaagagcaactccgccgtggcctggtccaacaagtccgatttcgcctgcgccaacgccttcaacaacagcattatccccgaggacacattcttcccaagccccgagagcagctgcggtacccagagttttgggttgttggaccctaaattgtgctatctgttggacggaatcctgttcatttacggagtgatcctgaccgcattgttcctgcgggttaagttttccagatccgcagacgcacccgcttaccaacaagggcagaaccaactctacaatgaacttaatttggggcggagggaagagtacgacgttctggacaaaaggaggggacgagatcccgagatgggcggaaagcctcagcgaaggaagaatccgcaagaggggctttataacgaactccagaaagataaaatggcagaagcctatagtgagattgggatgaagggagaaaggaggaggggtaaaggtcacgatgggttgtaccaaggattgagcacagccactaaagatacctatgatgcgctccacatgcaggccctgccgccaaga

SEQ ID NO: 2227 - DNA, 2874 bp, Artificial Sequence
  Synthetic Polynucloetide
atggccttaccagtgaccgccttgctcctgccgctggccttgctgctccacgccgccaggccggaagtgcagctggttgaatctggcggaggactggttcagcctggcggatctctgagactgtcttgtgccgccagcggcttcagcttcagcgacttttggatgagctgggtccgacaggcccctggcaaaggacttgaatgggtcgccacaatcagccaggccggcagcgagaaggactacgtggactctgtgaagggcagattcaccatcagccgggacaacgccaagaagtccctgtacctccagatgaacagcctgagagccgaggacaccgccgtgtactattgtgcctctggcgtgtacagcttcgactacagaggccagggcaccctggtcacagtctcttctggtaccggcggaggcggatctggcggcggaggtagcggtggcggaggatctgaattcgacgagcttgtgatgacccagagccccagcagcctgacagtgacagccggcgagaaagtgaccatgagctgcaagagcagccagagcctgctgaacagcggcaaccagaagaactacctgacctggtatcagcagaagcccggccagccccccaagctgctgatctactgggccagcaccagagaaagcggcgtgcccgatagattcaccggctctggcagcggcaccgacttcaccctgacaatcagcagcgtgcaggccgaggacctggccgtgtactactgccagaacgactacagctaccccctgaccttcggagccggcaccaagctggaaatcaagctcgaggacctgaagaacgtgttcccacctgaggtggccgtgttcgagcctagcgaggccgagatcagccacacccagaaagccaccctcgtgtgcctggctaccggcttctaccccgaccatgtggaactgtcttggtgggtcaacggcaaagaggtgcacagcggcgtgtctaccgacccccagccactgaaagaacagcccgccctgaacgacagccggtactgcctgagcagcagactgagagtgtccgccaccttctggcagaacccccggaaccacttcagatgccaggtgcagttctacggcctgagcgagaacgacgagtggacccaggacagagccaagcccgtgacccagatcgtgtctgccgaagcctggggcagagccgattgcggatcccagagcttcggcctgctggaccccaagctgtgctacctgctggatggcatcctgttcatctacggcgtgatcctgaccgccctgttcctgagagtgaagttcagcagaagcgccgacgcccctgcctaccagcagggacagaaccaactgtacaacgagctgaacctgggcagacgggaagagtacgacgtgctggacaagcggagaggcagggaccctgagatgggcggaaagccccagcggagaaagaacccccaggaaggactgtataacgaactccagaaagacaagatggccgaagcctacagcgagatcggcatgaagggcgagcggagaagaggcaagggccacgatggcctgtaccagggcctgagcaccgccaccaaggacacctatgacgccctgcacatgcaggccctgcctccaagaagggccaagcgatctggatctggagcaacaaacttctcactactcaaacaagcaggtgacgtggaggagaatcccgggcctactagtatggactggatttggcgcatccttttccttgtcggcgctgctaccggcgcgcattccttcgaagaagtgcagctgctggaacagtctggcgccgaacttgtgcggcctggcaccagcgtgaagatcagctgtaaagccagcggctacgccttcaccaactactggctgggctgggtcaagcagaggcctggacacggcctggaatggatcggcgacatctttcccggctccggcaacatccactacaacgagaagttcaagggcaaggccaccctgaccgccgacaagtctagcagcaccgcctacatgcagctgtccagcctgacctttgaggacagcgccgtgtatttctgtgcccggctgcggaactgggacgagcccatggattattggggccagggcaccaccgtgaccgtgtctagtacgcgtatccagaaccctgatcctgccgtgtaccagctgcgggatagcaagagcagcgacaagagcgtgtgtctgttcaccgacttcgacagccagaccaacgtgtcccagagcaaggactccgacgtgtacatcaccgataagaccgtgctggacatgcggagcatggacttcaagagcaactccgccgtggcctggtccaacaagtccgatttcgcctgcgccaacgccttcaacaacagcattatccccgaggacacattcttcccaagccccgagagcagctgcggtacccagagttttgggttgttggaccctaaattgtgctatctgttggacggaatcctgttcatttacggagtgatcctgaccgcattgttcctgcgggttaagttttccagatccgcagacgcacccgcttaccaacaagggcagaaccaactctacaatgaacttaatttggggcggagggaagagtacgacgttctggacaaaaggaggggacgagatcccgagatgggcggaaagcctcagcgaaggaagaatccgcaagaggggctttataacgaactccagaaagataaaatggcagaagcctatagtgagattgggatgaagggagaaaggaggaggggtaaaggtcacgatgggttgtaccaaggattgagcacagccactaaagatacctatgatgcgctccacatgcaggccctgccgccaaga

SEQ ID NO: 2228 - DNA, 2877 bp, Artificial Sequence
  Synthetic Polynucloetide
atggccttaccagtgaccgccttgctcctgccgctggccttgctgctccacgccgccaggccggaagtgcagctggttgaatctggcggaggactggttcagcctggcggatctctgagactgtcttgtgccgccagcggcttcagcttcagcgacttttggatgagctgggtccgacaggcccctggcaaaggacttgaatgggtcgccacaatcagccaggccggcagcgagaaggactacgtggactctgtgaagggcagattcaccatcagccgggacaacgccaagaagtccctgtacctccagatgaacagcctgagagccgaggacaccgccgtgtactattgtgcctctggcgtgtacagcttcgactacagaggccagggcaccctggtcacagtctcttctggtaccggcggaggcggatctggcggcggaggtagcggtggcggaggatctgaattcgacgagctgcagatgacccagagccctagcagcctgtctgccagcgtgggcgacagagtgaccatcacctgtagagccagccagagcatcagcagctacctgaactggtatcagcagaagcccggccagccccccaaactgctgatctactgggccagcaccagagaaagcggcgtgcccgatagattcagcggcagcgagagcggcaccaactacaccctgaccatcagctccctgcagcccgaggacttcgccacctacttttgccagcagagcgacagcctgcccatcacctttggacagggcacccggctggacattcagctcgaggacctgaagaacgtgttcccacctgaggtggccgtgttcgagcctagcgaggccgagatcagccacacccagaaagccaccctcgtgtgcctggctaccggcttctaccccgaccatgtggaactgtcttggtgggtcaacggcaaagaggtgcacagcggcgtgtctaccgacccccagccactgaaagaacagcccgccctgaacgacagccggtactgcctgagcagcagactgagagtgtccgccaccttctggcagaacccccggaaccacttcagatgccaggtgcagttctacggcctgagcgagaacgacgagtggacccaggacagagccaagcccgtgacccagatcgtgtctgccgaagcctggggcagagccgattgcggatcccagagcttcggcctgctggaccccaagctgtgctacctgctggatggcatcctgttcatctacggcgtgatcctgaccgccctgttcctgagagtgaagttcagcagaagcgccgacgcccctgcctaccagcagggacagaaccaactgtacaacgagctgaacctgggcagacgggaagagtacgacgtgctggacaagcggagaggcagggaccctgagatgggcggaaagccccagcggagaaagaacccccaggaaggactgtataacgaactccagaaagacaagatggccgaagcctacagcgagatcggcatgaagggcgagcggagaagaggcaagggccacgatggcctgtaccagggcctgagcaccgccaccaaggacacctatgacgccctgcacatgcaggccctgcctccaagaagggccaagcgatctggatctggagcaacaaacttctcactactcaaacaagcaggtgacgtggaggagaatcccgggcctactagtatggactggatttggcgcatccttttccttgtcggcgctgctaccggcgcgcattccttcgaagaggtgcaactgctggaatctgggggcggagtggtgcagcctggcagaagcctgagactgagctgtgccgccagcggcttcaccttcagctcctacggaatgcactgggtgcgccaggcccctggcaaaggactggaatgggtggccgtgatctcctacgacggcagcaacaagtactacgccgacagcgtgaagggccggttcaccatcagccgggacaacagcaagaacaccctgtacctgcagatgaacagcctgcgggccgaggacaccgccgtgtactactgcgccaaggatatgggctggggcagcggctggcggccttactactactacggcatggacgtgtggggccagggcaccaccgtgacagtgtcatctacgcgtatccagaaccctgatcctgccgtgtaccagctgcgggatagcaagagcagcgacaagagcgtgtgtctgttcaccgacttcgacagccagaccaacgtgtcccagagcaaggactccgacgtgtacatcaccgataagaccgtgctggacatgcggagcatggacttcaagagcaactccgccgtggcctggtccaacaagtccgatttcgcctgcgccaacgccttcaacaacagcattatccccgaggacacattcttcccaagccccgagagcagctgcggtacccagagttttgggttgttggaccctaaattgtgctatctgttggacggaatcctgttcatttacggagtgatcctgaccgcattgttcctgcgggttaagttttccagatccgcagacgcacccgcttaccaacaagggcagaaccaactctacaatgaacttaatttggggcggagggaagagtacgacgttctggacaaaaggaggggacgagatcccgagatgggcggaaagcctcagcgaaggaagaatccgcaagaggggctttataacgaactccagaaagataaaatggcagaagcctatagtgagattgggatgaagggagaaaggaggaggggtaaaggtcacgatgggttgtaccaaggattgagcacagccactaaagatacctatgatgcgctccacatgcaggccctgccgccaaga

SEQ ID NO: 2229 - DNA, 2868 bp, Artificial Sequence
  Synthetic Polynucloetide
atggccttaccagtgaccgccttgctcctgccgctggccttgctgctccacgccgccaggccggaagtgcagctggttgaatctggcggaggactggttcagcctggcggatctctgagactgtcttgtgccgccagcggcttcagcttcagcgacttttggatgagctgggtccgacaggcccctggcaaaggacttgaatgggtcgccacaatcagccaggccggcagcgagaaggactacgtggactctgtgaagggcagattcaccatcagccgggacaacgccaagaagtccctgtacctccagatgaacagcctgagagccgaggacaccgccgtgtactattgtgcctctggcgtgtacagcttcgactacagaggccagggcaccctggtcacagtctcttctggtaccggcggaggcggatctggcggcggaggtagcggtggcggaggatctgaattcgacgacatccaaatgacacagagtccttctagtttgagtgcgagcgtgggggacagggtgaccattacctgcagggccagccagagcataagctcataccttaattggtaccagcaaaaaccaggtaaggcccctaagctcctgatctacgcggcctcttcacttcaatctggggtcccttcccgcttcagtggctccggcagcggcaccgacttcacgctcactatatcaagtctgcagcctgaggatctcgccacctattactgtcaacaaagttattccacccctttcacctttggaccgggcacgaaagtggatattaagctcgaggacctgaagaacgtgttcccacctgaggtggccgtgttcgagcctagcgaggccgagatcagccacacccagaaagccaccctcgtgtgcctggctaccggcttctaccccgaccatgtggaactgtcttggtgggtcaacggcaaagaggtgcacagcggcgtgtctaccgacccccagccactgaaagaacagcccgccctgaacgacagccggtactgcctgagcagcagactgagagtgtccgccaccttctggcagaacccccggaaccacttcagatgccaggtgcagttctacggcctgagcgagaacgacgagtggacccaggacagagccaagcccgtgacccagatcgtgtctgccgaagcctggggcagagccgattgcggatcccagagcttcggcctgctggaccccaagctgtgctacctgctggatggcatcctgttcatctacggcgtgatcctgaccgccctgttcctgagagtgaagttcagcagaagcgccgacgcccctgcctaccagcagggacagaaccaactgtacaacgagctgaacctgggcagacgggaagagtacgacgtgctggacaagcggagaggcagggaccctgagatgggcggaaagccccagcggagaaagaacccccaggaaggactgtataacgaactccagaaagacaagatggccgaagcctacagcgagatcggcatgaagggcgagcggagaagaggcaagggccacgatggcctgtaccagggcctgagcaccgccaccaaggacacctatgacgccctgcacatgcaggccctgcctccaagaagggccaagcgatctggatctggagcaacaaacttctcactactcaaacaagcaggtgacgtggaggagaatcccgggcctactagtatggactggatttggcgcatccttttccttgtcggcgctgctaccggcgcgcattccttcgaagtgcacgaggtccagcttgtgcagtccggggcagaggtcaagaagcctggttctagcgtaaaagtgagttgcaaagcctcaggtgggacattttcatcctacgcgatcagttgggttagacaggctcctggtcaagggctggaatggatgggcggaattattccaatcttcggaacagcgaattacgcgcagaagttccagggtagagtaaccatcactgctgacaagtccacctccaccgcatacatggaattgtctagtctccggagcgaggatacggcggtgtattattgtgctacgttcgccctgtttggcttccgcgaacaggctttcgacatctgggggcagggcacgacagtcacggttagtagtacgcgtatccagaaccctgatcctgccgtgtaccagctgcgggatagcaagagcagcgacaagagcgtgtgtctgttcaccgacttcgacagccagaccaacgtgtcccagagcaaggactccgacgtgtacatcaccgataagaccgtgctggacatgcggagcatggacttcaagagcaactccgccgtggcctggtccaacaagtccgatttcgcctgcgccaacgccttcaacaacagcattatccccgaggacacattcttcccaagccccgagagcagctgcggtacccagagttttgggttgttggaccctaaattgtgctatctgttggacggaatcctgttcatttacggagtgatcctgaccgcattgttcctgcgggttaagttttccagatccgcagacgcacccgcttaccaacaagggcagaaccaactctacaatgaacttaatttggggcggagggaagagtacgacgttctggacaaaaggaggggacgagatcccgagatgggcggaaagcctcagcgaaggaagaatccgcaagaggggctttataacgaactccagaaagataaaatggcagaagcctatagtgagattgggatgaagggagaaaggaggaggggtaaaggtcacgatgggttgtaccaaggattgagcacagccactaaagatacctatgatgcgctccacatgcaggccctgccgccaaga

SEQ ID NO: 2230 - DNA, 2862 bp, Artificial Sequence
  Synthetic Polynucloetide
atggccttaccagtgaccgccttgctcctgccgctggccttgctgctccacgccgccaggccggaagtgcagctggttgaatctggcggaggactggttcagcctggcggatctctgagactgtcttgtgccgccagcggcttcagcttcagcgacttttggatgagctgggtccgacaggcccctggcaaaggacttgaatgggtcgccacaatcagccaggccggcagcgagaaggactacgtggactctgtgaagggcagattcaccatcagccgggacaacgccaagaagtccctgtacctccagatgaacagcctgagagccgaggacaccgccgtgtactattgtgcctctggcgtgtacagcttcgactacagaggccagggcaccctggtcacagtctcttctggtaccggcggaggcggatctggcggcggaggtagcggtggcggaggatctgaattcgacatcgtgctgacccagagccctctgagcctggccgtgtctctgggacagcctgccatcatcagctgcaaggccagccagagcgtgtcctttgccggcacctctctgatgcactggtatcaccagaagcccggccagcagcccagactgctgatctacagagccagcaacctggaagccggcgtgcccgatagattttccggcagcggcagcaagaccgacttcaccctgaccatcagccccgtggaagccgaagatgccgccacctactactgccagcagagcagagagtacccctacaccttcggcggaggcaccaagctggaaatcaagaggctcgaggacctgaagaacgtgttcccacctgaggtggccgtgttcgagcctagcgaggccgagatcagccacacccagaaagccaccctcgtgtgcctggctaccggcttctaccccgaccatgtggaactgtcttggtgggtcaacggcaaagaggtgcacagcggcgtgtctaccgacccccagccactgaaagaacagcccgccctgaacgacagccggtactgcctgagcagcagactgagagtgtccgccaccttctggcagaacccccggaaccacttcagatgccaggtgcagttctacggcctgagcgagaacgacgagtggacccaggacagagccaagcccgtgacccagatcgtgtctgccgaagcctggggcagagccgattgcggatcccagagcttcggcctgctggaccccaagctgtgctacctgctggatggcatcctgttcatctacggcgtgatcctgaccgccctgttcctgagagtgaagttcagcagaagcgccgacgcccctgcctaccagcagggacagaaccaactgtacaacgagctgaacctgggcagacgggaagagtacgacgtgctggacaagcggagaggcagggaccctgagatgggcggaaagccccagcggagaaagaacccccaggaaggactgtataacgaactccagaaagacaagatggccgaagcctacagcgagatcggcatgaagggcgagcggagaagaggcaagggccacgatggcctgtaccagggcctgagcaccgccaccaaggacacctatgacgccctgcacatgcaggccctgcctccaagaagggccaagcgatctggatctggagcaacaaacttctcactactcaaacaagcaggtgacgtggaggagaatcccgggcctactagtatggactggatttggcgcatccttttccttgtcggcgctgctaccggcgcgcattccttcgaacaggtccaactggtgcagagcggagccgaggtcgtgaagcctggcgcttccgtgaagattagctgcaaagccagcggctacacctttaccggctactttatgaactgggtcaagcagagccctggccagagcctggaatggatcggcagaatccacccctacgacggcgacaccttctacaaccagaagttccagggcaaggccaccctgacagtggacaagagcagcaacaccgcccacatggaactgctgagcctgaccagcgaggacttcgccgtgtactactgcaccagatacgacggcagccgggctatggactattggggccagggcaccaccgtgaccgtgtctagtacgcgtatccagaaccctgatcctgccgtgtaccagctgcgggatagcaagagcagcgacaagagcgtgtgtctgttcaccgacttcgacagccagaccaacgtgtcccagagcaaggactccgacgtgtacatcaccgataagaccgtgctggacatgcggagcatggacttcaagagcaactccgccgtggcctggtccaacaagtccgatttcgcctgcgccaacgccttcaacaacagcattatccccgaggacacattcttcccaagccccgagagcagctgcggtacccagagttttgggttgttggaccctaaattgtgctatctgttggacggaatcctgttcatttacggagtgatcctgaccgcattgttcctgcgggttaagttttccagatccgcagacgcacccgcttaccaacaagggcagaaccaactctacaatgaacttaatttggggcggagggaagagtacgacgttctggacaaaaggaggggacgagatcccgagatgggcggaaagcctcagcgaaggaagaatccgcaagaggggctttataacgaactccagaaagataaaatggcagaagcctatagtgagattgggatgaagggagaaaggaggaggggtaaaggtcacgatgggttgtaccaaggattgagcacagccactaaagatacctatgatgcgctccacatgcaggccctgccgccaaga

SEQ ID NO: 2231 - DNA, 2853 bp, Artificial Sequence
  Synthetic Polynucloetide
atggccttaccagtgaccgccttgctcctgccgctggccttgctgctccacgccgccaggccggaagtgcagctggttgaatctggcggaggactggttcagcctggcggatctctgagactgtcttgtgccgccagcggcttcagcttcagcgacttttggatgagctgggtccgacaggcccctggcaaaggacttgaatgggtcgccacaatcagccaggccggcagcgagaaggactacgtggactctgtgaagggcagattcaccatcagccgggacaacgccaagaagtccctgtacctccagatgaacagcctgagagccgaggacaccgccgtgtactattgtgcctctggcgtgtacagcttcgactacagaggccagggcaccctggtcacagtctcttctggtaccggcggaggcggatctggcggcggaggtagcggtggcggaggatctgaattcgacgacgttgtgatgacccagacccccctgagcctgcctgtgacacctggcgaacctgccagcatcagctgtcggagcagccagagcctggtgcacagaaacggcaacacctacctgcactggtatctccagaagcccggccagagccccaagctgctgatccacaaggtgtccaacagattcagcggcgtgcccgacagattctccggcagcggctctggcaccgacttcaccctgaagatcagccgggtggaagccgaggacctgggcgtgtacttctgtagccagagcacccatgtgccccccctgacatttggagccggcaccaagctggaactgaagctcgaggacctgaagaacgtgttcccacctgaggtggccgtgttcgagcctagcgaggccgagatcagccacacccagaaagccaccctcgtgtgcctggctaccggcttctaccccgaccatgtggaactgtcttggtgggtcaacggcaaagaggtgcacagcggcgtgtctaccgacccccagccactgaaagaacagcccgccctgaacgacagccggtactgcctgagcagcagactgagagtgtccgccaccttctggcagaacccccggaaccacttcagatgccaggtgcagttctacggcctgagcgagaacgacgagtggacccaggacagagccaagcccgtgacccagatcgtgtctgccgaagcctggggcagagccgattgcggatcccagagcttcggcctgctggaccccaagctgtgctacctgctggatggcatcctgttcatctacggcgtgatcctgaccgccctgttcctgagagtgaagttcagcagaagcgccgacgcccctgcctaccagcagggacagaaccaactgtacaacgagctgaacctgggcagacgggaagagtacgacgtgctggacaagcggagaggcagggaccctgagatgggcggaaagccccagcggagaaagaacccccaggaaggactgtataacgaactccagaaagacaagatggccgaagcctacagcgagatcggcatgaagggcgagcggagaagaggcaagggccacgatggcctgtaccagggcctgagcaccgccaccaaggacacctatgacgccctgcacatgcaggccctgcctccaagaagggccaagcgatctggatctggagcaacaaacttctcactactcaaacaagcaggtgacgtggaggagaatcccgggcctactagtatggactggatttggcgcatccttttccttgtcggcgctgctaccggcgcgcattccttcgaagaagtgcagctggtgcagtctggcgctgaggtggaaaagcctggggccagcgtgaagattagctgcaaggccagcggcagcagcttcaccggctacaacatgaactgggtgcgccagaacatcggcaagagcctggaatggatcggagccatcgacccctactacggcggcaccagctacaaccagaagttcaagggcagagccaccctgaccgtggacaagagcaccagcaccgcctacatgcacctgaagtccctgcggagcgaggacaccgccgtgtactactgtgtgtccggcatggaatattggggccagggcaccagcgtgaccgtgtctagtacgcgtatccagaaccctgatcctgccgtgtaccagctgcgggatagcaagagcagcgacaagagcgtgtgtctgttcaccgacttcgacagccagaccaacgtgtcccagagcaaggactccgacgtgtacatcaccgataagaccgtgctggacatgcggagcatggacttcaagagcaactccgccgtggcctggtccaacaagtccgatttcgcctgcgccaacgccttcaacaacagcattatccccgaggacacattcttcccaagccccgagagcagctgcggtacccagagttttgggttgttggaccctaaattgtgctatctgttggacggaatcctgttcatttacggagtgatcctgaccgcattgttcctgcgggttaagttttccagatccgcagacgcacccgcttaccaacaagggcagaaccaactctacaatgaacttaatttggggcggagggaagagtacgacgttctggacaaaaggaggggacgagatcccgagatgggcggaaagcctcagcgaaggaagaatccgcaagaggggctttataacgaactccagaaagataaaatggcagaagcctatagtgagattgggatgaagggagaaaggaggaggggtaaaggtcacgatgggttgtaccaaggattgagcacagccactaaagatacctatgatgcgctccacatgcaggccctgccgccaaga

SEQ ID NO: 2232 - DNA, 2847 bp, Artificial Sequence
  Synthetic Polynucloetide
atggccttaccagtgaccgccttgctcctgccgctggccttgctgctccacgccgccaggccggaagtgcagctggttgaatctggcggaggactggttcagcctggcggatctctgagactgtcttgtgccgccagcggcttcagcttcagcgacttttggatgagctgggtccgacaggcccctggcaaaggacttgaatgggtcgccacaatcagccaggccggcagcgagaaggactacgtggactctgtgaagggcagattcaccatcagccgggacaacgccaagaagtccctgtacctccagatgaacagcctgagagccgaggacaccgccgtgtactattgtgcctctggcgtgtacagcttcgactacagaggccagggcaccctggtcacagtctcttctggtaccggcggaggcggatctggcggcggaggtagcggtggcggaggatctgaattcgacgagatcgtgatgacccagacccctgccaccctgtctgtgtctgccggcgagagagtgaccattacctgcaaggccagccagagcgtgtccaacgacgtgacctggtatcagcagaagcccggccaggcccccagactgctgatctacagcgccagcaacagatacagcggcgtgcccgccagattttccggcagcggctacggcaccgagttcaccttcaccatcagcagcgtgcagagcgaggacttcgccgtgtacttctgtcagcaagactacagcagcttcggccagggcaccaagctggaaatcaagaggctcgaggacctgaagaacgtgttcccacctgaggtggccgtgttcgagcctagcgaggccgagatcagccacacccagaaagccaccctcgtgtgcctggctaccggcttctaccccgaccatgtggaactgtcttggtgggtcaacggcaaagaggtgcacagcggcgtgtctaccgacccccagccactgaaagaacagcccgccctgaacgacagccggtactgcctgagcagcagactgagagtgtccgccaccttctggcagaacccccggaaccacttcagatgccaggtgcagttctacggcctgagcgagaacgacgagtggacccaggacagagccaagcccgtgacccagatcgtgtctgccgaagcctggggcagagccgattgcggatcccagagcttcggcctgctggaccccaagctgtgctacctgctggatggcatcctgttcatctacggcgtgatcctgaccgccctgttcctgagagtgaagttcagcagaagcgccgacgcccctgcctaccagcagggacagaaccaactgtacaacgagctgaacctgggcagacgggaagagtacgacgtgctggacaagcggagaggcagggaccctgagatgggcggaaagccccagcggagaaagaacccccaggaaggactgtataacgaactccagaaagacaagatggccgaagcctacagcgagatcggcatgaagggcgagcggagaagaggcaagggccacgatggcctgtaccagggcctgagcaccgccaccaaggacacctatgacgccctgcacatgcaggccctgcctccaagaagggccaagcgatctggatctggagcaacaaacttctcactactcaaacaagcaggtgacgtggaggagaatcccgggcctactagtatggactggatttggcgcatccttttccttgtcggcgctgctaccggcgcgcattccttcgaacaggtgcagctggtggaatctggacctggcgtggtgcagcctggcagaagcctgagaatcagctgtgccgtgtccggcttcagcgtgaccaactacggcgtgcactgggtgcgccagccacctggaaaaggactggaatggctgggcgtgatctgggctggcggcatcaccaactacaacagcgccttcatgtcccggctgaccatctccaaggacaacagcaagaacaccgtgtacctccagatgaacagcctgcgggccgaggacaccgccatgtactactgtgcttccagaggcggccactacggctacgccctggattattggggccagggaaccctcgtgaccgtgtcctctacgcgtatccagaaccctgatcctgccgtgtaccagctgcgggatagcaagagcagcgacaagagcgtgtgtctgttcaccgacttcgacagccagaccaacgtgtcccagagcaaggactccgacgtgtacatcaccgataagaccgtgctggacatgcggagcatggacttcaagagcaactccgccgtggcctggtccaacaagtccgatttcgcctgcgccaacgccttcaacaacagcattatccccgaggacacattcttcccaagccccgagagcagctgcggtacccagagttttgggttgttggaccctaaattgtgctatctgttggacggaatcctgttcatttacggagtgatcctgaccgcattgttcctgcgggttaagttttccagatccgcagacgcacccgcttaccaacaagggcagaaccaactctacaatgaacttaatttggggcggagggaagagtacgacgttctggacaaaaggaggggacgagatcccgagatgggcggaaagcctcagcgaaggaagaatccgcaagaggggctttataacgaactccagaaagataaaatggcagaagcctatagtgagattgggatgaagggagaaaggaggaggggtaaaggtcacgatgggttgtaccaaggattgagcacagccactaaagatacctatgatgcgctccacatgcaggccctgccgccaaga

SEQ ID NO: 2233 - DNA, 2853 bp, Artificial Sequence
  Synthetic Polynucloetide
atggccttaccagtgaccgccttgctcctgccgctggccttgctgctccacgccgccaggccggaagtgcagctggttgaatctggcggaggactggttcagcctggcggatctctgagactgtcttgtgccgccagcggcttcagcttcagcgacttttggatgagctgggtccgacaggcccctggcaaaggacttgaatgggtcgccacaatcagccaggccggcagcgagaaggactacgtggactctgtgaagggcagattcaccatcagccgggacaacgccaagaagtccctgtacctccagatgaacagcctgagagccgaggacaccgccgtgtactattgtgcctctggcgtgtacagcttcgactacagaggccagggcaccctggtcacagtctcttctggtaccggcggaggcggatctggcggcggaggtagcggtggcggaggatctgaattcgacatccagatgacccagaccgccagcagcctgcctgcctctctgggcgacagagtgaccatctcctgtagcgccagccaggacatcagcaactacctgaactggtatcagcagaaacccgacggcaccgtgaagctgctgatcttctacagcagcaacctgcacagcggcgtgcccagcagattttctggcggcggaagcggcaccgactacagcctgaccatcagcaatctggaacccgaggacattgccacctacttttgccaccagtacagcaagctgccctggacctttggcggaggcaccaagctggaaatcaagagactcgaggacctgaagaacgtgttcccacctgaggtggccgtgttcgagcctagcgaggccgagatcagccacacccagaaagccaccctcgtgtgcctggctaccggcttctaccccgaccatgtggaactgtcttggtgggtcaacggcaaagaggtgcacagcggcgtgtctaccgacccccagccactgaaagaacagcccgccctgaacgacagccggtactgcctgagcagcagactgagagtgtccgccaccttctggcagaacccccggaaccacttcagatgccaggtgcagttctacggcctgagcgagaacgacgagtggacccaggacagagccaagcccgtgacccagatcgtgtctgccgaagcctggggcagagccgattgcggatcccagagcttcggcctgctggaccccaagctgtgctacctgctggatggcatcctgttcatctacggcgtgatcctgaccgccctgttcctgagagtgaagttcagcagaagcgccgacgcccctgcctaccagcagggacagaaccaactgtacaacgagctgaacctgggcagacgggaagagtacgacgtgctggacaagcggagaggcagggaccctgagatgggcggaaagccccagcggagaaagaacccccaggaaggactgtataacgaactccagaaagacaagatggccgaagcctacagcgagatcggcatgaagggcgagcggagaagaggcaagggccacgatggcctgtaccagggcctgagcaccgccaccaaggacacctatgacgccctgcacatgcaggccctgcctccaagaagggccaagcgatctggatctggagcaacaaacttctcactactcaaacaagcaggtgacgtggaggagaatcccgggcctactagtatggactggatttggcgcatccttttccttgtcggcgctgctaccggcgcgcattccttcgaagaagtgaccctggtggaaagcggcggagacttcgtgaagcctggcggctctctgaaggtgtcctgtgccgccagcggcttcgcctttagccactacgccatgagctgggtgcgccagacccctgccaagagactggaatgggtggcctacatcagcagcggcggctccggcacctactactccgatagcgtgaagggccggttcaccatcagccgggacaacgccaagaacaccctgtacctccagatgcggagcctgcggagcgaggacagcgccatgtatttctgcaccagagtgaagctgggcacctattacttcgactcttggggccagggcaccaccctgaccgtgtcatctacgcgtatccagaaccctgatcctgccgtgtaccagctgcgggatagcaagagcagcgacaagagcgtgtgtctgttcaccgacttcgacagccagaccaacgtgtcccagagcaaggactccgacgtgtacatcaccgataagaccgtgctggacatgcggagcatggacttcaagagcaactccgccgtggcctggtccaacaagtccgatttcgcctgcgccaacgccttcaacaacagcattatccccgaggacacattcttcccaagccccgagagcagctgcggtacccagagttttgggttgttggaccctaaattgtgctatctgttggacggaatcctgttcatttacggagtgatcctgaccgcattgttcctgcgggttaagttttccagatccgcagacgcacccgcttaccaacaagggcagaaccaactctacaatgaacttaatttggggcggagggaagagtacgacgttctggacaaaaggaggggacgagatcccgagatgggcggaaagcctcagcgaaggaagaatccgcaagaggggctttataacgaactccagaaagataaaatggcagaagcctatagtgagattgggatgaagggagaaaggaggaggggtaaaggtcacgatgggttgtaccaaggattgagcacagccactaaagatacctatgatgcgctccacatgcaggccctgccgccaaga

SEQ ID NO: 2234 - DNA, 2859 bp, Artificial Sequence
  Synthetic Polynucloetide
atggccttaccagtgaccgccttgctcctgccgctggccttgctgctccacgccgccaggccggaagtgcagctggttgaatctggcggaggactggttcagcctggcggatctctgagactgtcttgtgccgccagcggcttcagcttcagcgacttttggatgagctgggtccgacaggcccctggcaaaggacttgaatgggtcgccacaatcagccaggccggcagcgagaaggactacgtggactctgtgaagggcagattcaccatcagccgggacaacgccaagaagtccctgtacctccagatgaacagcctgagagccgaggacaccgccgtgtactattgtgcctctggcgtgtacagcttcgactacagaggccagggcaccctggtcacagtctcttctggtaccggcggaggcggatctggcggcggaggtagcggtggcggaggatctgaattccagttcgtgctgacccagagcccttctgcctctgctgccctgggagcctctgccaagctgacctgtacactgagcagcgcccacaagacctacaccatcgactggtatcagcagcagaagggaaaggcccccagatacctgatccaagtgaagtccgacggcacctacacaaaggccaccggcgtgcccgatagattcagcggcagtagcagcggagccgatagatacctgattatccccagcgtgcaggccgacgacgaggccgattactactgcggcaccgattacaccggcggctacgtgttcggcggaggcacacaactgaccgtgacactcgaggacctgaagaacgtgttcccacctgaggtggccgtgttcgagcctagcgaggccgagatcagccacacccagaaagccaccctcgtgtgcctggctaccggcttctaccccgaccatgtggaactgtcttggtgggtcaacggcaaagaggtgcacagcggcgtgtctaccgacccccagccactgaaagaacagcccgccctgaacgacagccggtactgcctgagcagcagactgagagtgtccgccaccttctggcagaacccccggaaccacttcagatgccaggtgcagttctacggcctgagcgagaacgacgagtggacccaggacagagccaagcccgtgacccagatcgtgtctgccgaagcctggggcagagccgattgcggatcccagagcttcggcctgctggaccccaagctgtgctacctgctggatggcatcctgttcatctacggcgtgatcctgaccgccctgttcctgagagtgaagttcagcagaagcgccgacgcccctgcctaccagcagggacagaaccaactgtacaacgagctgaacctgggcagacgggaagagtacgacgtgctggacaagcggagaggcagggaccctgagatgggcggaaagccccagcggagaaagaacccccaggaaggactgtataacgaactccagaaagacaagatggccgaagcctacagcgagatcggcatgaagggcgagcggagaagaggcaagggccacgatggcctgtaccagggcctgagcaccgccaccaaggacacctatgacgccctgcacatgcaggccctgcctccaagaagggccaagcgatctggatctggagcaacaaacttctcactactcaaacaagcaggtgacgtggaggagaatcccgggcctactagtatggactggatttggcgcatccttttccttgtcggcgctgctaccggcgcgcattccttcgaagagcaactgaaagagtctggcggcggactgttcaagcccaccgataccctgaccctgacctgcaccgtgtccggcttcagcctgagctactacggcgtgaactgggtgcgccaggcccctggcaatggcctggaatggatcggcacaatcggcggcagcggcgacacctactatgcctcttgggccaagtccagaagcaccatcatcagaaacaccaacgagaacaccgtgaccctgaagatgaccagcctgacagccgccgacaccgccacctacttttgcgtcagatacgccaacatcggctacgagtatttcaacgtgtggggacccggcaccctcgtgaccgtgtcatctacgcgtatccagaaccctgatcctgccgtgtaccagctgcgggatagcaagagcagcgacaagagcgtgtgtctgttcaccgacttcgacagccagaccaacgtgtcccagagcaaggactccgacgtgtacatcaccgataagaccgtgctggacatgcggagcatggacttcaagagcaactccgccgtggcctggtccaacaagtccgatttcgcctgcgccaacgccttcaacaacagcattatccccgaggacacattcttcccaagccccgagagcagctgcggtacccagagttttgggttgttggaccctaaattgtgctatctgttggacggaatcctgttcatttacggagtgatcctgaccgcattgttcctgcgggttaagttttccagatccgcagacgcacccgcttaccaacaagggcagaaccaactctacaatgaacttaatttggggcggagggaagagtacgacgttctggacaaaaggaggggacgagatcccgagatgggcggaaagcctcagcgaaggaagaatccgcaagaggggctttataacgaactccagaaagataaaatggcagaagcctatagtgagattgggatgaagggagaaaggaggaggggtaaaggtcacgatgggttgtaccaaggattgagcacagccactaaagatacctatgatgcgctccacatgcaggccctgccgccaaga

SEQ ID NO: 2235 - DNA, 2874 bp, Artificial Sequence
  Synthetic Polynucloetide
atggccttaccagtgaccgccttgctcctgccgctggccttgctgctccacgccgccaggccggaagtgcagctggttgaatctggcggaggactggttcagcctggcggatctctgagactgtcttgtgccgccagcggcttcagcttcagcgacttttggatgagctgggtccgacaggcccctggcaaaggacttgaatgggtcgccacaatcagccaggccggcagcgagaaggactacgtggactctgtgaagggcagattcaccatcagccgggacaacgccaagaagtccctgtacctccagatgaacagcctgagagccgaggacaccgccgtgtactattgtgcctctggcgtgtacagcttcgactacagaggccagggcaccctggtcacagtctcttctggtaccggcggaggcggatctggcggcggaggtagcggtggcggaggatctgaattccagttcgtgctgacccagagcccttctgtgtctgccgccctgggagcctctgccaagctgacctgtacactgagcagcgcccacaagacctacaccatcgactggtatcagcagcagcagggcgaggcccccagatacctgatgcaagtgaagtccgacggcagctacaccaagggcaccggcgtgcccgatagattcagcggcagtagcagcggagccgatagatacctgattatccccagcgtgcaggccgacgacgaggccggatatgtgtgcggcgctgacgacaatggcggctacgtgttcggcggaggcacccaactgacagtgacactcgaggacctgaagaacgtgttcccacctgaggtggccgtgttcgagcctagcgaggccgagatcagccacacccagaaagccaccctcgtgtgcctggctaccggcttctaccccgaccatgtggaactgtcttggtgggtcaacggcaaagaggtgcacagcggcgtgtctaccgacccccagccactgaaagaacagcccgccctgaacgacagccggtactgcctgagcagcagactgagagtgtccgccaccttctggcagaacccccggaaccacttcagatgccaggtgcagttctacggcctgagcgagaacgacgagtggacccaggacagagccaagcccgtgacccagatcgtgtctgccgaagcctggggcagagccgattgcggatcccagagcttcggcctgctggaccccaagctgtgctacctgctggatggcatcctgttcatctacggcgtgatcctgaccgccctgttcctgagagtgaagttcagcagaagcgccgacgcccctgcctaccagcagggacagaaccaactgtacaacgagctgaacctgggcagacgggaagagtacgacgtgctggacaagcggagaggcagggaccctgagatgggcggaaagccccagcggagaaagaacccccaggaaggactgtataacgaactccagaaagacaagatggccgaagcctacagcgagatcggcatgaagggcgagcggagaagaggcaagggccacgatggcctgtaccagggcctgagcaccgccaccaaggacacctatgacgccctgcacatgcaggccctgcctccaagaagggccaagcgatctggatctggagcaacaaacttctcactactcaaacaagcaggtgacgtggaggagaatcccgggcctactagtatggactggatttggcgcatccttttccttgtcggcgctgctaccggcgcgcattccttcgaacagagcgtgaaagagtctgagggcggcctgttcaagcccaccgataccctgaccctgacctgcaccgtgtccggcttcagcctgagcagacacgccctgacatgggtgcgccaggcccctggaaatggcctggaatggatcggagccatcgacaacgccggcaccacctactatgcctcttgggccaagtccagaagcaccatcacccggaacaccgacctgcacaccgtgaccctgaagatgaccagcctgaccgccagcgacaccgccacctacttttgcgccagagtgttctacgacatcaacagcggctactacctggacggcatggacctgtggggacctggcacacttgtgaccgtgtccagcacgcgtatccagaaccctgatcctgccgtgtaccagctgcgggatagcaagagcagcgacaagagcgtgtgtctgttcaccgacttcgacagccagaccaacgtgtcccagagcaaggactccgacgtgtacatcaccgataagaccgtgctggacatgcggagcatggacttcaagagcaactccgccgtggcctggtccaacaagtccgatttcgcctgcgccaacgccttcaacaacagcattatccccgaggacacattcttcccaagccccgagagcagctgcggtacccagagttttgggttgttggaccctaaattgtgctatctgttggacggaatcctgttcatttacggagtgatcctgaccgcattgttcctgcgggttaagttttccagatccgcagacgcacccgcttaccaacaagggcagaaccaactctacaatgaacttaatttggggcggagggaagagtacgacgttctggacaaaaggaggggacgagatcccgagatgggcggaaagcctcagcgaaggaagaatccgcaagaggggctttataacgaactccagaaagataaaatggcagaagcctatagtgagattgggatgaagggagaaaggaggaggggtaaaggtcacgatgggttgtaccaaggattgagcacagccactaaagatacctatgatgcgctccacatgcaggccctgccgccaaga

SEQ ID NO: 2236 - DNA, 2856 bp, Artificial Sequence
  Synthetic Polynucloetide
atggccttaccagtgaccgccttgctcctgccgctggccttgctgctccacgccgccaggccggaagtgcagctggttgaatctggcggaggactggttcagcctggcggatctctgagactgtcttgtgccgccagcggcttcagcttcagcgacttttggatgagctgggtccgacaggcccctggcaaaggacttgaatgggtcgccacaatcagccaggccggcagcgagaaggactacgtggactctgtgaagggcagattcaccatcagccgggacaacgccaagaagtccctgtacctccagatgaacagcctgagagccgaggacaccgccgtgtactattgtgcctctggcgtgtacagcttcgactacagaggccagggcaccctggtcacagtctcttctggtaccggcggaggcggatctggcggcggaggtagcggtggcggaggatctgaattcgacatccagatgacccagagccccagcagcctgtctgccagcgtgggcgacagagtgaccatcacctgtagagccagccagggcatcagctcttggctggcctggtatcagcagaagcccgagaaggcccccaagagcctgatctacgccgcctctagtctccagagcggcgtgcccagcagattttctggcagcggctccggcaccgacttcaccctgacaatcagctccctccagcccgaggacttcgccacctactactgccagcagtacaacagctacccccccacctttggcggaggcaccaaggtggaaatcaagctcgaggacctgaagaacgtgttcccacctgaggtggccgtgttcgagcctagcgaggccgagatcagccacacccagaaagccaccctcgtgtgcctggctaccggcttctaccccgaccatgtggaactgtcttggtgggtcaacggcaaagaggtgcacagcggcgtgtctaccgacccccagccactgaaagaacagcccgccctgaacgacagccggtactgcctgagcagcagactgagagtgtccgccaccttctggcagaacccccggaaccacttcagatgccaggtgcagttctacggcctgagcgagaacgacgagtggacccaggacagagccaagcccgtgacccagatcgtgtctgccgaagcctggggcagagccgattgcggatcccagagcttcggcctgctggaccccaagctgtgctacctgctggatggcatcctgttcatctacggcgtgatcctgaccgccctgttcctgagagtgaagttcagcagaagcgccgacgcccctgcctaccagcagggacagaaccaactgtacaacgagctgaacctgggcagacgggaagagtacgacgtgctggacaagcggagaggcagggaccctgagatgggcggaaagccccagcggagaaagaacccccaggaaggactgtataacgaactccagaaagacaagatggccgaagcctacagcgagatcggcatgaagggcgagcggagaagaggcaagggccacgatggcctgtaccagggcctgagcaccgccaccaaggacacctatgacgccctgcacatgcaggccctgcctccaagaagggccaagcgatctggatctggagcaacaaacttctcactactcaaacaagcaggtgacgtggaggagaatcccgggcctactagtatggactggatttggcgcatccttttccttgtcggcgctgctaccggcgcgcattccttcgaagaagtgcaactggtggaatcaggcggcggactggtgcagcctggcgagtctctgagactgagctgtgtggcctccggcttcaccttcagccggtacaagatgaactgggtgcgccaggcccctggcaagggactggaatgggtgtcctacatcagccgcagcggcagagacatctactacgccgacagcgtgaagggccggttcaccatcagcagagacaacgccaagaacagcctgtacctccagatgaactccctgcgggacgaggacaccgccgtgtactactgtgccggaaccgtgaccacctattactacttcggcatggacgtgtggggccacggcaccaccgtgacagtgtcatctacgcgtatccagaaccctgatcctgccgtgtaccagctgcgggatagcaagagcagcgacaagagcgtgtgtctgttcaccgacttcgacagccagaccaacgtgtcccagagcaaggactccgacgtgtacatcaccgataagaccgtgctggacatgcggagcatggacttcaagagcaactccgccgtggcctggtccaacaagtccgatttcgcctgcgccaacgccttcaacaacagcattatccccgaggacacattcttcccaagccccgagagcagctgcggtacccagagttttgggttgttggaccctaaattgtgctatctgttggacggaatcctgttcatttacggagtgatcctgaccgcattgttcctgcgggttaagttttccagatccgcagacgcacccgcttaccaacaagggcagaaccaactctacaatgaacttaatttggggcggagggaagagtacgacgttctggacaaaaggaggggacgagatcccgagatgggcggaaagcctcagcgaaggaagaatccgcaagaggggctttataacgaactccagaaagataaaatggcagaagcctatagtgagattgggatgaagggagaaaggaggaggggtaaaggtcacgatgggttgtaccaaggattgagcacagccactaaagatacctatgatgcgctccacatgcaggccctgccgccaaga

SEQ ID NO: 2237 - DNA, 2859 bp, Artificial Sequence
  Synthetic Polynucloetide
atggccttaccagtgaccgccttgctcctgccgctggccttgctgctccacgccgccaggccggaagtgcagctggttgaatctggcggaggactggttcagcctggcggatctctgagactgtcttgtgccgccagcggcttcagcttcagcgacttttggatgagctgggtccgacaggcccctggcaaaggacttgaatgggtcgccacaatcagccaggccggcagcgagaaggactacgtggactctgtgaagggcagattcaccatcagccgggacaacgccaagaagtccctgtacctccagatgaacagcctgagagccgaggacaccgccgtgtactattgtgcctctggcgtgtacagcttcgactacagaggccagggcaccctggtcacagtctcttctggtaccggcggaggcggatctggcggcggaggtagcggtggcggaggatctgaattcgacatccagatgacccagagccccagcagcctgtctgccagcgtgggcgacagagtgaccatcacctgtagagccagccagggcatcagctcttggctggcctggtatcagcagaagcccgagaaggcccccaagagcctgatctacgccgcctctagtctccagagcggcgtgcccagcagattttctggcagcggctccggcaccgacttcaccctgacaatcagctccctccagcccgaggacttcgccacctactactgccagcagtacaacagctaccctcccacctttggcggaggcaccaaggtggaaatcaagctcgaggacctgaagaacgtgttcccacctgaggtggccgtgttcgagcctagcgaggccgagatcagccacacccagaaagccaccctcgtgtgcctggctaccggcttctaccccgaccatgtggaactgtcttggtgggtcaacggcaaagaggtgcacagcggcgtgtctaccgacccccagccactgaaagaacagcccgccctgaacgacagccggtactgcctgagcagcagactgagagtgtccgccaccttctggcagaacccccggaaccacttcagatgccaggtgcagttctacggcctgagcgagaacgacgagtggacccaggacagagccaagcccgtgacccagatcgtgtctgccgaagcctggggcagagccgattgcggatcccagagcttcggcctgctggaccccaagctgtgctacctgctggatggcatcctgttcatctacggcgtgatcctgaccgccctgttcctgagagtgaagttcagcagaagcgccgacgcccctgcctaccagcagggacagaaccaactgtacaacgagctgaacctgggcagacgggaagagtacgacgtgctggacaagcggagaggcagggaccctgagatgggcggaaagccccagcggagaaagaacccccaggaaggactgtataacgaactccagaaagacaagatggccgaagcctacagcgagatcggcatgaagggcgagcggagaagaggcaagggccacgatggcctgtaccagggcctgagcaccgccaccaaggacacctatgacgccctgcacatgcaggccctgcctccaagaagggccaagcgatctggatctggagcaacaaacttctcactactcaaacaagcaggtgacgtggaggagaatcccgggcctactagtatggactggatttggcgcatccttttccttgtcggcgctgctaccggcgcgcattccttcgaagaagtgcaactggtggaatccgggggaggctctgtgcagcctggcgagtctctgagactgagctgtgtggcctccggcttcaccttcagccggtacaagatgaactgggtgcgccaggcccctggcaagggactggaatgggtgtcctacatcagccgcagcggcagagacatctactacgccgacagcgtgaagggccggttcaccatcagcagagacaacgccaagaacagcctgtacctccagatgaactccctgcgggacgaggacaccgccgtgtactactgtgccggaaccgtgaccacctattactacgacttcggcatggacgtgtggggccagggcacaaccgtgacagtgtctagcacgcgtatccagaaccctgatcctgccgtgtaccagctgcgggatagcaagagcagcgacaagagcgtgtgtctgttcaccgacttcgacagccagaccaacgtgtcccagagcaaggactccgacgtgtacatcaccgataagaccgtgctggacatgcggagcatggacttcaagagcaactccgccgtggcctggtccaacaagtccgatttcgcctgcgccaacgccttcaacaacagcattatccccgaggacacattcttcccaagccccgagagcagctgcggtacccagagttttgggttgttggaccctaaattgtgctatctgttggacggaatcctgttcatttacggagtgatcctgaccgcattgttcctgcgggttaagttttccagatccgcagacgcacccgcttaccaacaagggcagaaccaactctacaatgaacttaatttggggcggagggaagagtacgacgttctggacaaaaggaggggacgagatcccgagatgggcggaaagcctcagcgaaggaagaatccgcaagaggggctttataacgaactccagaaagataaaatggcagaagcctatagtgagattgggatgaagggagaaaggaggaggggtaaaggtcacgatgggttgtaccaaggattgagcacagccactaaagatacctatgatgcgctccacatgcaggccctgccgccaaga

SEQ ID NO: 2238 - DNA, 2853 bp, Artificial Sequence
  Synthetic Polynucloetide
atggccttaccagtgaccgccttgctcctgccgctggccttgctgctccacgccgccaggccggaagtgcagctggttgaatctggcggaggactggttcagcctggcggatctctgagactgtcttgtgccgccagcggcttcagcttcagcgacttttggatgagctgggtccgacaggcccctggcaaaggacttgaatgggtcgccacaatcagccaggccggcagcgagaaggactacgtggactctgtgaagggcagattcaccatcagccgggacaacgccaagaagtccctgtacctccagatgaacagcctgagagccgaggacaccgccgtgtactattgtgcctctggcgtgtacagcttcgactacagaggccagggcaccctggtcacagtctcttctggtaccggcggaggcggatctggcggcggaggtagcggtggcggaggatctgaattccagtctgtgctgacacagcctccatctgcctctggcacacctggacagagagtgaccatcagctgtagcggcagcagaagcaacgtcggcggcaactacgtgttctggtatcagcaggtcccaggcgctacccctaagctgctgatctacagaagcaatcagcggcctagcggcgtgcccgatagatttgccggaagcaagagcggcagctctgccagccttgccatctctggactgagaagcgaggacgaggccgactactactgtgccacctgggatgatagcctgagcggcttcgtgtttggcaccggcaccaaagtgacagtgcttggtctcgaggacctgaagaacgtgttcccacctgaggtggccgtgttcgagcctagcgaggccgagatcagccacacccagaaagccaccctcgtgtgcctggctaccggcttctaccccgaccatgtggaactgtcttggtgggtcaacggcaaagaggtgcacagcggcgtgtctaccgacccccagccactgaaagaacagcccgccctgaacgacagccggtactgcctgagcagcagactgagagtgtccgccaccttctggcagaacccccggaaccacttcagatgccaggtgcagttctacggcctgagcgagaacgacgagtggacccaggacagagccaagcccgtgacccagatcgtgtctgccgaagcctggggcagagccgattgcggatcccagagcttcggcctgctggaccccaagctgtgctacctgctggatggcatcctgttcatctacggcgtgatcctgaccgccctgttcctgagagtgaagttcagcagaagcgccgacgcccctgcctaccagcagggacagaaccaactgtacaacgagctgaacctgggcagacgggaagagtacgacgtgctggacaagcggagaggcagggaccctgagatgggcggaaagccccagcggagaaagaacccccaggaaggactgtataacgaactccagaaagacaagatggccgaagcctacagcgagatcggcatgaagggcgagcggagaagaggcaagggccacgatggcctgtaccagggcctgagcaccgccaccaaggacacctatgacgccctgcacatgcaggccctgcctccaagaagggccaagcgatctggatctggagcaacaaacttctcactactcaaacaagcaggtgacgtggaggagaatcccgggcctactagtatggactggatttggcgcatccttttccttgtcggcgctgctaccggcgcgcattccttcgaagttcagctggttgaatctggcggcggactggttaagcctggcggatctctgagactgtcttgtgccgccagcggcttcaccttcagcgattactacatgagctggatcagacaggcccctggcaaaggactggaatgggtgtcctacatcagcagcagcggctccaccatctactacgccgatagcgtgaagggcagattcaccatcagccgggacaacgccaagaacagcctgtacctccagatgaactccctgagagccgaggacaccgccgtgtactattgcgccagaggctacggcaaagcctacgatcaatggggccagggcacactggtcaccgtttcttctacgcgtatccagaaccctgatcctgccgtgtaccagctgcgggatagcaagagcagcgacaagagcgtgtgtctgttcaccgacttcgacagccagaccaacgtgtcccagagcaaggactccgacgtgtacatcaccgataagaccgtgctggacatgcggagcatggacttcaagagcaactccgccgtggcctggtccaacaagtccgatttcgcctgcgccaacgccttcaacaacagcattatccccgaggacacattcttcccaagccccgagagcagctgcggtacccagagttttgggttgttggaccctaaattgtgctatctgttggacggaatcctgttcatttacggagtgatcctgaccgcattgttcctgcgggttaagttttccagatccgcagacgcacccgcttaccaacaagggcagaaccaactctacaatgaacttaatttggggcggagggaagagtacgacgttctggacaaaaggaggggacgagatcccgagatgggcggaaagcctcagcgaaggaagaatccgcaagaggggctttataacgaactccagaaagataaaatggcagaagcctatagtgagattgggatgaagggagaaaggaggaggggtaaaggtcacgatgggttgtaccaaggattgagcacagccactaaagatacctatgatgcgctccacatgcaggccctgccgccaaga

SEQ ID NO: 2239 - DNA, 2850 bp, Artificial Sequence
  Synthetic Polynucloetide
atggccttaccagtgaccgccttgctcctgccgctggccttgctgctccacgccgccaggccggaagtgcagctggttgaatctggcggaggactggttcagcctggcggatctctgagactgtcttgtgccgccagcggcttcagcttcagcgacttttggatgagctgggtccgacaggcccctggcaaaggacttgaatgggtcgccacaatcagccaggccggcagcgagaaggactacgtggactctgtgaagggcagattcaccatcagccgggacaacgccaagaagtccctgtacctccagatgaacagcctgagagccgaggacaccgccgtgtactattgtgcctctggcgtgtacagcttcgactacagaggccagggcaccctggtcacagtctcttctggtaccggcggaggcggatctggcggcggaggtagcggtggcggaggatctgaattccagtctgtggtcacacagccacctagcatgtctgccgctccaggccagcaagtgaccatctcttgtagcggcggcaacagcaacatcgagcggaactacgtgtcctggtatctgcaactgcctggcacagcccctaagctggtcatcttcgacaacgacagacggcccagcggcatccccgatagattttctggcagcaagagcggcaccagcgccacactgggaattaccggacttcagacaggcgacgaggccgactactactgtggcacatgggactctagcctgagaggctgggttttcggcggaggcacaaagctgacagtgcttggtctcgaggacctgaagaacgtgttcccacctgaggtggccgtgttcgagcctagcgaggccgagatcagccacacccagaaagccaccctcgtgtgcctggctaccggcttctaccccgaccatgtggaactgtcttggtgggtcaacggcaaagaggtgcacagcggcgtgtctaccgacccccagccactgaaagaacagcccgccctgaacgacagccggtactgcctgagcagcagactgagagtgtccgccaccttctggcagaacccccggaaccacttcagatgccaggtgcagttctacggcctgagcgagaacgacgagtggacccaggacagagccaagcccgtgacccagatcgtgtctgccgaagcctggggcagagccgattgcggatcccagagcttcggcctgctggaccccaagctgtgctacctgctggatggcatcctgttcatctacggcgtgatcctgaccgccctgttcctgagagtgaagttcagcagaagcgccgacgcccctgcctaccagcagggacagaaccaactgtacaacgagctgaacctgggcagacgggaagagtacgacgtgctggacaagcggagaggcagggaccctgagatgggcggaaagccccagcggagaaagaacccccaggaaggactgtataacgaactccagaaagacaagatggccgaagcctacagcgagatcggcatgaagggcgagcggagaagaggcaagggccacgatggcctgtaccagggcctgagcaccgccaccaaggacacctatgacgccctgcacatgcaggccctgcctccaagaagggccaagcgatctggatctggagcaacaaacttctcactactcaaacaagcaggtgacgtggaggagaatcccgggcctactagtatggactggatttggcgcatccttttccttgtcggcgctgctaccggcgcgcattccttcgaagtgcagctcgttgagtctggcggcggactgattcaacctggcggaagcctgagactgagctgtgccgcttccggcttcaccttcagcaactacgccatgaactgggttcgacaggcccctggcaaaggactggaatgggtgtccaccatcaacggcagaggcagcagcaccatctacgccgattctgtgaagggcagattcaccatcagccgggacaacagcaagaacaccctgtacctccagatgaactccctgagagccgaggacaccgccacctattactgtgcccggtacatcagcagaggactgggcgattcttggggccagggcacactggttacagtgacgcgtatccagaaccctgatcctgccgtgtaccagctgcgggatagcaagagcagcgacaagagcgtgtgtctgttcaccgacttcgacagccagaccaacgtgtcccagagcaaggactccgacgtgtacatcaccgataagaccgtgctggacatgcggagcatggacttcaagagcaactccgccgtggcctggtccaacaagtccgatttcgcctgcgccaacgccttcaacaacagcattatccccgaggacacattcttcccaagccccgagagcagctgcggtacccagagttttgggttgttggaccctaaattgtgctatctgttggacggaatcctgttcatttacggagtgatcctgaccgcattgttcctgcgggttaagttttccagatccgcagacgcacccgcttaccaacaagggcagaaccaactctacaatgaacttaatttggggcggagggaagagtacgacgttctggacaaaaggaggggacgagatcccgagatgggcggaaagcctcagcgaaggaagaatccgcaagaggggctttataacgaactccagaaagataaaatggcagaagcctatagtgagattgggatgaagggagaaaggaggaggggtaaaggtcacgatgggttgtaccaaggattgagcacagccactaaagatacctatgatgcgctccacatgcaggccctgccgccaaga

SEQ ID NO: 2240 - DNA, 2853 bp, Artificial Sequence
  Synthetic Polynucloetide
atggccttaccagtgaccgccttgctcctgccgctggccttgctgctccacgccgccaggccggaagtgcagctggttgaatctggcggaggactggttcagcctggcggatctctgagactgtcttgtgccgccagcggcttcagcttcagcgacttttggatgagctgggtccgacaggcccctggcaaaggacttgaatgggtcgccacaatcagccaggccggcagcgagaaggactacgtggactctgtgaagggcagattcaccatcagccgggacaacgccaagaagtccctgtacctccagatgaacagcctgagagccgaggacaccgccgtgtactattgtgcctctggcgtgtacagcttcgactacagaggccagggcaccctggtcacagtctcttctggtaccggcggaggcggatctggcggcggaggtagcggtggcggaggatctgaattcgacgtcgtgatgacccagacccctctgagcctgcctgtgtccctgggcgatcaggccagcatcagctgtagaagcagccagagcctggtgcacagcaacggcaacacctacctgcactggtatctccagaagcccggccagagccccaagctgctgatctacaaggtgtccaacagattcagcggcgtgcccgacagattctccggcagcggctctggcaccgacttcaccctgaagatcagccgggtggaagccgaggacctgggcgtgtacttctgtagccagaacacccccgtgccccccaagtttggcagcggcaccaagctggaaatcaagctcgaggacctgaagaacgtgttcccacctgaggtggccgtgttcgagcctagcgaggccgagatcagccacacccagaaagccaccctcgtgtgcctggctaccggcttctaccccgaccatgtggaactgtcttggtgggtcaacggcaaagaggtgcacagcggcgtgtctaccgacccccagccactgaaagaacagcccgccctgaacgacagccggtactgcctgagcagcagactgagagtgtccgccaccttctggcagaacccccggaaccacttcagatgccaggtgcagttctacggcctgagcgagaacgacgagtggacccaggacagagccaagcccgtgacccagatcgtgtctgccgaagcctggggcagagccgattgcggatcccagagcttcggcctgctggaccccaagctgtgctacctgctggatggcatcctgttcatctacggcgtgatcctgaccgccctgttcctgagagtgaagttcagcagaagcgccgacgcccctgcctaccagcagggacagaaccaactgtacaacgagctgaacctgggcagacgggaagagtacgacgtgctggacaagcggagaggcagggaccctgagatgggcggaaagccccagcggagaaagaacccccaggaaggactgtataacgaactccagaaagacaagatggccgaagcctacagcgagatcggcatgaagggcgagcggagaagaggcaagggccacgatggcctgtaccagggcctgagcaccgccaccaaggacacctatgacgccctgcacatgcaggccctgcctccaagaagggccaagcgatctggatctggagcaacaaacttctcactactcaaacaagcaggtgacgtggaggagaatcccgggcctactagtatggactggatttggcgcatccttttccttgtcggcgctgctaccggcgcgcattccttcgaacaggtgcagctccagcagtctggcgctgaactcgtgcggcctggcgcttctgtgaagctgtcttgcaaggccagcggctacaccttcaacgactacgagatgcactgggtcaagcagacccctgtgcacggcctgaagtggatcggagccctggaacccaagaccggcgataccgcctacagccagaagttcaagggcaaggccaccctgaccgccgacaagagcagcagcacagcctacatggaactgcggagcctgaccagcgaggacagcgccgtgtactactgcaccagctgctactactacacctacagcggccagggcaccctcgtgacagtgtctgctacgcgtatccagaaccctgatcctgccgtgtaccagctgcgggatagcaagagcagcgacaagagcgtgtgtctgttcaccgacttcgacagccagaccaacgtgtcccagagcaaggactccgacgtgtacatcaccgataagaccgtgctggacatgcggagcatggacttcaagagcaactccgccgtggcctggtccaacaagtccgatttcgcctgcgccaacgccttcaacaacagcattatccccgaggacacattcttcccaagccccgagagcagctgcggtacccagagttttgggttgttggaccctaaattgtgctatctgttggacggaatcctgttcatttacggagtgatcctgaccgcattgttcctgcgggttaagttttccagatccgcagacgcacccgcttaccaacaagggcagaaccaactctacaatgaacttaatttggggcggagggaagagtacgacgttctggacaaaaggaggggacgagatcccgagatgggcggaaagcctcagcgaaggaagaatccgcaagaggggctttataacgaactccagaaagataaaatggcagaagcctatagtgagattgggatgaagggagaaaggaggaggggtaaaggtcacgatgggttgtaccaaggattgagcacagccactaaagatacctatgatgcgctccacatgcaggccctgccgccaaga

SEQ ID NO: 2241 - DNA, 2850 bp, Artificial Sequence
  Synthetic Polynucloetide
atggccttaccagtgaccgccttgctcctgccgctggccttgctgctccacgccgccaggccggaagtgcagctggttgaatctggcggaggactggttcagcctggcggatctctgagactgtcttgtgccgccagcggcttcagcttcagcgacttttggatgagctgggtccgacaggcccctggcaaaggacttgaatgggtcgccacaatcagccaggccggcagcgagaaggactacgtggactctgtgaagggcagattcaccatcagccgggacaacgccaagaagtccctgtacctccagatgaacagcctgagagccgaggacaccgccgtgtactattgtgcctctggcgtgtacagcttcgactacagaggccagggcaccctggtcacagtctcttctggtaccggcggaggcggatctggcggcggaggtagcggtggcggaggatctgaattcgacatccaactgacccagagccccagcagcctgtctgcctctgtgggcgacagagtgaccatcacctgtagagccagccagggcatcagaaacgacctgggctggtatcagcagaagcccggcaaggcccccaagcggctgatctatgctgccagctccctccagaatggcgtgcccagcagattttccggcagcggctctggcaccgagttcaccctgaccatcagctccctccagcccgaggacttcgccacctactactgcctccagcacaacacctaccccgccttcggccagggcaccaaggtggaaatcaagagactcgaggacctgaagaacgtgttcccacctgaggtggccgtgttcgagcctagcgaggccgagatcagccacacccagaaagccaccctcgtgtgcctggctaccggcttctaccccgaccatgtggaactgtcttggtgggtcaacggcaaagaggtgcacagcggcgtgtctaccgacccccagccactgaaagaacagcccgccctgaacgacagccggtactgcctgagcagcagactgagagtgtccgccaccttctggcagaacccccggaaccacttcagatgccaggtgcagttctacggcctgagcgagaacgacgagtggacccaggacagagccaagcccgtgacccagatcgtgtctgccgaagcctggggcagagccgattgcggatcccagagcttcggcctgctggaccccaagctgtgctacctgctggatggcatcctgttcatctacggcgtgatcctgaccgccctgttcctgagagtgaagttcagcagaagcgccgacgcccctgcctaccagcagggacagaaccaactgtacaacgagctgaacctgggcagacgggaagagtacgacgtgctggacaagcggagaggcagggaccctgagatgggcggaaagccccagcggagaaagaacccccaggaaggactgtataacgaactccagaaagacaagatggccgaagcctacagcgagatcggcatgaagggcgagcggagaagaggcaagggccacgatggcctgtaccagggcctgagcaccgccaccaaggacacctatgacgccctgcacatgcaggccctgcctccaagaagggccaagcgatctggatctggagcaacaaacttctcactactcaaacaagcaggtgacgtggaggagaatcccgggcctactagtatggactggatttggcgcatccttttccttgtcggcgctgctaccggcgcgcattccttcgaacaggtgcaactccaggaatctggccctggcctcgtgaagcctagccagaccctgagcctgacctgtaccgtgtctggcggcagcatcagcagcttcaactactactggtcctggatcagacaccaccctggcaagggcctggaatggatcggctacatctactacagcggcagcacctacagcaaccccagcctgaagtcccgcgtgaccatctccgtggacaccagcaagaaccagtttagcctgaccctgtccagcgtgacagccgccgataccgccgtgtactactgcgccagaggctacaactggaactacttcgactactggggccagggaaccctcgtgaccgtgtctagtacgcgtatccagaaccctgatcctgccgtgtaccagctgcgggatagcaagagcagcgacaagagcgtgtgtctgttcaccgacttcgacagccagaccaacgtgtcccagagcaaggactccgacgtgtacatcaccgataagaccgtgctggacatgcggagcatggacttcaagagcaactccgccgtggcctggtccaacaagtccgatttcgcctgcgccaacgccttcaacaacagcattatccccgaggacacattcttcccaagccccgagagcagctgcggtacccagagttttgggttgttggaccctaaattgtgctatctgttggacggaatcctgttcatttacggagtgatcctgaccgcattgttcctgcgggttaagttttccagatccgcagacgcacccgcttaccaacaagggcagaaccaactctacaatgaacttaatttggggcggagggaagagtacgacgttctggacaaaaggaggggacgagatcccgagatgggcggaaagcctcagcgaaggaagaatccgcaagaggggctttataacgaactccagaaagataaaatggcagaagcctatagtgagattgggatgaagggagaaaggaggaggggtaaaggtcacgatgggttgtaccaaggattgagcacagccactaaagatacctatgatgcgctccacatgcaggccctgccgccaaga

(The sequence listing continues in the following parts.)
